United States Patent Application Publication US 2007/0054278 A1 - sequence listing, part 50

SEQ ID NO: 94899 - DNA, 66125 bp, Homo sapiens
  misc_feature (1)...(66125): n = A,T,C or G
ttgtgtagttggcctgggttgctagtgaagggccaagaagaggaaaaaagggagaataataagaaaggtttcttaagagggaataacagacccaagagacggtggaacccactttgttttctaaggaatcctacaagtttcctgtggtggactgtaaatcacacacttgtcatgactactccactttctcatgggatttctgccctgcaggagacaatgccacactgaactctgcttggagataccttgtgaagctcactgggagtttctgagagctataaaataggtagggattctggagaacagagagcaataattttatttccaagagaatgctgaggtctaactagtagggtttaaatgattagcccaagaccacatgtcttttagcaacagaattaagtttctagacctccccttcagcactgtatgttaccgtgcctcatccaattatctgaattgcaatgatcctgctagggaatcttgaggcttatcaaggttgttttaaattttataaacaatggtttgttatttattccggaatattataggctcatctggaaaattctatctggaaaaaaacgatgcccctaaagcctgaatggttttatataccaagataagactgagagcccagaagaggtacaggaaacacctcagacattctcaaaactttatacaaaatatatttgcctcaaaaagcaaggagataatgctgaataaaagttgacacattattgtgtaaacactaatataacaatatctttaagcttctttaacaatcttagcgcttcaacattattttatttttattgacctaataataagtcatttgaagttttgcataaagttgccaagttcctatttctcagggaaaaactttcagtaaggaagagcccttaatttcttctttagtacctgcttaaattgaatggttcctcaaacattactattatttttgagactgagtttcactctgtcacccaggtgggagtgcagtggcatgatcatggcttgctgcagccttgacctcctaggctcaagtgaccctcccacatcagccttccaaatagctgggctactggtgtgcaccaccataccaggctaatttttaaaaaattttttgcagagacaaggttttgccatgttgcccaggctggtctcgaattcctgggctcaagcgatccacccaccttgggctcccaaagtgctgggattacaggcataagccactgtgcctggcctcagaaatattttgtacgaagtaataaacataaccattaagtgcataatatttaaagtcattcataaaactcaccctcctaaatatgggaaaagacacatcacacaatcaccttgctgttgattacatggtctggggtctctgccttctccccttgcaacagccctctagccatgggggcttgttaagagtagatgtgaaggtttcaggtcgcagcctgtgggactactgcttagtgtgtggggtgctttgcctgcacccatggtttctttaagtcttaaatgatgcccgctccaagccatcatcctaacccccactcctccactcccgcccttggccaaagcatagattgtaaccccctgctactctctgagattggcctttgatgaggaattcagggctttccccatatcttctctcccccacctttatcaaggggcgctgctttttcttccctccttctcaagtgtcttttcgcaccatcaccaaccaacaccttccaagacacttccttgctttggccagaagccatcaggtaaggttggaaagagtctctgacctcccttgtttagttttagaatctcatttactcactctccgccagcctgggaaatgactttgggtcctcagccctgccactctctgctgtcatcatcagctgatgcattggttttagctcaggttttgataaggtgaagagaattgttaccagggttactcagacctgccagctctcagagtccttggtggttaaacctggagaaagagcacatgaagacacttgaaagcacatatgatccctctgcattgtttcattttcttgtaattgctttcgcttttaaaaattgaagaagttttaagcagggctctcatttggtcatccttgcaatccactggggtctagtttggaatctcacaactggaacaaaaagaaccttggatccagtgcatgccttggttttggtgctgctcctgcttctcaagatcctcagcagggattaagaaagaaattggggtacacagcagatccctgaaattggcagacttgacctcctggaaaaattgctgtgtttttcactttctgttcaggaccactactaaatgctgaaatgtggatgcataccaaactaaaagtgattcgttgtgtactaaagttttttaaaattatttgtgtaaaatcatcttttgaagcagaatcaagtctgaaaagcaactgatgtttccattaatctttttctggggaaaacctcagttctaaggatttagcatcctgtaagtgaagtttaacataacagtattccataagcagcctttttatggtcagaccattgcctaattttaatataattttaaaatgtgtgcattaattaaaaaatgggaaaaggatcttaataaacatttctccaaagaggatatataaatggccaataagcacatgaaaaaatactcaacactcttagtcttcacaaaaaaatgtaaatcaaaaccacaagacaccacttcacattcattagagtggctgtattttttttaaaagacaatagcaagggctgttatattgttattgtaactaaaggcacagagaaattgaaactcatattgctggcagatatgtaaaaacggtacagttcctttggaaatcagtttgacagtttttgaaaatgttaaacatagagttaacatacgaccccacaactccactcctaaaatactaattgaaagcctgttcacacaaagcttgtacacaaatgtttatagtaccattatttaaatagacaaaaggtagaaacaacccaaatgtccatgaactgatgaatggacaaacaaaaagtggttcatacattcatcagtcagttgatgaatcatgtttaatgcctgttggtaacacagaatttagagccactttgcttcactcttttcccagtcttgttatttatttcaatggaaacaaaatgttcctgtaaagatgcctggatttttggatatagaaaaagttgtgggactgaaaaaaatgagtggaacagagatttgagtatgtagaaaataatctttttaaatatttgaaccaaatgttctaaaattagcttatggtgactgcataaccctgtgaatatagtaaaaccattgatttgtggactttaaatggccgaactttatggtatgtaaattatatttcaacaaagatgttaacaaaatttttaaatgttatattttgtttagtaagaaggtatttttttctgagatgcaaaaacatcatagttatcttaactcttcccctcagattttggtggcaacttttcatgtactgtaaatatcatcaaaagcaaccccaaatcaatgattagtactaaaaagagaccttttgtatcaaacactgttcatctgctgttggcagtggagttcatttttaatgctacattgccctctttgcgtccagtgtactttaatttgctgttggctgcttcccaaaatgaccatatttctactgcccccccattaaaaagaagaaacatcacaaaattatttcttcaacatgttcattttatacatcagaatgaaaggaggttacaggtctcccatagattagggctatttaccatatctccttacttattagagtcacaaatcttagcaggaagccagttatgcagattgaaacatgaacttcttagtctagcattttaatactttttaatggtgaaatttatctagacttatctataaagtcttttgcaatttgtggtatgctgagtaagaactacagaagaacaaaaataaaagatttttttaatggcaacttaaaaaattatcaccacttgtactacttacaaattttcctccaaaaagttactttgactcatagtcaatttttaatcttggaacaacttcttgctatcacaaatacttcaagtgcctaaaacatcttccttaccagccaatatctcccgctccactctaagaaatgcaaactcgttcaagtttaacctgaatgcaacataatttggaatctttcattaaaatatatatcacacattttgaagccaaacatattttaaaatacctgtttttggtgatttggggtacatatgcttatcagtataacatattttaaaagatttttttctacatactcaaatctgtgttccattcattttttcactcccacacctttttgtctatccgataattcaggaatctttacagaaacatcttgtttccattgaaataaacaacaagagtaggaaaaagagtgaagcgaaatggttctaaattctatgcaccaacaggcattaaacatgcataaacttttaaagagatgccaagactcactaaaaaggagaaaaaaaatacaacgaaggtttctgagtagtttttagttactcaatttaaaaactttatcttgtaagcaaactttaacatcatccagagcatcgcacttatatatgaaagaaaaagttctttatcacaccttcagaaattacaactacaaattcctaatcccttatttaaaatctttttggctagatatgtttcaaaattcagaacttttcttagaatagtacgtctgccatatattatgaaacacttccagcaagctgtactgtaatcaaacacaatatttctgtagaaaacttatgaatatttacacaaagggaacattcagttacacatagcctcacttcccttcaggtcaaactttactgctaaaggagttagaaacgacagacaaaggaatggggcctgtcatgacatgttaatttgaaatctaaatctttatctttgataactagttcagagtcagtgtaaacatttggtctttccttccacaaaaaaatgaaacagtgtatttaaaattaaaaatgaaacagtatattttatttcagaaggtaaaagcaaaatgaattaatctgtgaaactaagtcaatcacattatgatcttctagaacttgggtagctccactctggttaaagattccatttcttggcacaacagtaaaagacatcagataggcccccaagcttgcagggtaagcatccctggggtattcaaataacttgggtagcaatgaagagctgcagaagagcaaggagacccgagatgatgtagtgtgctgcggcatacctgagttgggcaaactcagcctccgaagattaaaggaaagagcccaagtaggaatctgtgtgatcactgttcttttgccaagacacggggtggacaataagattcctttacaaagcactggtgtaagtgttcgcctggtgctgcaaaaagcggctcactgggaatggggaggagcgtgtggtaagccagacctgcggcgagaagttgggtgaaaatgggtcttaaccatcgcttcctgcatctatcccagagggttgggtaccttcgtgggcggagcgcggcctgcccagagtgccttctagatcctgggtcaggcgccaagctccccagcatcatgcaggaagctgcagccccgcagagttaggacagctcatttggcacccggcgagcccttcccaggcccgcagcccagaatagagccggggcccaagacgcccactggagacagggtcgggtcccactaccgcgcaggcccggctcgcccccgacgtcaggcacggggcgggacccttgcagctgtccgtccagtcccgttccccggaaagtgaggggcgggacmctcgcggctttctatccaatcctgttccccggcraatgcggggcgggaccctagcggccttcagtccaattcccgcacctttgaggcccaagggggagcgagccggtgctgcygcaggctgaggctgcggcagaggcggcgaggcgcgggcggtgaggacggacaggtccgttgaagcagcattccctccctcccctaatccttcaactcgggggcgggggaaagttaagtcgtgbagaaccgcaaaggtgcctggatttggtgggggagtagtgtcatcaagcatctcgcctgctggggtctcaggggtacccycaaggttgggccgcggggctgctccgttgtagtrcttagatttctctcacttgatggcctcttgagtgcagagttgctcttgggttggtgggaagagcctccgagctctcattgccctctgctcctgcttctaccccttgccactctgcgacgaacctgttacccagccactgaaaacgtatcctctaccctttgaacccgtctaatggaaggtgtacttgtctgaaacctacttaattgtatgatcatttactcctgctctctagcaggtggactatttgcgtgtgtttgcagtgattcacgaaaagtttgtcttgggaactcccaactcctagtttgtctgcattccaccttctttcactagcttgttcatttctttttccctcttaaatatttgttaagcttgtttctttcttcccacagtcaccgacttagtccagttccctgtgatctcaaaacaattgttgcagcaggctcctggcagtctcaagcagttcatcttcttggtgtactggtatgtgacaattccttcacgtattgttcgtggttcttttccactttctgtgaattcatatctaattgcccccagaaagtcaattctaattaaatctagcataatcattttcttagtgctattggaaccatcttatttaacttaatctttgtggttgagaattcaagaaaactcttcaagaaagaatccaataatttatatttttaatgtgtaccggttggtgggttaagcactatagtgggtatgtaactaatactcttgcttccagttttctagagtctattaagtggcacagaggtaaacagaatagcttatcttctctgtatgtgtgtactagtcttctattgctgccttaaccaattacacaaatgcaacaattaaaacaacacaaatgtattatctcatagcttctgtaaatgtgaagtttgggtgggcttagctgagtacttggcttagaatttcacaaaaccgaaaccaaggtttctgtagatttggattcttttctggaggctctaggggagaatccacctccaggctatttcagattgttggtagaattcacactgacatttctatatccttactgtttgtcagcctgagcctctttcagttctttaaggccatctgcatcttcaaagacaccacaaatccttctcaagcattaaagcagtcttacttgtctgccactggccagagaaagctctttgctcttatggactcaagtgattagattagttccaattcgataatatccctattttaaggtcagttctgtagagaatatcacaatcacaggagtaatgatctcaccatattcgcaggttctggggattagcaggggtggaatcttgggggccattcatagtaattgtgcctaccacaatatggtggtttcaggcaggattattttgtttttataatgtgctttcacaggcattgaaaacaaattctgactttattgaattgtatgattaaccactctaagataaggaaattcacttaaagttggttgccctaggggcacatggctagaaagtggcagagtctgtacttggatccagatctacatttccattaggtacaaacccatttttatggatggtcaaaatggtgtgcagccaaagtcaatagatagaaagaagctaaagaactttgagttaattattatttctcattttcaaattatctctttatattagtggtacaggctaagctcttctccctacaatagaaagcccaaaatacaatggtatgaataaaatagaagtttttttttttccatacatctagaggtaggagtccaggactagtagggagattctgcaatcctgcatatatgacttccataaatgaggccatggtgctgtttagttcgtcactacctagcaggtagtaaaaaggagggaaagtgcagggagaacacatgcattcctttttgggagcatgacctggaagtgacacacacaaggtcatcacaaagccacactgagctccaagagagggtaggaaagataaaactgggggctgtatgcacagctacaactcaggattctgttaaagcagaggaaaacaggtattagctgaaaatagtctcttctgtgtccatgtttttgatagtgttcgattctgtaacctatgagtggaatactttgtttagcgktgctatcagttttaaaaaatagtttttgagagaataggaagttcaaattcaatattaacgttctttgatttctcagttgctattttaacatataattacatttaatatattacattatttaatataattaatatatgataatttacaaaggctttgagaaacctcattttttatttagcatttgtataccttattcacattttgagttagatttctttgatagcaattaatacacgtgtcaatatgttcaagattgctttggaacacttgagaccattctgtgtagacctcatacgacctgtgcaattaaagcagcttgtcatatgatttatgtattctataataatctttaattctacagttggacacttccacacctctttgtactttgtgctccaaagttttctatatcaatgcaatatcaacacataatccttttctatacatcaaatactatctacccactaagatttactgcaggttccctyaccttctatcatgttgttttgtataggggaaagattgtagtcttaacagatctgggtttgggtcctgtgtttgacattaggtaagttactaaatttctgagttttgatatattcatatgtaaaattgcaaagaatgccacctttcagagataacataaaagttagagagctaacacatgttttctgtaatgcaaactggagtacctggcaaatgctaggtgttcaataaatggtaactaattataccagtcccactgatcactctttacttctagcactttgtgtctacacattctttttaagttggttttctctatctgacagatttataaatttcataaaagctggtaccaagtcctagatatgctgtggtccctaaatactggtttagtgaattgtgaattgtacctaggatacgtaacactatctatgagattgaagttgtgagggctntctctcttttctttaggtttcctattgtgattttatcatggaaaatcaattggctaaatcaactgaagaacgaacatttcagtaccaggattctcttccatcactgcctgttccttcacttgaagaatcattaaaaaaataccttgaatcaggtatgttaataatcttttagtatatattaatattattagtaacttagaaaactgygatactgttgctggagaaggggtctcgatccagactctaagagagagttagagttcttggatctcttgcaggaaggaattcaaggtgagttgcagagtgcagtgagaagagacagtttattgaaagcttctccattatagagtaggacatcctcagaaagcaagcagactgtctttaagtttttcttacataggggtcttatcgatgtaaagactaagctgtgcctatgtgagggtgagcagacagcatgacaaaatttattattctgttgatttaaagaaaacaatccttgacattttagtgcatgaatacatcaaagaattatgttaatcatctcaaaaacatatattgttatgggtattgagacatctggactttctactgttgtaggagtgtgtcattgtaagtatctttaggttgtttcctcaactgtaaatatcttatgactgggtcatgactggcaaggaacgtgccttgctagtctcaagatggagctgaatttaaaatggtgttactctggctctcctgagctcctgcttccccaacatttccccctctacttatgagagaacccttaaccttaaggggagataaagggtgaaggttgttcttttgtaactccttcctggaggcagtagatgttgatggttgggacagggtcttctcataatagtgtgcagtgagcctcttcagggagtaagggagctccttgcttgcatgatatcccaattgtttctagaaagttaatatactaggttagtaaatagaaaggtgaaacagctgctaarctattttatcttgcaaccctatacaataaacacaacagaaataaaagcacaataactaataacaatgaatattataataccaagcatactgaaaagaaatgctttccaagtgctggaaagctcatgaaactatgctgttatggggtcataagaccgggaatccatagccaaaatacragtttctagagaactcatgtcctgggatatattatggcagtaatcaggaacataatattcagttttgttcaagacacaagttcctcccttggctgcagttaaagaatgtataaagccatatggttttgcaagcccactggtcttatttgggaagtttctcctgtcagaagtgtgatagcctgatgagtgtcattgaaagccgcaccagtatgttttgctagagcttttatttgtaattcaatgtctatagctgctgcttgaagagagaatatggccataggataaaaccaccaagaagcctgttttgtcatcaactatggtgggccttgactatttttcagttggtgaggaaggaatttagatgtataacaatatgtcgtagaaggtaatgttgacccctagtacattgtccagtccagttgtaaggtaggtatagccaattgtgagacccatgtgcccataaccatccccaaggagaaggatgagcatgcaatcttagagatttattttgccattctgtccactttgattagttaagaccagggtctgattgcattgttgggtggcaaccaccccatgttgtaggtttcagcctggaagtggctggtgtcatgtctctcaaggcataagagtactttacctgtcacctgaatttgggtagccattaatcaactaagcccatcaaaaatggtatagcctaaagtggtgatgttatttagttatctacagaataattgaaaaaggtgttttttttgtttgtttcagtagaggaagggaaggatagtggctggtgtctttttgatatattagaaaaggaaatattggctaggtgtggtagctcacacctgtaatcccagcactttgggagactgaggcaggttgatcacgggatcaggagatcgagaccatcctggctaacacggtgaaaccccgtctctactaaaaatgcaaaaaaattagccaggcgtggtggcgggcccttgtagtcccagctactcaggagcctgagacaggagaatggcgtgaacccgggaggcagagcttgcagtgagccacgattgtgccattgcattccagcctggacaacagagcgagactccatctcaaaaaaaaaaaaaaaraaaaaaaagaaaaggaaaggaaagcatttatctcttataaaccattcattggaattggaatggcttaaattagcctatttgatatgccaaggtaagcctgaggttgatgaaagaggtaattcactgcgtacccaacagtttttctggtttaraagggaggccgtagtttgtgcccattctgtaaacaaattagctctaatattataatagatcaagtttaatattaaaactagtaatttcattttgagagtagtacttatccactggatggattctttttttgaagagaagccacaggattctttattggctcacaagagtgtgctggaacagtggtcaccacgttgaatgcctgtgggactttatgagaggcaggtttaattttggatgaatgtacscaagtgtgtattcccttactccactagaggtacttagaagcacttgatagggtcctctccactttggagaaagttgtctataggaggtccttctttccaagtctttaatatgactaagtcacctggttgaacagcagagttatgaatatttatggaggtggttctgacacatgaatattgaacaaacgtgcatgtaacatatgactgtttaccctgcaatagagacttaacccttgccttacgtgatcttagattctatttataatttggtattttattgccataaagagtctgttttgtcaatcttatgatttctattttaatgctaagctagtcagttgtgactgaattccaagaagaggaaagatatggcaagtcatgtccaatctccctgcttcccctcatggcctgaattagttttcaggtgttttggatgccctttggccaagaagagggtccattttgttgggaaagggcttagaacktttaaaaacttatttattttagtttatagttccccttttttttgttaaggtatgccatcaatggccaagctcttattttgtccagtattgatgtcagggtggtgtgctacctgccctggatccatcatgtcccttggtgggaccactatggccaagggacttaaacaaaagacttatggccaattaaactttctaggccagatgggaatggaggtgggcaggcactccttaaccttaaaaccccttttaagcaacataagagccaaaagccaaatggsacggttataaaatttgcttatttataaattctatacattaagctattttaatcttgacttgtagcaattagccatataaaatacaacattttgttcagctatagaggcagtttgcctgaccttgatttggagggtctgaattgattttattccccacaacaagcccttacaatctcatgtggtagtctctgggcctggaaggactaaatagtttcaaattatagaggaaaacaaaacataaggaattaatgttttaaacaaaaatgtcataagccctacctagttatgagaatgacatgaaaagaagcccatacgtagccaaatacttaaattatttaatatcaaggcatagaaaattatattcagatataggcaaaattattaaatgartcttaatgttttgaatacaggcctgtccctatgtctctgtctgtaggtctcatgaaaatagtttactttgattgtccaggtctaaagacaaggctttgattagcttcagcttgctatcagatactggcaggagtcagtgccttctttagatgagctatatgtactcaggagtcaaagccctgtaactgtaaggcacaaggattagttaatagcacttgataaggacccttttaaggaactagagggagtcctttaacggattttttttcttttatttttmttttttttttgaaacatggtctcgttccgttgcccaggctggagtgcattggtgcaatctcagctcactgcaacctctgctccctgggtttaagcaattctcccaacttagcatcctgagtagctgggattacagtcatgcaccaccatgcccagctaactttttgtagttttagtagagatggggttttgtcaagttggccaggctagtctcaaactcctgacctcaagtgatccgcctgcctccagttcccaacatgctgggattacaggtgtgagccactacgcctggccctttaactgattcttttctagtatatataattatcagggtggaggtggtatgtgttaggccatttttgcattgatataaagaaatacctgagrctgggtaatttattttcaaaaaagaagtttaattggctcacagttctgcaggctatacaggaagcatagtgctggtatckgcttctggaaagtcctcaggaaccttacaatcatggcagaaggtgaagcaggagcaggcacttcacatggtgacaacaagagcaagaaagagagagtgacagtgaggaagaggtgccacacacttttaaacaaccagatctggtgtgaatcagagtgagggctcacttgtcaccaaggggacagcccaagccattcttgagggctctgctcccatgatccagccacctcccaccaggccccacctccaacactgggcgttacatttcaacatgagatttggaggggacatccaaactatattatggtgataatggagttcatggtgtgactaaaagctgtaaaaagattctacagtcttgtagtgattaatttttataactttaataaatcccagcaataagactaagtcagagacttaatttaggattttgattttgaggctgtttattaaacatgttaaaaggctgaaaacatttgatcaaaacagaagcagaggtcattgtaaaataatagttactcatttagccaaagtgataatgaaaatgctttagaagcaatacagaaggttacatgatgtaaaaaccttaagccttttaaatcttagttttggcaaccaaaaaaacctaataaagacagcataggaattatacaatcttgtttcttaagacagttaccaaaaaggcaaagaaaaattctgcagtgtgactacttctgcttatgggaagcccatttagataacctggacatcaaacctgatgaaaaaagtgcttggatttractggacctaggaagagtatattcaaggttatgattatagcataggattacctcactcttaggaacagcattagttttttgattacattgacaatttagatgtattttaaaagccaaaagtacagaatcaagttatactagaggtaaacattgcttttctagaccttcaagataaaatattttagcattagctcataacaacagtaaaattagaactggagaaaaaaaaagttgatgagaaagctgaaggaaagaattatctcagacctcaaaaaagcaaaaagcagtgagacacagtaaaagctgaacttctgggatatgattctgagactttttaaaagaaacagtttataaaagtaaaagtaaaatttcttgtaattttattaagagcagattaataccataaaaaaatcttgttttaacatcggggaccaaaatttagaaagacttatttataaatgattttcttttcactgtaaccaatttaatcacatacaaaattcctttcatgaattccccttcacaaatcttatcatgacttacacaaaccgtctatgacatgcttggactttctgacttgttctaaacttctctctttcctaaataatcagtcattttactttaggacaaaaatttaccatacaagatactttttcatacaaaagtattcccttctgtataacctttcttaccaaaaatatgtattttttttttttttgagatagggcctcgctctcttgcccaggctagagtgcagtggcaaattcacggctcattgcagccttgacagcccaggctcaagtgatcctcccacctcagcctcccaagtagctgggattatagacatgtaccaccacaccaggctaatttttgtattttttgtagaaatggagctttgccatgttgcccaggctggtcttgaactcctgccctgaagcaatccacctgcyttggcctcccaacgtgctggtgttacagacatgagccactgggcccggccaaaagtacatttttatattcataactttcttcacatctctctctccctacttgttcctttttaccttctttcataggtaaattttaaataagctctaaattatataaaattattattatttttcaacttggagaatgttcacttccctcaattgagagatgctgaattaaataacccaaagaatgaaaatcatcaagaccagaaaaaaatgacaggtgtaaacttcagggcatgcaagcacagggcgacatgtgtcactagcgagacacagacagcaaataacagccgattaagaaacagtaggtactgacaaatacaactctgagactcaaataggttatccaactctgggtggggcctctaacctcaacctggggaatatgagtattcctgtgtctcctggggcctagaaggctgagtatattgcaaagtatattgcagaaaggaaaagggacaacaaagggaatggaagagacaacaaagagcactcacctatacatgaatccaaaaacttaggaagcaagaaacctagaactatttgtcagatgttagcattttatagataaaatcattccacaattttattttattttatttttctgagatgagatctcactgttacccaggctggagtgcagtggtgtagtcacaggtcactgcagccttgacctccccagctcaggtgatcctccaacctcagcctcctgagtagctgagactgcaggcaggtgccaccatgccctgctaatttttgtatcttttgtagagatggggtttcaccatgttgcccaggctgccaacattttagaaacatgtttcccatattataaacatttcttaattggaaatgacycagatatccagtgagtcatgccaggaaagccatagaccaaaattttgggtaaagtagtcttcatgaaagtttgagggttttttatttttgtttttgtttgtttgttttgccttttcacattttgtttttcagtttcaaatgagtttctaayatgtacatttcttttacagttctggttgaactgtacaagaaaaacaaaatctctaagtaacctaaacatcaagttttatttcaatactagtagactaataataacagattcaaatcaggcagaaaagaagagaaaaatagagagctttagaagactctgtttaatttcatagttgcagggcaaaagtaaccaccagaatgataacaggctgaagcttcagataagagaatgagactccaggtttccacagggggcaagcagataaagattgctgcctgttttaacatggggtgtaaaagcatctgagtcctgcaatgtttaagatatagcaagaacaggctgggcacagtggctcacgtctgtaatcccagtactttgggaggccaaagtgggcagatcacctgaggtcaggattcaagaccagcttggccaagatggtgaaaccttgtctctactaaaaatacaaaaattagctgggcgtggtggtgggcacctgtaattctagctacttgggaggctgaggcaggagaatcgcctgaacctgggaggcggaggttgctgtgagccaagattgcaccattgcactccagcctgggtgatagagcgagactctgtctcaaaatatatatatcaagaacaaatcttgtaagtcctcaggttccccatgctatcctgagacatgacaaagcaaacgaaaaggtgacagtcagaaggcaagtgtggaaagtgaatgcagtaaacctctgggctggccataggggccactgtaaagctgcagtaaagcaaaggcaacaagttgggaagtgatgagaagtatagctttcccatatctggcaaaggggacaaagtggattagtccaaagcatatactggcgtacatcttgcaaggctactttaatttttattatacccyagggactctcaccccattgggctgggactctaacccaaatattataccctagagactctaaccccattgggctagaaatattatccttgataggatgccaagacagaccccatttatcagaggtggccaattagtgctgtgcaggctgaatctcctcagcatgggatctcatcctaatgtccctttgtagtcaccagaacatgctaccagataaggggtcttgatccagatgctaagagagggttcttggatctcacgcgggaaggaattcaaggtgagttgcagagtgcagtgagaagagacagcttattgaaagctactccattgcggagtagagcgtcctcagagggcaagcaaaggaaggcaccatccttattttaagtttttcttatatagagcctttatctatgtaaagactaaactaagctacgtctacatgtgggtgagcagacaacatgacacaatttattattctattgatttaaataaaactatccttgacattttagtgtgtaaatacatccaaacataactgtaattatcttgaaaacatatattgttatgggtattgggatacctggactttctgctgtttaggagtgtgtccttgtaggtatctgtaggctgttcactcaactgtaaatatcttcttaatgtgggtcatgaccagcaaggaattgtgccttgttagtctccagatggagctgaaattaaaacggcattactctggctctcctaagctcctgcttccttaacaacactgttagaagttgaaggtttaattgcttctttatctagacttgtaataaagtataggtgactcttgaacaatgcagggctggtggtgctgacccatgtgtattagaaaatccaagtacaggccgtgcgcagtgcctcacgcctgtaatcctagcactttgggaggcggaggcaggtagatcacgaggtcaggagatcgagaccatcctggctaacacagtgaaaccccgtctctactaaaaatacaaaaaaaaaaaagagccgggagtggtggcgggcgcctgtattcccagctactcgggaggctgaggcaggagaatggtgtgaacccaggaggcggagcttgcagtgagctgagattacgccactgcactccagcctgggcgacagagcgagactccatctcaaaaaaaaaaaaaaaaaaaaagaaaagaaattcaagtacaactttataacgtaaacagttgattaacagataattttatgttatatgtattattttctgaattatttaagttagagtaaagcaaatgttattaaaaaatgataaggaagagaaaaatatatttattatccattaagtggaagtagatcatcataaaaatcttcatcctgatggttttcatgttgagtaggtggaggaagaggagggactggtcttgctgtctcagaggtggtagaggaggtggaagtagggacaggagaggcaagcacactcattatcaacttttattaggtataaatggacctgtgcagttcaaactcgtgttgttcgagtcaaccatgtccttaaaatatccaactttttttctctctttatgttaatttttccagagtttgaaaagccagatagtgtaaataggcttgtgatgaaaaatgcagtcctttgcccatctccctggctccctcccgacttgctaatcccattctctcaagcaaggatttccaaatcttttgtttcttttcygccactttcaygttgtcaactcttaattttattgttctgctctgctatttaatacagtactgtgttttacatatctgagtcttaagatttgcataagttagtaataatagaggtgagttggtggtacttggtctaaataccttaatacgtatttttcctttctagtgaaaccatttgcaaakcaagaagaatataagaaaactgaagaaatagttcaaaaatttcaaagtgggattggagaaaaattgcaccagaaattgcttgaaagagcaaaaggaaaaagaaattgggtatttgttgttataattgaataatgatgatgtttaaagaatgataaataaaaagtgcatagtttttatttttaaattattgctgtaaaaatttttacagttattattgttattttcataatccaaaagaaggaatgaatcacttaactttgggagttttcagtgggtggattcgggaacttgttaaaatgcagatttgctgggataagtgattctgattcacatggctggaatgaggcccagagattcttattttaacaatcacttcatgtggtttggctgcaggtaatctgtagaccatgctgaaggaaaacattttgtccaggtgactagcttgaaaaatcagaaacactaaaatagacatgtcacataggtggcatagaaatattttcrtagtacaatggagaaagggaatcattaaaaatcagagtggagaatggttatgtatattgtatatttcagttagataaattgaggaagctagtataataattattgaaggtctcaataattttccacaaaattctttaacttcttcagctcaaccatttctgtacttctctactatgaatcagaggatgaggttgtataattcaaaagcattgccttagtctagaaataattattgtacctatcatttagttttagaaataaaaagcaagctkattttttttgatgaaccatttatatctgtgatggaataataaaatttcacacttccggattcctttgttctcaattttgagccttgagttgttttaattaaagaggggtaaaggtaaagaagttgttgttttatctgtatcttttttgtttatgtctctttctgaattactaattatagtttataacatcactttcttcaaacaagactccaggtaatttgataagatgtgcttacttatgcatggaattcaattgcatattgtgaaagagggacacatagaaaacagtgtctgtgaaaaatctaaattactttgaagcctactgaaaacttttatttatttgttttatttatttattttttggagacagagtcttgctctgttgcccaggcttaagtgcagtggtgcagtctcggctcactgcaacctctgcctcctgggttcaagctattctcatgcctcagtctcccatgcacctggaattgcaggtgcgcaccaccacacccaactgatttttgtattttttgtagagatagggttttgccatgttggccaggctggtctcaaattcctggcctcaagtgatctgcctgcctccgcctcccaaagtgctgggattayaggtgtgagccactatgcccagccagtttttatatttctgatttagtattgcagtttttgtttggaaaaggaaaattgttaatgccttaataactgttattattaggtaaggatttattgattatctattatgccccaagtactctgaagaaacacctatgtactttattgcatacttgtgactacaatacaatgatatttctgaaggtatcttttggtgctttcttgatactcgtttttgatagtgtagttaaaacaaataatacctaagatcctatagctccccgctgaaaagaaattatcacaataacatttctcaatatctatgatgatttaaaacaagaaaacatgtttttatttatttatttttgagacagggtctttctctgtcaccaaggctggagtgcagtggtgcaatcatagctcactgcagccttgaactcctgggctcaggtggtcctcctgcctcagcctcttgagtagctaagactacatgcaggcccagctaattaattttttttttttttgtagagacagggtctttctatgttgcccaggctggcctctaggtcctggactcaagtgatcctcccaccttggcctcccaaagtgctgggattataggtgtgagtcacctcacccagccaaaaaacatgtttttaaatgttgaagaataattaaagaacaaatatagcttgctttttaaaattcccagtagttacacattcatgtattatgaagaacattaagctgatgttctcaatttcttttagctggaagagtggtggctgaatgttgcctatctggatgttcrtataccatcacaattgaatgtcaactttgcgggtcctgcagctcattttgaacactactggcctccaaaggaagggactcaattagaaagaggaagtataactctttggcataacttgaactactggcagctattaagaaagtaaggacacatgtgaatttagtgacaggcttacctgaagtctcaggtagcaaaatgttgagaagcttaatttacttatttggggatgaacacttcagttgtggctggtttttaaattttataatgactttttgatcaaaatccttyttttaatagagaaaaagtgcctgttcataaagttggaaatactcctctagatatgaatcaattccgaatgctattttctacctgcaaggttccaggaattactagagactccattatgaattattttaggactggtaagtaaaaatgcagatatcgtttttagtaaaggcactggaatttgggtagcctactatgacgtgatggaacatacacttttgaagaatattactgttgggactttgacaaagaaaggttttctgtgagccttatatttgaatcattctgattagatgtaatttatgggaacggattttctaaatgtatcttacatggttcaacacaaacctgatgcttatatttcatcatttgaaagtttaaagtttacttgaagagtagaatcagagtattaagaaaatcctgaaacatgaaacatatgatctggatgcttctctttctaccctcattttttattacctgaattgtctttttgagtgtttacttatatgtgcttatcatgccacagtctccctgtgagtctgcttgtccctccaccttatatgaggtaaaagcctggagtcactcttcctttttttttttttttttttgtttgagacagggtctcactctgttgcccaggttgygacctcagctcactgcaacctccacctcctgggcacaagtggtcytcctgcctcagcctcctgagtggctgggactataggcaggcactgccatacctggctaattgtgtattttttgtagagatggagtttcaccatgatgcccaggctagtctcaaactcctgggctcaagcagtctgtccgcctcagcctccagaagtgctgagattacaggcatgggccaccatgcccggcttggagtcactcttcttagagacacatgagttcagattgactcatcaatttttttttttaaactggcagtttaatggcagtttctgcttggtgtcctagcttatcttgaaatggaaaattctgctgtggtaactgtttttttcacagtttacacttactgaagagtataattgtgaatggatttttttcttacataaaatgttatttaaaagtaaaatatttatagccaatcatgctcatagtatgaggggtatgagcttactttcatgtagaactcaactcttctttgtaaacttctttacatgcttgagatatttaatgtcctcaagcccacatatatttaccttgatgttaccagtgaaacaattaaaagattagggaaactgagttattcatggtctaaagtttaatgtgcaaatatgaatggaaaaaatgaacaagataaaattaatgtaagaagagcaatagcaaaaagagaaaatatgcatatcagttaagaactaatatcaatagacctgcttttgaattgtctttatcgcttagtaggtatatccttagataaggtaactcttttgggttatagtttgtaaaatggggattcattaataatgcatctcttgatatggtgattgaagctgacatagttattatattttggggcttacatgtgaagacatgtagagatagggataaagtgtgaggtagacatgaaaaaatcagaattcatggcaaataatatacagagagttcaaataagattagtaactacatggcaattttatattagatagtcagggaaggcctctccaaggatctgaatgataagatgaacctgcagagttttttggctttcttttgtttagttcacttttgttgttgttgttactttttgtgtgtgttgagggcagaatgctctgggcaggaataaacttggcaggttcaaagggcagtatggatggagcagagtacacaggagggagctggatggccagattggaaaggtgactagaaggtagatcatatagtactttataaaacaaggtaaggtttttggcttgcgtttaaaatgtgaacagaaactattagtgagttttgataaaaagaatgatgtgaccagatttatgctttaaaaaagatcattctacctactgtttgaagaatagacttttagaggtgagacaagtttataagcagggaggtcaattagaaagttgttcttgtattccaagtaagtcatgataatggcttgtactaggattatggcattggagtggtgagaagttatactctggatgtattttggattttgggttagcaggaatattcatatattggttgtaagatataagagaaaaataggaatcagattacttcaacatatttggcttgagcagctaacagggtaggtgggtacgtaggtagattcatgaggtgggaaatattgggaggagatgatttagggaggagaagcaagtggtctttaaaccgtcttgaatttaagatgccttttagacatctaagtggaaatgtacataggcagttggattcaagatttgtagttttgggaatagctcaggactgcaaattacagacttaggagtcatcactaccaggcatagaaagcaactgtaaatccataasagtagccaaggttacttttgggacatatgtaaagatgatcagtgctgatccttatcacaggttcaatactgtattttccaatcagaggaggaggagccagcaaaggagaccaagggaagtaggaagaaaacaaggacagtggtctcccagaggccaagagaaggaagtgtttaatgcttctgagaagtcaaatgaggtaaaaatgtgaccattggatatgtaaacatgatgtggacagaggttgcccttgacaagagcagttttaatgaaagttgaagagggaaccccagctggaagagatgaaagcagattgatgaagtggtggtaacatttggaaataatgcttgcaagaaaagttttgatgtgcactgggagatcaaaaataattttttaaagattgtgatattacatcataggcattgttacaggagaggaggaaaaataatcttgcaggggagaagataaggagccaaagtcattgagaaggtaaaagccaagaggatcaagagcagaaaggtggaggggttggtctttgacaggatcaaagaagagaggcaattaggagggaatgcagaaagtgtgaatctagaagcaaacagattggccagttttgttgtaggaagatgaggaggtactttttattgcttatgtttttagtgaaataagaactgaggtcatccactggggtggatgatttgaggagaaaggaggtttgaaatagtctttttggaaagtggaaaaaacaaacatgctgtggaaataatggagttactgaacactgctgagtgcccatttgagatgtgtgttcatgcatttaaaattagacgagatgacatgctgtgtttttttcttcagcatcagtgaggggcaggaggggcaggtgcaaaggaagaggggctgaaggattaaagtttttgtaagggagaaataatttggggccattgaatctatcatgtgtaaagtgaaaattgggccaggcctggtggctcatgcctgtaatcccagcactttgggaggcctaggtgggcagatcacctgaggtcaggaatttgagaccagcctggccaacatggtgaaaccccatctctactaaaaatacaaaaatttagctgggcacagtggctcgcgcctgtaatcccagctacgcgggaagctgaggcaggagaatcacttgagctcatgagtgggaggttgcagtgagccgagatcatgccactgcactccggcctgggcggcagagtgagactccatctcaaaaaaaaaaaaagagagggagagaaaattgaaaaaatgatgtgtgttgatgggatgggcagaatttaagccactgaggttagtctcaataaggaggctataattaaaactagttttttgttttttgtttgtcttttttttttttttttggtctgtcacctagggtggaatgctgtggtgtgatcacagctcactgcaacctcgacctcctgggctctaacagtcctcccacttcagcctcctgagtagctgggaccaggcacatgccaccacacctggctaatttttgtattttttgtagagaccgagttttgccatgttgcccaggctggtctcgaactcctgagctcaagcaatctgcccgcctcagcccccaaagtgttgggattacacgtgtgagccacagcacctggcctgttgtttatttatttgtttttacctaccccctaggagaccattaagactaattcagtcatacctttcatccctgtttaccacatttacacaaaaagcccagactgttcatgttatcccttgtcagctggattcacggatttgtgcatggtctaatttgatccaaatttcccattgctctgatctaccctcacgacttccccaaacccttctgctgtactttctggagctcacgatcagcaaaatccattatatcctcaaccttttctctaaaagatgttactaaagcttgattattcattaagcttactacttcccctgtaccctcgcaagggggaattttttttttcttttatatagcactacagggcctgtgggaggtgttggtatcctttttgtttccctctgccctttctgttttcccttcgtccttaacaattttagcctttttggggaaaaaaaaatgccttcaggttatatcaccactacattgttgcagtgactttcctcctgcccattccccttcatctattgattgctttagctccagtgcctgtctttctttccattactacctcagtcatattcttgatgattttagctttcaattgtagacgatccataggctctcatttccttcagtttatagctctaggaaactacatctttcagtactccaactcagctgttcctttggccacaytgtgatttacagtttaatgatgctactgctctcttcatggctccattcctacttccccgtcttcacttctttctggytcttcaccatcattactcccaggcatacacattcaaatctttgctacctctccccagtactgatgtggtaaaacctaaacatygtttaaaatttaatttgtcttttctctacatatcaaagatacctactctagcaatttacttggccagagaaaaccataaaacttacttaatgatctcagttaaatctcaagttggcccccagcactacggtgctatcttccttggttagcttattctttcacttccagagaagactgttttatgcctttcgctctccttcttgttagctaacaaactcttgtttttcacaacagatatgagcaatcttcccatcatgacatttaccagcctttcagtgatgggcagaataatggtcccccatagatgtctactttctaatccctsaaattgttaatatgtkaggttacatggtaaagaggaattaaggttgctagtcagttgaccttgaaatggggacgttatcctrgattattcacatgtgcccaaagtatataatcacaagggtcyttattcatggaagagggaggcaaaggagagaaccaaagagatggaagtatgagaaggttatgatcttcccttgatggctttgaagatggaagaaggggttcatgagcccaaggaatgtggatagcctctaaaagctggaaaaaggaaggaaaccaattttcttctagagcctctagaaggaacacagccctgatggcaccttcattttagcccagtaagacacatttcagatttctggtccttagacctgtaagataataaatttgtgttgttttaagctaccaagtcagtagtaatttgtttttgcaaccagtgaaaatatactgattcaaatatttgcccattctctacccccttgcaatatgttactgcaaattcatatacttttcttttctttttaaaatacagatgaactcctctgactcctaaggacaactcttctatatctgtgctgagtcccgcttcctcttgcttagtcaagaaacttgcttttgcattatcctctctctctgctgcttatcagtttttttctttacttgattgttccagtctgtaatatcttccatcttaaaaggaaaacaattcacctcatgtctccttcaagtatcaggccccagtcgaagccatcatccyatctctcttagattgttctcacctggacaactttagtcacctcctaacttggcataccttctcttcacccttgtaatctgttctccatgtaacagctggagggatctttttagtgagaccacattatcactcccttgcttaaaaccatccattggtttccttcccatcatactggaaaccactttctgaggccagtataatcgggtctcaaccttatctaccactctatccttttctctgtgccgcagctgcactgaccttgttttcctttaagcagatcaactcatgtttattctaatgcctttgtgcttgctgtttcctctgcctgaaacacttctgcgggtatttacatggcgtactttctcactccattcagttttctgctcaaatatccgccaggtttattgtgaggtagcacccttctgccaccctcaccctttccaaccatttattgattaatttggcatcaggtttattttcttttttcttttccagccctaaactttgaaaggggtgtggtcaggagatgaaagcaataaaagagtggtggtcgtagaggtaaaaggatctggaggtttttgaaggggaagaaagaagaaatggtttggaggtagccatgaggaacaaggaaaacacatatctcatcccctaggtcttgaggaaataaggtataagagaaaaaagagtatttttatcaggagactgttcttcctcatagttgatgaaaagatttcataagataatgtatgtaaagcacttaatactgacccgtaaataatacccaccactatatttccttcaagcggcagtgtatgtcttctctttcttcctctttttccattttcttttcttagaaggtaggggcagggatcacataagaagatccttggcaaaaggacaagtacctaaagatggggttatatcagaatagtctgaggtttacagcaaacaaacagttcttggggagttaaggtgtgccaaagaaatcagagataatccattgtcagtggcttaccaggtgttaccagactggacaaaattcttttcctttgccactggcatactgtatccttttctactgaaaattattttattgagttatcatagctagatattactgcaattaaattatctgatgagtaattaacattaaaataatccaaaagagaaayctgttaattcaaatggctgtcctccaagattccactggtctccttctccccttcccatttctgttcctaagtaaaattagaaaggtctgtagtagtttgggatttatgtggttttcagggtatttgaaactcattgatttctagatgtctcacatggaacaagtgtcaggagtatgtatttatatcatagtaactgcaattccattaatacattatttttgttatgtgatatatttgatgactatatgataaataaaatactggaagaatgcctacttttcttctattggatatatgcatctttactcctgtttaaccttagatttgagtcttgtgttttctgtttctgtttccagagagtgaagggcgttccccaaaccacattgtagtgctgtgtcgaggccgagcttttgtctttgatgtaatacatgaaggatgtttggtcaccccgccagagcttctcaggttttcagactactttcttgagtttcattaggtcttatggtrttgcttgaattaaaatatacatgtttagaattgcctttcaaggtgatagtaagctgaaaaataagaattttatgcatgcttttttaaaaaaaaactatttgtattttttatttaaattatttttaaattttactagacatatataaatatgttcacttggagaaaaggaaaacattacatatattaccaattccattccctgccccagaattaatcactcttactagtttagtgtgttccattgttccatacctgttgcaatgaatttacatgtatacctagcttaaaaaatatatataatatataatatgtattatatatgtatatacatatatatggtatacatyttctatgtatatgttttaaagtatattacagaaaatttcaaaatgtataggggattatataatgataactcccgtgtacccatctcctaacttcaacagttaccaactcctagcatcaacagttataaactcatagtcaatgctgtttcaactatacctcttttaccttttccctcactttcccatggattattttgaagataatctgacataatatcctttcactatagatatttcagtatacatctctaaaatagaaggactcttaaaatacacatttagtaccattatcatacctaatgacttctaaaaaataattttttttttgagacagagtcttgctttgtgtccaggctggagtgcagaggcacaatctcggctcactgcaccctccacattccaggttcaagtgattcttctgcctcagcctcccaagtagctaggattataggtgcgcaccaccatggccagctaattattgtatttttagtagggatgaggttttgccgtgttggccaagctggtcttgaactcctggccttaaataatccgcctgccttggcctcccaaagtgctgggattacaggcatgagccaccacacccagccaaataaacagtgttttaatatcattaacagagaatcagttgttctaattgttttctaattgttgggtatatatatctatttataacttaaattagttttattaaatattgcaaacatgtacaaaactgcacacagaaatgtacaactaaatattcatgtaacctgcacccaggtcaaaaattagaacatttctaatactccaaagattcccgtcatccctcttccagamtttcactccttcccaggggcagtcatttaggttgtttacagtttgcattattatttgaaaaaggctgctgtgaaaatccttgtgtaagtcttttggtgtacacatgcatgtatttctgtctggagcacacccaggagagaatttgctgagtcataggatatgtgtatgttcagcttcaatagataatgccagttttccaaagtagttatgtctactagtgtgtgaatgttgtaggagttccttacattctgggtaagagttcttacttggttgtgtgtgttgcaatacacagagtagaagatgtttataattgatcttttgttctattaaacacatcttcctgatgaacagaagttcttaattgaatgaactccagtttattaatcttttaatctttaccatacagattatacattttgtgttctgttttaaaaaatttttccctaactcagtgccaagaagataatttcctatgttctagaattttgtgttgacttttacgtttgtatttatagtcttcctagagttaattgatttttttgtttgacatgaggcatggggtagttgcacatttaaaaaatagtgttatttttatagttagcttcttttaatcaacaataaatgtaatctttccatattggtacaaatacatctaccttattcttttaaactattacatagaattccatcaaatggatatattatagttgatgtgaccatttctttatgatatgacattaaagttgtttccatttgttgctataacaaataattaacattttcaaacatgcccctttktgtatttggataaaatatctatggtttgatattagaagtgaaatgttcacatcatctgatgtatacatttaaaatttttgactgagtcaaattgtcatccacagtggcattgttttttctgccagtattatgtgaggacacccacttctcctaatcattgttgacatggtactattaaacttaaaacatatctggtgagtgggggacacagtggctcatgcctgtaattgcaacattttgggaggctgaggctggaggatcacttaaggccaagagttgaagaccagcctgggcaacatagggggaccctgtctctataaaaagttaaaaaattagctggacatgatagtgctacttgggagtgctcccagctacttggaaggctggggtgggaggatcacttgagcccaggaggtcgaggctgcagtgagctgtgattacgccactgcactccagcctgggtgacagagcaagacgctgtctcaaaaaaaaaaaaacaaaaaaaaaaamacaaaaaaaagctatatctagtcaactgacaggtgaaaaatggttttcattgttgttcgaattggcatatccctcattacaagtgaggttgagcatttttatatggtttatatgccatttatttgtgttttctgtgagttacttttgcctatttttctgttggctattttactttatccttattgatttatagcaattatttatatagtctctacattaatcttttatacattatgtgtgttgcaaacattttcttccagttaacttgaaacaaattttggaaattgtccaatcttaattttgatttaggcaaatttatctttttaatcatttgcttttgtatcttggataatatttgtgtgtcttcccattacatgttttagttagtgtgttttaaatttgacatataattattagatcaggcttattaattggattattcaaagccactcttccagaaattaaacacatgtgcttcatgggctgcattcagcctgtgacctattttgcttggatagcagaatttgaatcactatttaaaaatcaggaaaatttacataaacatctggatttctgtttttgccttaaaaaaacccaaaagttctgacaactaccaatctactttctgcctctataaatgtgcctattttatacattttattaatataggaatggcatcttacaacatgtagccttttgtgtgtagcttctttcacttagcataatgttttcaaggttcatccgtgttttagcatgtatgaatactttattcctttttattgctgaataacattctattttacagatatgccacattttattaactattcatcagttgatggacatttgagttgtttctactttttgtctattatgaataatagacaaatagtaaattattcataatgctgccgtgactattgtatacaggttttcatgtaaacatatgttttcatttctcttgggtatattttaggggtagaattgccaggtcatatggtaattctatgtttaactattgagaaactaccagagagttttccaaaatggcgcaktatattagggttccagtttctccacatcttcaccaacacttattgtctgccttttttattgtagcgatgctagtaagggtaaagtgggatctcgttgtagtttatatttgataatgatgttaaagattttttcacatgcattttggccatttgtatatatcttccttggagagatgtctaatcagatacttggccaatttttaaattagtttgtttttttattattgaattgtaatcgttctttagatataagtctttttacagatatataatttgcaaattatatctcctaggcttggcttttcactttcttgatggcctcttttgatgcacaatatttttcrttttgacaaaatccaattttatctctttttttgttgttacatgtgcttttggaattgtatctaagaaaccattgcctaatctgaggacatgaagatttacacatatattatcttttaagatctttttaaaaaaaattgtgggaagggggagataatgtttaaatatacatttagttggaaatgttggcaggaatcgaagtagagatatccaacaagcttttggaactttggtaacagagattgagagaaaaaatggtgttgaagttagagagttggttgcctcttacataaaggtgatcattgaaactattaaagaagtagacgagattactaagggagaaacttataagaggagcttggaaaggccagtgacagaaatttgggaaaagacacattcagcagtgtaaggagaacaaatggtcaatgaaaaagacttcagtgacgtatggagacgacaatgggaccatgtgaaaaaatcaagtaagaagataattttaacattcatacctgagtgtcaaacattctataatgaggaaaattagacttaaataaagctactaggtttccttaatgggacattattggtgactttcaagataatcactggagaacaaaaatcgaggacagtaaattaaagagtgaatggaaagcgatgaagcagaagccagactgtgtgggttatagaatatttaaaamaatatatgattctgtaatgcagatatttttaatacaaatctttgtgctttgaaatataaaaaattagatgtgtagctgaaaaacaggtgcatagttagccaagttaaaggaaaagagggattatcttgttaccaaatctgtatctcttaatggtggcgatttgggcagttatgtgaccttttattatcaaacttaaaatgtcatttcaggtttaacacactttcctttgtaatttctccctaataatgaccaccttgtaaaacgaacatgaaaatgatcatttcagggaggaagtaaaagtttcatagtcaaaactcgtgctttgaggtagttggtaagggaaaggtagcaacaagtaccatatggagagaaacaggttgattttatttagaaattcagagtttatgctagtaaccacaactgcaaaagctttacttataattggagcaaaatcagtagttactaaagaaagtaagcaggaagagaggcaargcaagttgctctgctatagatgcagattggtgaagaaacccttattctgttcctcaggacaccattaatttgcaaataacaaggggggaatttttcagcaagaaatgtatttctttatcagtgttacagatataatgaacaaacagaggagagtatgcaaatcagtagataaatgatgaattccaattttgaatgatgaagtcagaactgatggctactagtagcattttttgaccatttattaagctacattagctcacttcctgagaaatccttgaaagcttttaaattgaagtaatttcttaacatgtgccatgaaattgagctaaattaaagctctgtggatttttgactgatgkaaatttctttatgggagaacccagttatttatctgctgtatgtttaaagatacatgaaattcaccaatctaggagcataaaatactgtggagggggagtagtttatccttagctaatagagtctttaaaaatataatgattagaagtaacaaagtggcacatatgaaaatagttaaaactgattatatggtatttctatttttttttggtaaaacacaaatattaattgagtatacagtaagtcctctggttaaatatatacgcacatagattttagttagataagatgtacattatatttgtgaaattgattaccaggatatttttcaagttctccattgtaaggatatttacagtaaaaaggatatttacttgcaacctagaagtgcatgcacatttccaaagtatatatcagcgaaactaaatttagccaataactaaatttatttactgaaattaaattattgtcaaatatgcttttggtgttaatagaacacaatcacttaaaaaaatatgtgatgtaggaaatctattggcatcataagtggtttctttgggtaatatatccaaacatttaaatattgatcaatgttatgaccttttaaaggccaaagtagttactttctgcctgtactcttttttaatcttcttttcatcttccataagacaactgacatatatccacaagaagtgccatagtgaacctgatggacctgggattgcagcattaactagtgaggagcgaactcgatgggctaaggttctgatttacacttttcttaacgaagcttttctctaacaaactcttttgatgtattgtatttcagttgtaatatttgatcatcatctccttgccctttaggcacgagaatatctgattggtcttgatccagagaacttggctttgttagaaaaaattcagagtagtttactggtatattccatggaggatagcagtccacatgtaacaccagaggattattctgaggtacttaactaccttctcttttttttttttattgcagatttttctggaagactcatatttattgaacatggaagttttttttctttttctacctttaggctcttgaaactttttcttagttatacaatatacttgtgccaaattgaagcttataaagtagatagtaaattggtaaatccttgccacattgtttaagtttgtttagctatatattatactttgtttaaagaagtatgactttgcatatcacatatcagtgttgctcaaccttttcattgcttgcctactcagaaaatttacacagagcactaggttaatgagcttttcttgccaaaggtgaaatgataacctaatcataacctgcactagtgtatcttgacaccatagttgggactgtgtctcctaagaattatgtcacccttgtaagtcatttattttatcatttggttaattgctgaacacattgatgtcagtgacgttaagggtaaatatggccttattttatgctcccctgccacccccagggtgacatttgtgtcccaggaaataataaaagatagtaattgtattagaaatctcatagtcttttgaaaatacttaattattttatagtgaattaatcggtattaaataataggaaaaaatatcaaggattggaaaaccttgtagcaaggagagagatttttttttttttttgagaatcaccagacttctttttaaggaagaatgtattttaatgcagtgttgttcaaagttttttgaccacaatttttagttacaaatacatttagattgcagcccactatatatacatgtgtatatgcatgcaaacacatatataaaataggagtttcacagagcactaattacttttattgtctgtgaggtacactgatatttccagtctattttattctccttttttgtaaggaatattgattatgatgcactgagttaatttcatgatccattaataggccaaagtatacagtttgaaaaacaggtttagtaggaaacgaattcttaaaatatttcctcctaactagactttaatgactaaacttttatcaagatcttttatcctattcaagttacaaaacccttatcctctcaattctatgttctgtaaacattcatgaatattgtaccagcattttcttttctggtaggattttcttaacttgagattttgagaagcccctaaagtcagggccagaattactctctcttgactttgcatatcacatatcagtgttgctgatcataactatattatgattttattaaatttggttgacstgaagaggaatggtgagatgatatatgtgtttaagatgtaaattcttacaaaccaatattaaacccttttaatttggaaaaattaaatttattttagattattgcagccatccttattggagatccaacagtacgctggggtgacaaatcctataacttgatttccttttctaatggagtatttggctgtaattgtgatgtaagtaaactactgaaatttttctcttttgatcttttaggttaaattaatgacaataaaccataaatacttgtgctggggaacastgtaagtgaatagtaatttagttttatggcactgtggtgaaaagtttagttatgaattctcattgaaagtataggacaagttattttcttctgtagtaaggccaacagtttgttgtgtactatatctgcaaaatgggatttgcatataatatttatgtaatataagctcttaaaacccagtattatctgcttgctgagaatacctatttcaaaaggtattatatggcattatgtatgtgttctatgcagagcaatgcatatggatatatttatagagttcaagattcacctagtaactaggtaactattttcctaaaatgacacatratctttggaacactatttaggctgtggatattaaaatggcagttactaccattttgaccattttcataaaaaatgaacaacttttcttgcttctcctctgttcccctcccatggacatcttcactagctgtctactaactgtctgataggcattcaggaggtctatgaaccaagaaaattttttataaaggggtttggggctgggtatgatggctgatacctgtaatcccagcactttgggaggccaaggcaggtgaatcacttgagcccaggagatggagactggtctgggcaatggcatgaaaccccgtctctacaaaaaatacaaaaattagcctcacatggtgttgtgcgcctgtgatcccagctacttgggaggctgaggtctaggaggatcgcttgaacctgggaggttgagggtgcagtgaacrgtgtttgggccagtgcacttcagcctgggaaacagactgagactcygactccaaaaaaaaaaaaaaaaaagggttcagtagttgtattaatccatattcaggtttaggtgatagaaacctaaatcaaactagcgttagcgtaagaagatatttgttggcaaggagttagctaaatttgggtaaagctgacttcaatgttcaaatgctttcattagaaatctctccccattttttggtactgctttcttttgtttggcctcatatttaggtagactgcccaatgtgattgttgtaccaacagtctcatatcttcatagctttcttcatagactcccaaaggaaatagycagcttctttgtttccaatggttacagcaaaagtcctggaataatcctcatcagttgtgattggcctgtgtgattcatgtccccatcctggggaatcaggtgcttggatgagcttggcctgggtcacatgcccaaccttggaatctagtgggtagaatcagtctcattcaaaccactacaaagtggtgcttggttgcctaaagaacagtaaagtagctgttatttcagaacaaggtggattggttaataggcactgaaagtaaatgtctattggagtatctcatcagagctacagtgaaaagttgccacaagtcatttattttgaagatgttctctttactcttcctttgagtctactgttgacagaatagttcttgttaattgcctcagttttcttctcttcagctcctcatttgattctccttgaccttcctcagtctggtttatgtccttaccattccttgcaaactaccctttgtaaggtggttaactgccccctggcttcttcccttcatttccctttgacctgtctgctgcagttggttaccctctgcatacatattttgacactgcctctttcctcttaacagtattttcctctctactgattctgaaactgaccttaatattcatcacacttttccccctctgaccactttattgacctattgttatatatgtaacttgcagctatacttttctagcttttacctattattctcatttgagagttgtgtttcattatatgttaaattgttcaaattggatgttatattgttatataagagtaagtcaatctcatcaagaataactcatcttgctttccgtccctcatccccaagaccatcaaaaaacaccttttgctaaactgatttttactaatagcaccagtatcctgctgttcacacaaattcaagatgaaaataattttgataatcttgtctgtctctgaataaagaatattgggctcataatgagcatatctctcagcataactgaactgcttttttatagtgtgcggacatgttttatgtgtgtgcattaacatgcatatattcataaaattgatctgattatctccacctgataatttgcattaaattccatggaggtttcccttctaacctaagatgattatagagggtgcagtttaacctttgtaaatcatcattagtgaaatacatatgctgtaggccaaacatgggagctcatgcctataatcccagcactttgggagacgaaggtgggaggatttgattccagcagttcagcaccagcttgggcaacatagtgagaccctcatctctacaaaaaataaaaaattagttgggcatggtaatgcatacctatactcccaactacttgggaggctgaggtgggaggatcacttgagcctaggaggtccaggttgcagtgagccatggttgtaccactgcactcccacccaggcaacagaacaagaccctgtcccaaaaataataataagaagaaaaataagcatatgtactgtaaaataaagcttattttaccctaaagccatgttgctggtccataattttaattgtttgaatatgttcttttgtgattatattaattccatttccctcctattttataaacctgaagtcaactatattgtcttctctatattgtaggctttattgtaaggctttgcagagggtgcataggaagcatgtaaaaactttagttaataataacaatagttactaattattgctgtgagctagatccttggtaagtactgtgtaagtggtataaaaatcatttttcacagcatctgtatgtatgtatgcattatctctacagggaaatgaggcagtttaattagaaagcaaagtaacttttttactattgcccagctaggaagtagtttgaactcagaaccaaagcctacattcttaaacactatgtaaatacatattgcctctgtgtaagtgcaagaaatgaaaggtaaaaattatgtgaacaaataaagcatcaggatagcattggaattttatatattttctaccttctttgagattattagctttccattaggagatgggtgcttagaattatagctcaaagagacatccttcactcttgctatttcctactggctccagtaaaatagttggaaactgatgctgtttgtcttaaatgaaacaatatatttgataatatctgaaaattctttgtaaaattgtaaagtaccacacagttgtgagatactgttagaaaatggrtttgtcagcgacctgtgagtcttgtcatgtgtgctgttgttggcagataaactgctcaggcatcttatactgacctccctcaagagcctttcctgatgtagttgttgcctggttggtaacaataaatcctgtttataggctccgctgggccatgatacaggctacagagctatagtgttagggtgacatttaagacacctaattactcctctgaaactgggcccatatcttgatactacttcccttctttccctcccaagctcgcagtgtcacgttcagatcatgaatgatatctgtgtctaatgtaaagtggtgacagtcacaaggaaccgtctgatgtaacttttatctaaggaacatggggaaaatgcgggcaaaaactttgttcttcaaaatagatgatgggaaaattcactaactgcaatttctttctctaaatacacctggcaaacctgaaacagccccgtaacacccagcctatytttcccacatttcttaaactgagaattatcacattgggacattcatatgtataaaaaacacaaaatggttatgctttctaatattcactaagtggcctaagtccttacctaaagaagttcatgcccatcccaaatgctttcagataggttgccatccccatctgcttttccaccctgttcttacaattccagaacatcttcrtgttgcatatatacacttgctttgacttctagtaaaaatagcaattaatttatctagattgtttatatgttattttatacaccctcatgaccccaagccccaccagaagccctactagrtgcttccaaatttaaacaactttttttccaaaaaakaaaatatagcagttactgaactgyagggaatcttctatcttatcatatcctcargaggtgaggcatttgaagactctatgctttattatctgttaagaatggacacaaagtgaaaataaaatattgggtcaagttttaagttgacataaagtattcagaaatcttgtgtgttctcattttagcatgctccttttgatgcaatgattatggtgaacatcagttattatgtggatgagaaaatttttcagaatgaaggaagatggaaggtatgtttgaataaatatttcatcttttttctcctaatanttctatagataaaatatttttaagtcttccctattttcagggttcagagaaggtacgagatataccacttccagaagagctcattttcattgtggatgagaaagttttaaatgacatcaaccaagctaaagcccagtatctcagggaggtatatttttcacttttctcttaaataataatgattttttcttttaacaaccatatgtaaaaatttggctgtcatccaagcatgtctgcacaaaacattttaaaattatgcctttaacacctttaattctttatgtctggtgattactttaatgcaggtgataatttgcttctctttggtgtattctccttaggtgatttttcaccrttctcatttaattcttcttgttaggcatctgatctacagattgcggcttatgcctttacatcttttggcaaaaagctaaccaagaacaagatgcttcacccggatacgtttattcagcttgcacttcagctggcctattacagacttcatggacagtaaggaccattcagtttctattttcacagtcttgaagtccaagggtatatctttttttatagctatttcatcctaactcctcagtatttttgctcacttttttcccagctggtactgtgtcctatttgtacttccatcaatagagtattagatttctgatctgtggtggtttcacagtttttccttgttactttatcacagtatccacttgataacttttgacgtgtctattctcatctgaaagaggattggtcatctttggcattcagatcrcttggttttcttgcaacgtcagttttctgatgggttcatgaaaagttgtgattttataaattatccagcctttactcatttttagaataggagcgacattaattttgtgacttaatacatcctaagaagaagtagaagtccctcaatgttgctttttcattgataaataagttataattgaacatatttatcaggtacatgtgatttttttgatacatgcataaaatgtgtaatggtcaaatcacggtaattgggatgtccactgcctcaaccatttattaygtcttcrtgtggggaatgttccaagtcttctcttcttggtattttgaaatatacaacaaattattgttaactatagtcaacctactgtgctatcgaacactagaagttattccatctaactgtaccattatacccattagctaacttctcttcaatctcctctcccccctactcatcccaatctctgttaaccaccattttactgtctacttccacgagatcaattttttttaactcccatatataggtgagaacctgcagtatttgtctttctatttctggmttatttcacttaacaaaaagttatccagccttacccatgttgctgcaaatgaagggatttcattctttgtttttttattttggctgagtaatattccattgtgtatgtatatcacttttttttttttttttgagtcagagtcttgctctgtcgcccaggttggagtgcagtggcatggtcttggttccctgcaacctctacctcctgggttcaagcaattctccctgcctcagcctcctgagtagctgggattacaggtgcctgccaccatgcctggctaatttttatagttttagtagagatggggtttcgtcgtgttggccaggctggtctctaactcctgagctcaggtgatctgcgtgccttggcctcccaaagtgctgggattagaggtgtgagccaccacgcccggcccacattttctttatccatacatctgctggacacttaggttgattctatatcttgactattgtgaatagtgctgcaataaacattggagtgtggctatctctttgatatattgatttcctttctcttggatatatacctagcagtgggatcatcagattgtagggtagttcttttttttttagttttgtgaggcactttcagactgttcgccatagtggctgtactaatttacatttccaccaacaatgtatgagggttcccttttctccacatctttgctagcatctgttattgcctatctttttgataaaagtgatttttaactagggtgaggtgatgtctcattgtagttttaatttgcatttcccgatgattagtgatgttgagcatttttcatatacttgttggctgtttgtatgtcttcttttgagaaatgtctattaagatcatttgtcactgggcgcatggctcacacctgtagtcccagcaatttgggaggccgaggtgggcagatcacctgaggtcaggagtttgagaccagcctggccaacatagcgaaaccctgtctctactaaaaatacaaaaattagcctgatgtaggggcacatatctgtacctctacctactcaggaggctgaggcacgagaatcccttgaacctgggaggcagaggttgcagtgagctgagatcgtgccactgcactccagcctgggcgacagagcaagacactgtctaacaacaacaaaaaagattatttgtccattttagatcagataaatttgtgtgttgctattgagttttttaagttccttatatattctgattattaatttcttgggagatggatagtttgcagatattttctcccattctgtgggctgctgattgtttcctctgcagtgcagaagctttttaacttcatatgatcccattcgtccatttctgctttggcttccatacttgtagggtattactcaagaaatatttgcccagttcagtgtcttacagagcatcctcaatgttttcttttagtagttttatagtttcaggtcttatatttaagcctttaatccattttgatttgaattttgtacacggtaagagatagtggtccagtttcattcttctgcatatggatatccagttttcatggagccatttattgaagagcctgtcctttcctttgctgaaaaggagatgcctgtaaatacacggatttatttctgggttctctattctgttccattggtctgtatgtctgtttttatgccagtaacatgctgttttggttactatagtttggcggtatattttgaagttyggtaatgtgatacctcaagctttttttttttycccctggtattgcattggctattctgggtcttttgtggttccatatgaatttttggatttttttttcctatttttgtgaagaatattgttggtattttgataggaattgcattgaatatgtagattgctttgggtaggatggacattttaacaatattaattcttctaattaatgaacataggttgtctttccattttttggtgttctctcactttcatcagtgtcttatagtcttccttgtattgatttttttacttttttggttcagttgattcctaggtattttatattctttgtagctattgtaaatgggattgctttcttgatttgtttttcagattgtttgctttttgcatatagaaatgctactgattttaatatgttgattttatatcttgcaactttactgaatttgtttatcactctaatggctgtttgttggtgtcttaagtattagatcatgtcatctgcagacaggacaatttgactttttcctttgcaatttgagtgctctttatttcattctcttttctaattgctttggctaggacttccaatactatgttgcataaaagtggtgaaagtaggcatctttgtcatgttctagatcttagaggaaagtcttgcaatttttccatgttcagtatgatgttagctctggatttgtcatatgtggcttttattgttttgatgtatatttcttctttactgagtttgttgaaaattttttttatcatgaaggtatgtttaattttatcaaatgsttttcagcatctattgaaatgattatagggtttttgtcctttattctgttgatgtgatatatcatgcttattaatttgcatatgttgaaccatctgaatcccacttaatcatggtgagtgatctttttaatgtgctgttgagttcagtttgctagtattttgttgaggatttctgcatctgtgttcatctgggatactgctctgtagtttacttctttagttgtgtccttttctggttttggtattaggataatgctgtcttcatagaatgagattgaaaatattctgccctcttcaattttttggaatagtttgagtataattggtattagttctttttttaaaggtttattagaattcagcagtgaagccatcaggtcctaagcttttgcttaatgggagactttttattgcttcaatcatattacttgttattggtctgtttgggttttctatgtctttatgtttcaatctcaggttgtatgtgtccaggaatttatccattccttctaggttttccaatttgttggcatatagttactcataatagtgtctaatgatcctttatatttctgtggtattggttaccatatctcctttcatctctgaatttatttatttgagtcttttcctttttccttattctacctacagatttgtcaatattgtttatcttgtcaaaaaattgacttttggagctctygtaaaagttcagattgcttactgttgtggacttggagtgtctgcaacgaaaggataccctggctgygtgggaaggctggctagggctttatagcctcatggactcatggagcgtgcttcctacaccgtaacactgctgaacaacctctttgatttggtgtcttttttggctgagatgaagagtgatcactgagttttgttcattggggattgctaaccccatctctacccattgtctctggctgcctttaggatttttttaccctataggcaaagatgcttcccttaggttgaagcaggaatgatttttctgtgaaggaacccagcatggagataagggtgtctgtctgccttgatctcacttctttcagtgtagtattgtgagtccatgggagtttttccacatgcggcctggcagcttgagggcggggtgttgtggatagagtggtctgtttctcttaccttctgcttgaagttttttgcttctctctggcccctgggatcatcacagcctccattttggtttctgggatactcctgaggataattggtactagatagttgttttggttttctgtggggaagagtgaagccagattgcttctactctgccattatggtaacatgactcctctcagttttgcttttttatctagtctgagaatatctgtctttaaatatgttatttagataattaaattcagtataattatcagtaaatttgtgtttaagtctaccatcttgctctttattttctagttatcccatctgtacttttttctttttcttttgaatttttagagctttaaaaaaattgcttcattttatttccaacatgagctatactttttttttttgtacagttgacccttcaacatcatggaggttaggggtccccaagccyccagtgcattagaaaatccaagtgtgtgaccagaagtcttaccaataacataaacaattaacacacattttgtatatgtattatatattgtattcttacaataaagtaaactagagaaaggaaatttttgttaagaaaaatcataaggaggctgggcatggtggctcacacctgtaaacccagcactttgggaggctgaggcaggcagatcacttgaggtcaggagttcgagactagcctggccaacatggtaaaaccccatctctatggaaaatacaaaaattagctgggtattgtggtgcatgcctgtaattccagctactcaggaggctgagataggagaattgcttgcacccaggaggtagaggttgcagtgacccaagatcatgccactgcactccagcctgggcgacagagcaagactttggcaccattgagtaggactggagctgggttaaagggctgcttctgtgtccacagtcaaatgcacagttttggtgggtctattactggggagcaggtgggtgtgataccttccaggtccctagacagatgggacttcctccaagactgcacagagaaacaggcctggagccaagactccaaggtacctcacttcaaagagctgctcttctctccagatcttgaccctcatatcctggctgctctaacagttgccccaagtaatttatagattcgatgctatctccatcaagctactactgactttcttcagaaaattaaaaaaaaactactttaaatttcatatggaaccaaaaaagagcctgtatagccaaaacaatcctaagcaaaaagaaaaaaactggaggtatcatgctacctgacttcaaactgtactacaaggctacagtaaccaaaacagcatgttactggtaccaacacagatatatagaccaatggaacagaacagaggccttagaaataacaccacacatctacaaccatctgatctgtaacaaacctgagaaaaacaagcaatggggaaaggattccctatttaataaaygatgttgggaaaactggctagccatttgcagaaaactgaaactggaccccttccttataccttatacaaaaattaactcaagatggattaaagacttaaacataagacctaaacccataaaaactctagaagaaaacctaggcaatatcattcaggacataggcatgggcaaagacttcatgactaaaacaacaaaatcaatggcaacaaaagccaaaattgacaaatgggatctaattaaactaaagagcttctgcacagcaaatgaaactatcatcagagtgaacaggcaacctacagaatgggagaaaatttttgcaatctaaccacctgacaaagggctaatatccagaatctacaaggaacttaaacaaatttacaagaaaaaaacaaccccatcaaaaagtgggcaaaagatgtgaacagacacttctcaaaagaagacatttatgtggccaacaaacaaatgaaaaaaagctcatcatcactagtcattagagaaatgcaaatcaaaatcacaatgagataccatcttatgccagttagaatggcgatcattaaaaagtcaggaaacaacagatgctggagaggatgtggagaaataggaatgcttttacactgttggtgggagtgtaaattagttcaaccattgcagaagacagtgtggygattcctcaaggatctagaaccagaaataccatttgatccagcgatcccattgctagatatatacccaaaggattataaatctttctactataaagatacatgcacacatatgtatattgcagccctgttcacaatagcaaagacttggaaccaacctaagtgcccatcaatgatagactagataaagaaaatgtggcacatatacaccatggaatactatgcagccataaaagaggatgagttcatgtcctttgcagggacatggatgaagctggaaaccatcattctcaacaaactaacacaggaacagaaaaccaaacaccacatgttctcactcataagtgggagttgaacaatgagaatacatggacacaggaagggaacatcacacaccgggggctgtcatggggtggggggctaggggagggatagcattaggagaaatgcctaatgtagatgatgggttgatgggtgcagcaaaccatcatggcacatgtatacctatgtaataaacctgcacattctgcacatgtatcccagaactttaaagtataataaaaaaaattctgcaaagccttcaaatagatgttttttaaatccagtttttgttgttgttcctagcattaagactggcttgccagaarctagctcatcatagctggcattggaaatttcacgcrgtattttttttttatatagaagatatgttcaaatcaggttccaaataaattttacacattgcatttgattgatataccttataagtcttttttaaatatgggaatctttttcctacctttctcttattgtatttgatttgatgaagaaactgggtcatttatcctgtagagttttctgaattttcctgattgtattcccatggtgatatttaacatgttgctcagtctcctgtatgtcttgtaaactggtagttagagctagaggattgataatatgcatcagttcctattttggttatgttttacaataataaatccaatagttaatgctctttgctttctactccatcttttaagattaagagtgtgtttacttgtcagccagcatctattataaaaagtttactccctgaattttttacctaacgtttcagtagtcattgaagatcattgctaaggttcattatttcatttgaggttacagtggtaatattttattactcatttttactgcttttatttttaatttgttttcctgaaagaatgttattttagtgctatttaaaaatattattcacactttctccttcacactttgaagggataccatttcactccagagagacagaaacactgaacagaagaggcttgaaaactgtttgagccctcctagtacccacattcagagacttttcactctcactttatttgatctctttgactctaaattctaaccaataagaaagtaagagagttttatacctaaaattgctatatcattctccaacccaggaaaacagatatcaccctggggaacttcttaaattatacttctactttattctagtccttcatgttctatatggaggcactaaaggtcaaggactctgtattacctatttctgtgtaataaatkaccccaaaacgtagtggcttaaaacacatacttttttatatcacacattttgtgggtcagtaattttatatcacatattttgtgggtcagtaattttatatcacaattttgtgggtcattttttgtgatgcagcttagttgagtaactctgacttaataaaggtttttcatgaggttgtagtcagtatcagccaaggctgttttcatctgctctcctgagggtaggtccacttctcagctcacccacgggaactagtagcattcagttcctccctagctgttgtccagagggtcaccctcagttttctgccgctagggcctctccatcgggcagccctcagcatggcagctggctttcttcagatgagaaataagagaacaagagagagctctctttgtaacctaattgcagatgtgatatcccatcacttgtgctgtactctccccattagatgcaagtcactgtctagcctgcgctcaaaagtgaggggttacagcagagcataaatagcaggaggcaggaatcacgggggccatcttagaggctgtaatgtatatgacctgacagcagccacgcctttgaaacagcccacattatcagagtattttttgctctttggtattggaaataggctcttttttgttgaaagtctccaacctatctgtgttaaagggcttagtctctgaacaaagctagctttattaggcaactatatctgtaatgatattagagcattttctttcttatgatacactcttttaattttttcttgtagccctggttgttgctatgaaacagctatgacaagacatttttatcatggccgtacagagactatgcgatcatgcacagttgaagcagtgaggtggtgccagtccatgcaggatccttctstcaatgtgagtattggaaaggaaaaaaactcacaagatttgtttaattgttctaaaggaaccgtggtctttgagtaactaacttctttgcttcagttttcctggatcattaaaatactttgagacatcttttctgaggtttttaaagcatttgttcattcaccagtgaaatgtgtaattggaaacagggaaggcaggaaaaggatcccatttgtgttattttctaggcaaagggtcttcagtactttaggtatttcaggacttctaatctacctttagaacaacaccaacaaagtgcagaaatcccaasgtgcctttaaaaggaaggttttcttgatgtggttgaatgtttttgaaatgacagattcttgtttcatatagtggaaccaggacagttgtatgctttgtttcatactcttttttttgaagcatttagacaacagcaaatttccttctcactgttattttagtattatatttgtttctttagttttgctagatgtggttatatatgagtgcctgtatcttaattttatagaactgctttattgtcatttttagttatgctttcatttttgaaatatcggttgcttttatctttatacttgttagtgtcacttcagtgctgcccacaagttcatagtttcctattccaggaaagaaataagaagcaggatatacagggaagactaggcgatagaataactgatggaaagatataggagtatgtgttatagatcttcctagaaatctttcctctcccaaattaccccaatcctaattacaatgagcttaggatttttttctagttgggttttgcacagtgtgttattgaagtgtctctcgatttttaatacagcttcgtgagcggcagcaaaagatgttacaagcttttgcaaagcataataaaatgatgaaagattgttcagctggaaaaggtacttaagttaaaatttttctgacttaaaaatctctcatggtgaaaaatttttttctaacctsagatttggggtttcattgcaggatttgatcgtcaccttttaggtctcttactcatagcaaaagaggaaggtcttcctgttccagaactctttacggacccacttttttccaaaaggtaatatagtgtagtgttttacagcttcatcaattggcttcctctttttgtatattaaatggtttttagaaacaatataagcatctgtaggcctagtaaaatgttcttttattgtgccayacagcggaggaggtggaaattttgttctctcaacaagtctggttggctatttacgagtccagggagtggtagttcccatggtacacaatggttatggatttttctaccatatcagagatgacaggtgaggcttctcttttttattctttctgtgctatagagtaggaaaggtattacttttgtttttaaatgcctttcctacactgtgattcttatattgccatctgtcacttgctacataagtaactatttttttccacttaggcatttaatgcatattcatgtttctctgtcctgcttttgagacacttgtcagattagtcccttaggtgtcttyatgcagaacactgtttcaagtcgattyggcaatcatatcatcatcctcaaaatcagtacacccatgaacatatttggtttgtacaaggtattttataataagctcagataaaatgtttaaatatatggtggttcatgtagtcatagacaatattaatgagatagagaaaagagattgggtaaattatactttttaaaacagttttaccaattcagatgcagttcacttgggctgtgtggagtttgacttatgtttatggaaagaatgagaaagaaaagatcaaaacctggtataaaaaagagtagtggagaacaagataaaatgaaagtgatagcaaggcttgtaaggtccttatctacagtctggcagtctctttacaggggcytttcaaagcatagttggcttcataaaaattacgtgactacatttagcactatgtgaataagaagagggcaggcttggaggcacttcagatagaatgtgaaaaattggaatagtaatatgcatgacatatttcagtttctaatacaactgacccttgaacaacatgggtttgaactgcatgggcacacttacatgcagattttaaataaatgagwaaattttttggagattgagacaatttgaaaaaactcaaaactgtgtagtgtagaaatattcaaaaactaaagtattcatgaatgcataaaatatatacagatactagtctatttcatcatttactaccataaaatatacacaaatctactatacaaagttgaaatttatcaaaatatatgaacataagcccttacagactttatatggtgccatttgcagtcaagagaaatgtaaacaaatgtaaagatgcagttttcaatcataattgcattaaattaactgtggtacacactgtactactataataattttgtagctacctcatgttgctactgtggtgagctaaagagttgcaagtatctccttaagatgtcacataatgctaatcatctctgcagaagcagtttgtctctttagcagatcacaaaaagtgatctttcgtggtttattctcatgtatttttcattgtgggtagtacagtattgtaaacattgaataataccatgggacccacatgtagtgcttctagtgatactgcaagtgctcccaagaagcagagaaaagtcatgacattacaagaaagagttgatttgcttgataagtatcatagattgagatctgtagctgcatttgcccatcatttcaacataaataaatctagtataagtactatttaaaaaaaaaaaaggaaatttgtgaagctattgctgcagctacactggcaggcattaaaactttgccgtttgcaaaatgccttttgatctccaattaaaaatgcagctttttggtgggtgctatattttttatagcaaaaaaaatgcctttcttgctataaaaaggcatacctatagactctactatgattctagaaaaagcgaagttattatatgacaactttacaggaaggtgaaggatctgaagctggagaatttaatgccagcaaaggatagtttgataattttagaaagaggtttggctttaaaaatgtcaagataacaggagaagtagaggcagcagacaagttcccagacaccatcaagaaaatcactgaggacaaaggatatctgcctgaacagatttttaatgcagacaaatgtgccctattctgaaaaaaaaaatgccacaaaggacatttgttagtaaggaagagaagtgtattagtcagggttctctacagggacagaactaataggatatttaagaagtatgtaagaagcattaactcacacgatcacaaggtcccacaataggccagctgcaagctgaggggcaagaaagccagtttgagtcccacagctgaagaagttagagtccaacgttcaasgccaggaagcatctagcacaggagaaagatgtaggctgggaggctaagccagtctagtcttttcaggtttttctgcctgctttatattctggctgtgctggcagctgattagatggtgccctcccagattaasggtgggtctgactttcccagcccactgactcaratgttaatctcctttggcaacactgtctcagacacacccaggatcaatactttgcatccttcaatcaaaccaagttgacactcagtattaaccatcacaagaagcaagcatcaggctttaaggcagaaagggataggccaacactactgttttgtgcaaatgcagtagggtttatgatcaggactgcctttgtctgtaaagctgttaactttgagccttgaagggaaaagataaacatcagctgctagtttacaagaaggcctggaccaatgataacctttttttctggactggtttctttgatgttttgtcactgaagtcaggaagtacctagccttttaaagttgttttgattttggacagtgaccctggccacccagaaccccatgatttaaacacccaaggtgtcaaaatggtctacttgcccccagacatgtctctaattcaggctctagatcgggggttataaggacctttaaggctcattacatgcaggactcaatagaaaggattgtcaccaaggattgtcttttaccccaatggaagagaacatcatgaaagtctggaaggattacaccattgaagatgccattgttgttaagaagaagtcatgaaagcagtcaagcccaaaacaataaatttctactagagaaaactatgtccagatgtacatgatttcacaggatttacgacagagccagtctaggaaatcatgaaagagattgtcratatggcaaaaaaaagtggagggtgaaggatttcaaggtatggatgttgggccagtttcagtggctcatgcctgtgtttccagcagtttggaaggccaaggtgggaagattgcttgaggccaggagtttgagaccatcctgagcaatatagtaagacctcatctctattaaaaaatttgaaaaatcacgcactaatagtcaccacaccagaggaattaacagaaggtgacttgaaggagatgagtgcttctgaaccagagccaaatgacgaggaggaagacatagtagaagcagtgccagaactgatgttagataatctcacagaagcgttctgattattcaagactgtttttgatggcttttatgacatgcactggacccttctatgataggagcattgaaactaaagcaagtggggcaagggttggtacagtatagaaacatttttagagaaatgaaaaagcaaaaagatagaaattacaatgtatttacataaagttacactgagtgtgccagcctcccctgcctcttctttcatctcttctaccccaagactagaccactgcattttaaatgtattacatgctgattgtaaaaaaaaaaaaagttgttaaatataaaaactacataagaacaaagttatctacatttccattacatggcataagactataattatatgatgctcccaacctataatgtatgtagactgtatatttacactgtaaatatttgtgtccttttttgtgaatttcattcttgcttattatttcaagcagtttacaatgctattaagtatgctttgagatattttgatggttgtataatttccagtcttaggattcctatgatttatctaactgcttctctactattttgtttttccatcattacaaataatgtataaggttataaacgtatcctttctcatttcatcacaccattgccaactctagttattataaaaattctgtaggctaggcatggtggctcacgcctgtaatcccagcactttgggagggattacactagatcayttgaggccaggagttcaagaccagtctggccaacatggtgaaaccccatttctactaaaaatacaaaaattagctggtgtggtrgcacacacctgtagtctgagttacttgggaacctgaggcacgagaattgcttcacactgggagatggaggttgcagtgagctgagatcatgccactgcactccagtctgggcaacagagtgagactctttctcaaaaaaaaaaaaaagtatttactcatttgacaggcaaaaaataacataaattacttgtttacctatgaagtaaaacatgttttcattgtttttggcattgtgtttctttcatgaattgtctgtacatgtaggaaaggctgttctttagaaagataactgaawtttttttaaaaaattgacacttgaataagaatggttaatctgtggagagaaacatgtttagatgctgctaaatatctgggaattccatgccaagtgtagctggagaatgattcgtgatcatgaatcacgaggtgaaaacaaggcaggacttcctaaaggtttctgtattacttttctgcaaatataatccactcagacattggtttcatcattatatactgggctagagcatgttcttatttttatttctctttgtttaacttaaagcacatgtkgaagacataatttactctttttttaagtgatgtgaaaattgcatggttttccagaagcattacattgcacattttaattttgagcctaattcatatttcgctatagaaacttctgtctgtaaagtggaagactagctctaagtcaggcttctctcctatttatttcagcttcccagggccacttttctcacttgccagatctgggatttcttattaggagtatctcgagaaagatggtggaaggcatgacttgatcccaagagtttctctttttgactcctagaaatagcctttctcacctatcatccttctctgccttttttttttttttcaaactttcttcaagtactctttaaaaacagtttaaatttcattaaaaactgtagcatgaattcatattccaactcattccagtagcactttaggaaggacttttctaggaaggaggttttttgttctgttttaaacgcagtaagacctagcttcagagcactctagggctctagctaatttgttcccctttgtccctaggtgctagtcatctaatgaatgaggtgtttcttagcattatctacagatatggctttaccttcaattgtgtcaggttacatttacctaatgtcagcaagacttcacatttcatgtatgaatatccagatgaaataaagtcctggttgtattcaccatcactatttggagccttttgtgtaatcattaatcattatttatgcttcacaggtttgttgtggcctgttcagcctggaaatcctgtcccgagactgatgcggaaaagctagttcagctgactttttgtgcttttcatgatatgatacagctgatgaactctactcatctttagagatgaatcatctattaagcacttaccaaaacatatcattaaactgagtgctgggagtgagttggtaatatgagatgggaaggaatgttgacttgctaacattcctttaacaagttaagaaaacttgttaaatgtagaaattagtagaatcatgctctctaaatttattctgccatagaaggtagaaatatttttaagctcctctgatgcagcagcaatgcaaattatgacatagtgaatatagaactatgcagtatttaagcctcaacaatccaaatctacaaactttaacaatgcaagtcttactctaatttttaagtatttttgttggtacttacatgggttataaatcctctctctggacatcaatgtagagtccatctttcaagcactttaatttttttagctgccaaagggtatgaattacattattgtatgctaatttccctgaaatcaatgccttctatgttcaccacagggatacaagcctgttatgtttgatgggaaagaccactacaatctaatggtgatctaaaataacttttttgggctgggtgcagtggctcatgcctataatcttagcactttgggaggccaaggtaggaggattgcttgaagctaggagtttgagaccagcctgggcaacagggtaaggtcctgtctctacaagatcaaaaacttagccgggtatggtggtgcatgtgtgcctgtagtccaagctacttgaaggctgagacaggaggatcggttgagcccaggaggttgtggctgcagtgagctgtgatgtgcccttatgctatagcctgggcaagagcgtgagaccctgtctcaaagaagaaaaaaagagaaaaataactcttttgaacaaacagacaaattagctagtagtatggagatgtataccctctattacacacataaaaccgtaacaaaattcattktggtgtattataattagttttgtgaatagaaaaataaagcacttatgtttaaatttgttacagtgacttttaaaggattaatgttgaatcacattgtcagaattttttcctcctcgctgttcaattttgtagtttttactctcaaaaaatgaaattctcaaaattatatagctttttgttttgtttgaataaatgattcattcctgtttgcttttctggtgctttttgacctcagttatatattgctgtgtaattaaccatccaaaacttagtgtcttgaatcagtttattgtttctcattactttgtcagttgattgataacagctagacagttcttctgctcatcttgcctgtgtttatttgtacagctataatcatcaggcagccaggactgaggctggaaagtttaagatcacctcaccaactatctgtaaatttggtggctgggactgtctctcctgacatggtctctgatcatctagtattcagaattgagcttccttacttggtagtgagagtgttctgagaggtgaaggtcccttgaggcctaggccctgaagtcacatgccatcacctggctgcattttgttgattaaaccaagtcacaagagaagtccagattcaaggagtggggaaaaagtaatatcttgataagagaaagtcactttgtaaaagagtgggcacagagggcatgattatgggtactatagcaatctgccagacattttaatatatgtaaagattacatcatactcagggtactgattctatacatcccttttaaaaaacatgtacgctctgaatttgataagactggtttattgctaacaattaagccctttacactgtgccagcctctgtcctgaaaagcatcagtactatttctctgtgaaaacattcagagttggcttcagtagcatttgatacatttcttcacagttggtatagaaaaggaagatgagatctgaactaagaaccttttcccctcattctaatgcagggttttaaactagatagcgaggacatttagaatcatttggttggtttataaatacaggttgaacattccaaatttgaacaccagaaatgctccaaaatccaaaacattttgagtgctgacataaggaaatgctcattggaacatttaggatttctggacttgggatgctcagccagtgagtataatgcaaatattctgaaatatgaaacacttctgatcccaagcattttagataagaatactcaacctataatgtgtaatgagttgcgtattttggagactgcatcacctgcacagaaacctcctctcactcacacttcaccacttttcctaacttgcctgatgtgaataatcacctagagtgtattttaaaaaacagattcctgggcctcaacccagacctactgaatcaattattttgtttacgaatagatgccccatgattctgatcaggcaagtttgggtatcattatacaggaataggtcaaacactactttgggtcactgcagtaatgtactttttgccccacttttatcttggttaatctgaaacttgatccactcacacagtggtcacatttgaaaaattctttggtaatatggcttattacagttagaagaactttggatgatttactgaatttaacaacctgatagagcgctaagaactaatttgttgcagaaaattgtggagaaaacaaagggaaaattattgaaacatttcagtgtggttagcttctaggggttgtctatattttttgctttccatctaaacatacctttcattgtaggaaaaacggattttctgggaaaagtagtctatttataaaagagaacgcagttgctatagaaactcagcatgtatcattgatgtttgatgtttgaaattatactgataattgtacattttaaattaatgagtttaaaactttaaaaaaatacttaatgatagggctctttcttgctttatggaaccgatatgtgctttcagagttagctcagtagggcaatttcattttctcttgatgttggatgataaagctggaaattcattcatttaaaaaactttgattccacaatagaatgatttagaaaattaccaagagagatgaggctattgaacaatttatttttcttttgtacttgggaaaattattcccaaactttcctgtctacccaacccattcaggaccataagaccatttccctatgtctgtggcttctatatttctacacctgtacttaccttgaattttgttctttttctggatgtttctaataacttagggagagctagcctgttgtttcaatacttcatcaagacaggtgtcacttctaactctcaaatttcaaatgccgtaataaaccccaaattgggtcttctaaattgatctagaatgagacagacatacctatgttttatgatgacaaaccagaaacttattttacaagtcagataaaatggtagaataatttgaatttatttttaaaatatactgtagcaaaagttcataagttctgtgtcccagcctggacactgaccattgaaaaatagatgcctttctgtgccagcagctgctgatgcgtgccatgctccttgactctcccattctgaaacaccactattaagtctgcattctggatggtggacaggcggtgagcaatcacaatgcaggtgcggccttctctggctttgtccagggcttcttggacaacctattgataaatcagacagacaccttatcccaaaaattgtataaattagttttaacattcaagtaaatttgaaaatgttacctttctaatcaacttttaatttctagtatcttagaatctttgaactttatgcatgtgtattttgtataatcaacatttaatctacatagttatgttctgctttttaaatgtaacacaaatgggttcccatgctgtaaaaaaattcataagtatttaaattttctaatcttctgtttaactagttcccttttgagtattttccagtttttcattcctaatgtgctaaaaatgtaatttgtgcagcttttttcttttgaatgctttactttataaaatatataatcattttagaaaatttagaataaaatattccattacttcaaaataaccactatcagccgggcaaggtggctcacgcctgtaatcccagcactttgggaggccgaggcaggcggatcacaaggtcaggattcgagaccagcctggccaacataatgaaaccctgtctctactaaaaatacaaaaattagctgggcatagtggcaggcacctgtagtcccagctactcaggaggttgaggcaagagaatcgcttgaaccctggaggcagaggttgcagtgagctggattgcgccactgcactacagcctaggcaacaacgagaccccgtctcaaaaaaataaaaataaaaaccactatctaacgttctgtgtttttccccctgtgcttgtgtgtgtttttttcatggttgacagcaaaatcccttctatttcataaattaaataagacataagttgggaggccacacacaccttttcactttcagtatccagagctgatgtagcttcatccaacaggaggatttgaggttgtctgatgagggctcgggcaatagcaatcctctgtttttgacctcctgagagctgagtccccttatctcccactcttgtttcatatttctgcaagttaaccaagttataaatatgttgaatgaactgttgcttaacagttgacagttctatttacaagaaaaacatttagagtcaataacagtttctataacgttgtttcaacttaacagagtgtttattttcaaaatcaaactagaaaactagtgactttaattctcaatggtattctacaataggctatcttataattaactttctttaaaataggaggaggatactctaaaataacaaatgctataacggatatatgaatcaataagtcatttgttgtcattatcaagtattatgcactgtacatagtagtatgtgctatactcttatacaactggcagtgcagtcgctttgttatgccagcatcaccacaaatacttgaattttgtgttgcactatgatattatgacagctatgtcactaggcaataggaatttttcagttccattataatcttatgggaaccactgtggtatacgcagtctgtcattgaccaaaatgttgttatgtaacacaggactgtagtagtatacacagcacactatgaaagatcagaagaaggagatagaagttgttatggagacagggtagaaggagaaaaaaggggaaataaatgaaagaaatctttttagagaagtttggggagctagattttgagagagcattctaggctgagaaagagcatatgaatagagatgtaaattgagtcagttcagtttgcagggcttatgcagtgatgtatatcatgtgaattaatttcctaaggtccagtggtcacttatattaagagctgaagctgtaaatttttctattcacagtcaaatccaatatttgattcaggtcaatgtgcattaaaggttggtaaggctaaccaaaatgaaagggttttaaaattttatttgtgggtgtgagtgatttctaactatagcagaaaataaaagcaaaaataattaagctctaygtcagtgtaacccagtggaaccccgaatgctggaagaatgccataaaatgaattgtccctaccatcacttttagggacctcaagccatccttccagggctacacatgtttaaagtgaactaaaaatggatcatggactgaaatttaaaatgtaaagctataaaacttttagaaaaaaacatggagaaaatattttgggcctagggctaggcaacgagttcttagacttgacactgaaagcataatccataaaaggaagaattggtaaattggacctcatcaaaagtaaaacttttgctctgcaaagaccttcttataggatgaataaacaagctacagactgggagaaaacatttacaaactacatatccaacagtaattacaatacgttaaacaaacaaacaaaaaaaacttctgaaaactcagcagtaaaagataaaaatccaattagaatatgggcaaacaacatggagacatttcaccaagaggatatatagatggtaaataagcatataaaaaactatgttcaacatcatttgccattgggaaatgcatattaaagccacagtgatgtatcactacactcttatcagagtggtaaaaataaaaactaatgacaacagtaaatgctggcaaagattcagagaaactacatcacttacacattgctggtaggaatgtaaaatgggatggccactctggaaaacagtttagcagtggcttataaactaaacatgaaattgccatactgctccacaattctactcctgggtgtttatcccaaagaaataaaaacttgaattcatacagaaacctgtatacaagtatttacagcagctttatttgcaatagccagaaacaggaaataacccagctatccttcaacaggtgaatggttaaactgtggtacatccacactgtggaatatcactcagtaataaaaagcaatgcctatgaatacacacaacttcagggaattagctgaaagacaaaagttaatcccaaaagtttacatactgtatatatttttataaaacatttttaaaatataaaattatacaaacggagaacagattcatgtttgccagagtttgagaggaatgagggtgggaggaagggatatatgcatggctctaaaagggcaatatgagggatctttatggagatgagaatgttctgtatctttttttttttttttttgagatggagtctcactctgtcgcccaggctggagtgcaatggtgtgatcttggatcactttaacctccgtttctcaggttcaggcgattctcccgcctcagcctcctgagtagctgcaactacaggtgcccaccatgacgcctggttgatttttgtgtttttagtagagacagggtttcaccatgttggccaggatggtctcaatctcctgacctcgtaatccacccaccttggcctcccaaagtgctgagattacaggtgtgagccaccgtgcctggccagtgttcttaattagtggatctatgaatccccatctgcaatacagctgcacagaactaaatccatatgc

SEQ ID NO: 94900 - DNA, 137451 bp, Homo sapiens
  misc_feature (1)...(137451): n = A,T,C or G
caaaagccaaatgtttcattttctttctttttagaaatggcacatttatttctaagaagtcttccaaactacccccttttcttgtctcttagcaggttgttaggtgatgcaggcatttcaggaaagtcacaaagttacttggtcatacctcaccaaatatcagtattcttaacacacaatataaaactgaggctatcagaatatttaataaaccagatgagcacaacatcctcttaatgatcactaatgtttccattatcccttgtggcaatttaaattcactaaaataagaacaatcatgcaaccttctttttggcttacatcaaggaagattccatttctatgaaacccacatcttcaagattacactgtaaagacaaattgaactaaaactttgaagatttctacacaaatgcaaagaattcagatctgggattccatcttttattctaatgcatacttgatctggttgtattctgaatcctccttacaggaatgtgatgtggactgacacgtaatttggaaactactagaaggctcttgaatggaaccagggattcttcacacttcatagagcagctgaaagggacttgagcactacttgggccttctgacgccagagttacagaatgctcttttgccaaatcatggatggccactcgagcacacagatattcaggatcctcttgtccccgtgtgcagagaggcctggtgctggatatcgtttatgtgagttgagcggatagctgaggctatgtggatgcatgtaactagttagagcattttactaagttaatgaccgaaatcagagctctcaggtcactactggaatcagctcctctccctgtgaagtagttaactgtggtcatgatctgccctctgcacttcccagttaattgcacctgcttcctgttttcacgtggggagagcatcctcacccagccttggaagcactgacattcgagttgtgcgtgggctgytgatgaatcctggttcagtgagcttagctgcctaggcagggtggtaattagmgtacggagttttacaggagaatctactgcataattcatgaggaaactgaaacgcaaaaaagatgtgtagttaaagccatgtgctcctgtgagtgggtgggcacgtgcagtcactctgcctgcaatagcagaggcggaagagccgcagagacccgtgggctcaagaaaagtacattcattaattaattaatcttataacataaaaacttttgatgttcaatcggcctactcagacattcctcaccaaatagaagtaggaaggacacggggaaatgcaacttttcaatgaagcatccatcagcaatttaatgccttgttttgtccacttttccttcttgtgaagagtgtaatgtcgaagttagagccacatctccacctttagaaagacgtggctgaaatgtctgaagggcaggagaggtgacccttggtgagaagatggctctttgctgatataagtcacccccgatggcatgggtccctggtcaggaggctgttttacatccttagcttgtagaaacgcaaagcacaggggaatggtgtccccagagtccatgagaggagcttcgcacagggacagactgcggtccccagagtccatgagaggagcctcacatggggacagactgccgtccccagagtccatgagaggagcctcgcacggggacgtgactgctgtccccagattccagactcctacctcctactcagaaaaactggagccattaaaatggttactgctgaatgtggagctttttgtggtgtgagagagccccatgtttatttcctgaatttcaattaacaaaaaccctcctgtatttgtctttagttttatctgactcatataaactgggaaattacctacctgagtttgaacaaagctgaataatttttcaaattttacaggggaatttaattaagtttgaatgacagcattttattttccaaatttgttttaaaatgaattgagctgtaataagagttggaagataacacagagctcccaaacctccttcacccacctgctcagtgttaactctatgcacggccacagcacagcaaccaggaccagggagtggacgtggatccaatgctggtgattacatctcagagctcaccctggtatccccagcttttccatctgcatcctttcctcttccaggatccagtcctggcactgtgcagcccacggccgtcgggggtcatcaggtccctgagtctcctctcatccatgttcatctcttaaaaaataaacttacaaatttaaaaatacaaaaaacagtgcgcgcacacacacacacacatgcacgtgcacatacacacacaagccaggcaccaaaagacaaacacctcatgatctccctcctatatggaatctaaaagtgtcgagctcatggaagcagagagtggatggtggacacctagggttacggggcaggtgcggtggggggcaggtgtggtgggggctggtgccatgggggggacaggtgccgtgaggggcagaaagatgctggtcaaaagtgagggtttcagttgcaggataaaaatgttctgggatctaatgtatagcttgatgactattgtttatttgaaaatcgctaggagaatagatattaaatgttcctatcacacacacaaaaggatgaatacgtgaggtgctgtatatgttaattagcttgatttaatcaccccacagtgtttacatgtatgaaaacatcatgtgaacataaatatgtataatttgtatttgttaatgatagcttgatgaagctgggggcgaggaaaacaaaaactaaaaagtgaatggcaagtaaaaaaggcaacatcaggctgtagtttgaagaacacaaggcagtcaggccctggccacatgtcaggtgagtcaagtgtgagcccaccctggatcccttttctgttacagtcacaggcaagggcctattacaggtggtcctgggcctcggttagggagagcctcttgtctgtggacagaacacacgatgtctgcagggagaaaggtggcctttctatggagacatcaagcaaaatgtgtgatttgctgtttctcatgcattgatcaaggtattcagtaatcagatttccccaggatatcaaatagttcattggcacttgccaaaaaatggaagcgtgcttgtcttctcggtgggcccgggactggaccgcagggctggtgccactccttcactgagacctgcttgtagcagggccctgcattcccccatcctgccatgtgtgagttggcttcttactgtatcatgcgttccttgcagatttctgtcttctttggagctccttgatttttctcataatgggagaagacgtgtatttttttctttccttctcatggctaaaactgtcctctttctcactgagtctcccctgcaatctctctgctctccattgctgggtggccacgtcttcccartgctcctttctgacagagactgggggcttcagccagatctttagttgcctctctttcattctcccattatgtgatagcctcgggttttccacgtccccctgcagaaatcttccttcccaagtcccccgtcttctttctcaaaaatgtgtgtgctatccagtgggcctcctgcaaacccgccattctcagacttttctccgctcccctctcaacatttccagtgtaacagcttccattgtacttgatgcattatttatattgtttaattagtattaaaataagcacatcatgtaatccagctaaaatatgtattttcaaatgatagatacatttctcatatttgtgcggggtcaaatggtaacagcaacttagaggagaggctacaaaacgacctggagagttgatgtgccggctcggcctcccccagctgtgcatgcaaaccccctcttcccaggtctccatcggcactcggcattttcaagcgtccttctgtgatgaaaagagcatccagtcagtatttactttacattttaatgctttcttcttcaaactcttccttgagtatttgccccacgctgtctcattttaccacccacctttctggctgtgtgaatttcctgcgaatgccttaacaaagggccacgtgcttagtggctttactccatcagctccggaggtcatagatccaaatgagacttttggcagcaaggtccagggacaggcctggttgtgcctggagaccccagaggccctgctcctggcctcctccagtttctggaggctcatggccacggccctccagtctcagtttccatcatcacttccccctttctcccctcagactttcccacctttgtcttgtaaggagctgtgtgctaacactaaggccagtggataatccaggctaatctcccctcctcaaaatcttaactgaatcccatctgcaaagccccttttgccatgcaggttgcagtcacaggctgggggactgtgtcccctagacgctggtgctctgagctactcttgaggtcttttccatccacattctcccaagaagaatcccattcactcacagtccactactgtatcccccctcaggactcccaaatgtgtctttttaagctggacttcacccaacagctgaaagtacatttccaaatgcccaagagctcactgcccgcctgtgccacgggcacctccaacacaattccaagcctgagtctgctgctcctttgcttgtcacagccagtctcctttcttctctggccttcctagggccagtacatgagattttcacttgcttaggcatcaaaccgaggatggctgaatcctcagaggctctgtgcttttcttctgttcccaacagtaactcatcattgagccatggaatcctctttaatgagccaccgagtctggtccttcctctctatccaaaccccaccctcctagtgaccattctcagggtgcgtggggggattatatcactgttggctgatctcctccctgctcttcagagcttgtctaactcatttgttatcttcacccatttgaggggtgagtgatgaggattgaggggagaatgttaaaggcaaatcatcacattcttgggcttcagaacatcttctaacaaagattaatgttctgaagcctttgcatcgtgttttagcatttggtttcaaattacctagaggaagcatcagtcacatttggagaagggaaagaaaaggagaaagatgaagatgattttcacaaactagaaacccataggacttccgggggcatgaagaggctccaagtctcaggagcaggtcattgaagatgtgttattttatcattttcatgatgagatacagcctgaaagcagatcacccatgaaaacatgtcatctcccagtgttcggaatgcagtcatggtgaccttcctacagaacatctctgtctttgtggggactcttttgatgggtgcatgatgaggattgaggggagaatgcatgctggtgaacacacactgaactgtgctcatttttcacctcaacaaattggaaaaaagtgtactttattcacctcttagtgataagaaaactaggggcttggggacaggaagcaaaaggctcagagttgtagagcgagtcatcggtgggcctgggagctgcacccaacccaatcctcggaagattaacagcccctttttcacagggtatttaactgtgaaagtaagagggaggaaaatgcaagtgtcacaagtctggatttagttggtttattctttctccctgtataatttttcccctcttcttcctaactcattcggccagaggctggactgcatgtggaccccgatgacatggcactttgtttctgaccagtcaggacacacaagaggcccggcgcaaacacaacaaagcccgcagacattctgtccccacgaagaacggacgccactcgacttcctagcatcttgacgggctatccaagcgcggagtcagtttataaggtgggtaaccaagtccctggaaggcaattaaggcgcccatttcagaagagttacagccgtgaaaattactcagcagtgcagttggctgagaagaggaaaaaaggtcaggttgtaaagctttttatttttccattttctaagagaaattcatcattggaacttgtaaagtggcccaagagtggctgtaatttgggccattatagcaggtatgggtggcgtctctcagcaaagctgactgactgactgatgagtgctgtttgcaatgacctccgctggaacatgtgagtcctgtagggtcgattcctagatcaccgtctactgagacacattcctgtcagcatggactcactggtgctatcctgcttaacaaaattagtggctcaaaaatagccacagaaagcctaagagaagaaaacaaggatttgaaagtagaaatgatgaattttgaatcttctgttttgtcttaacaactagaattctaaaatcattttatggacataagaatgctttaagaaattcaataggcatttaggggttttatttatcacttttataaagactaaatttctaatagtactcactttttgccacatagatgcattaggggaaacagatttttttcattcccaataattattcccagtactgttacactatttgacattaccaaaartttaaataggttattactgagayatattggcaactggagctgccaacataaaaactctgtttttraataatgggggcctgggaggcctgctcarcrctgcagtttctgtaacctcctgacayggacggcgactctggtctcgcagaccccaggcctgtgagggtcgctcactgcggtagaggctgcgtggagtcagtggagggagcccctcagcagggagacaaggacacagmggttcccatggccttgtcagtgcttgattacatactctgtctccttccgttaattttagaatgagagcgctsgctgtgctgtctgtcacgctggttatggcctgcacagaagccttcttccccttcatctcgagagggaaagaactcctttggggtaagtagcaaacacattgcggtcttctggccttataaagttatttttcacacttactaaaatagagggcataatggtagctcctgagagtcactttaggcccctgtagtgtatgctttgttatgcttaagaaaaaaaaattgtaattcttgattttagaaggattgaaatatgtacatttctttctttaaaaaagagctgattttccttggatgacacaatagacaattttcacttttacctattcatataactgaaaaaaaaattctttgggagtgtttttcttcctttgctacagaattattttttattaaataacttctgtgatgtattttctggaatcagtgtgctactatgtgaaaacaagttaagaaagctactgagatgcagtggttaaaataatcacagatcaagctctttgcttttcttttaataaaataaataaagttccaaaccctgagaacaagtttcactggagtgaatactgcaggggcatttgcctggacattttaccccatggacaccgctggccccgggagcargtgacacctcgctgggcaggtccctgggcctctgcacacagtcccggggcccctggagcaggtgacacctcgccgggcaggtccctgggcctctggacacagtcccagggcccctggagcaggtgacacctcgccgggcaggtccctgggcctctgcacacagtcccggggcccctggagcaggtgacacctcaccgggcaggtccctgggcctctggacacagtcccggggcccctggagcaggtgacacctcactgggcaggtccctgggcctctgcacacagtcccggggcccctggagcaggtgacacttcgccgggcaggtccctgggcctctggacacagtctcggggcccctggagcaggtgacagctcaccgggcaggtccctgggcctctgcacacagtcccggggcccctggagcaggtgacacctcgctgggcaggtccctgggcctctgcacatagtcccggggcccctggagcaggtgacaccttgccgggcaggtccctgggtctctggacacagtcttggggcccctggagcaggtgacacctcactgggcaggtccctgggcctctgcacatagtcccggagcccctggagcaggtgacaccttgccgggcaggtccctgggtctctggacacagtcttggggccatggcacagcactggcacctctgccctcaccagcctttcccaggactggaggccttgtctgtcgttcagggtcacagaatctggagtcctcgctgttcccagccacacccagcccagcctcctgctgggggccacattttaccccaatttttctgcatctcaggacttcacaaccatattaggagtggcagtgaagtccataacagactcgtaggctccttaaaaaaactctccctccacagcccccaggacttcctggtcactgccygctctgagatcagggaagccgtggggcctctccctgccagcttccatccatgccccaaggatgggctactcacccctaattcctgtccctcccctgcaaatggagaacactggaaaattactcatcgcagtcattatttgtgagcaagaatgagatacttcatttaaagcggtgaatgcagtacctcggcaatcaccaaaaaacaaaaaataaaaatggagtcacaatataaagaacctcaggaaaaagtgattttgcatcttcccagaataaatcagtcactctatcacctggaacatgctagatgttcagccaatggtttgtaaattaattactttgttattttatttcatatttagtaggacctggttgtataaaaccagagtaaaacatgttagaagtcaagagctagttctgagcaagttgtgatacatgagagctattcaacaaaatatttaaaactttgtaacatgttttttaattttaaaaatcacatttaaaaagccatcaggaatgcagtagccacagcttttgctaaaacagtttttaaaaattatttttccatatctgggagatttgaccttttcgttttgcttaaacttttggttgacacatcacgagtgcacaggacagcagctgacaactgccccgcgtgctgggcacatgcttctgcctgctccaatatttcaaagctgacttattgtttgcttgaaatgtgaatragttactgaaaaaatattatgtgtctcacagtatttctattttacagcctttaatagttgttttgcagctttaaatctgtttggaaaatgatgcccaatgactgtgtgtgggtttatgtcacctgtgctcacagacatgtgaagcaaaaaccttggcctgctccccagcctctgtgcaggacaagccaaagagcaggcagcggcagggccaagaggatccaggctccccctggaccacacacggtcaccgtaagcacatggtgctccggggggtcctgcttggtgggtggctcacccttatgtgtcaggcacccattttatagatcaaaacgtagaggtctggaagtctcagaagcagcaaggctgtggccgctcagtctcacagtctcacgtcccaggtctttacagagaaccaacacacatcctcatacttgaagctcgatgataagtactcagcgaaaagtatcaggccagtgccgtgactcacatctgcaatcccaacacagtatcatcaggccagtgccgtgactcacatctgcaatcccaacacagtatcaggccagtgccgtgactcacatctgcaatcccaacacagtatcatcaggccagtgccgtgactcacatctgcaatcccaacacagtatcaggccagtgccgtgactcacatctgcaatcccaacacagtatcaggccagtgccgtgactcacatctgcaatcccaacacagtatcatcaggccagtgccgtgactcacatctgcartcccaacacagtatcaggccagtgccgtgactcacatctgcaatcccaacacagtatcatcaggccagtgccgtgactcacatctgcaatcccaacacagtatcaggccagtgccgtgactcacatctgcaatcccaacacagtatcaggccagtgccgtgactcacatctgcaatcccaacacagtatcatcaggccagtgccgtgactcacatctgcaatcccaacacagtattaggccagtgccgtgactcacatctgcaatcccaacacagtatcaggccagtgccatgactcacatctgcaatcccaacactttgggaggccaaggcgggaagatcacttgaggctaggagttcaagaccagcctgaccaacatggcaaaaccccatctctactaaaaatacaaaaaaaaattagctgggcgtggtggtgcccacctgtcatcccagctactcgggaggctgaggcacgagaatcagttgaacccaggaggtggaggttgcagagtcgagatcacaccactgcactccagtytaggtgacagagtgagaatccatctcaaaaaaaaaaaaaaragagagagagagaaaaaaagaaaagcatcagtcctggatagagtttaggttgtatcaacttgcctgcaaactgtaggaaggtgagaataagaagggaaagatcttggctggtgctcagactgggtgggtgcaggagagactcttgttccagrgcaggatcccctagggtcaaagcacaaagagaaataaacttcagcacctgaaaattctgtaataagagtctttgaaaatggaaaaaaaatctatgcttgaccattgttgtctaagagaagtttgctatcaatccctcctctaacgcccygaacagaatgttcttcaccagaaccctgtgtattcatcaccacacaggctgagaggcattccagcatttgtgcaacatcaagatttatgtgcaattatctttatggcaaatgttccacaagttatagctgttaaaagaaaataagatgcaaatgaacaagaagaagcagaggcgctgcctgcagcctgggaaaatttgggaagctagcctaatgagtgaatttgttttaaaaggaaagttggcaaaccttattccagttcattaaatttcaacaaacagcaaggattaaagtaagaatcaacacacaactctaaacaggaatcaagcgcttagaattaggagcaaagctctggccctgggggcttatggttttggagaagaaagattttggctttcatatatatatttaacataaacagcctttggaacaaggcaacttccttcttctttctgaaatgtggtatgttcttgcctaatgtgtccctgaatcccacctcttttatgaacaatatgaatatgcataaaggagaatttgggggaaccgtgccatgcgcccctcagagcaggagcaatcttgagaaggcgcaggcagagagcagcgggcggcttctccagagcaagtaattaagtcccgtgactccctagaactcagtgttcagttctgaaaaaaaacttcgggttcaaactccytaagtctatggtccttgcatcagacgcctcttccctgggattgctgggaactgaggaaggaagggcgctgcagagctaacgatagcaaggggctcagagctggccaccccagctccctggtggcaggagagctaatgtgagctgatggaaactgagaagcagcagataaaggaaaagccatctgccctgcctctattgcctaaaagtagaacataaatccrcaaaagtgaccatttccctctccaacagaaaggacagaaattcatcaccagggaccccaggccctcaacagcctggaaccagccccagaggcatttgtgtggcaaacctctgcagccccggcctcccttcctgtagttgccccagagaggcctcctcaaaacgtgtttcctgggaactcaaagtcctttgctttggtcttgcagcttcttggaaaaygattgttcttttgctgaggggctgtgcagcagagttctaacgatccattcgagtttccatcttggggcgctcagggggctccctcgtggaagcaggagtccaggctaataacccctgtgagttttcctcctgtgactctgccttttgtcagtctaatttcaatgccccagaaaattaatctaagatgcagggagagaaaaggtttcttcttcccctacagatggatgtcagtcatctctattcagccaagaagtagttaacctaaacaatgaaaacaccaccggttccagtagagacttgagactatctgatgagagttatgtgtctctgggaggaagttttcaatacagaaatggatttattttatgaaacttaaaagactaataatctgcaagcctataagaatgttttaattctgtaaaatattttacaataagaaaagaaactagagactaagcaacatatgatcagttaaacttgaataacaatatattaatattggtcaataacaaggaatgatctctctagtaactgccgtttccaagcatagtagagaaggataagcatgtttctttatatttaatcagttggttcttaaataattgtcaagtgcctgctgaaaaccagcctttggtcttggtcgtgaatagcgcagaactttgcagagccctgaagagactctcagtgataggatgcatatacacaggtggtgtgagtgacagagctaattttttttctggtacctaaagatcagcaggatcaaaatttcataaaggaagagctgggagcttgagattgacaatttcatgagatgaaggataaattgtgcgttacctccacagctctgcaacatggagattggtcttgggcaggtggtggacgtcctggattctgaggaagacctgcacgcaattcagtgggcatcaggagmcttcagatgctttcatcaaaggcacaggcacaagcaggccttggtttagaaaggtcacttgggtgacagcaggagggacagaaggatggtggggagatcagtgcaggagccagtcaagagctccttctactaaggcagtagaaagtgagactgacaacggccaggcaggagcagaacgttctcccagagacattatggggaaattcacaccacatggtgagtgaaaggcaaggaaagccacggctgggcttcttgcttggggacttgagctggtagggtggttatttcaggctgttaacacccctcaacagggaacagaggaggatggcgtgactcaggagagaagttcaagtggaaaacgggcgtttgggagaggaccaaaggagggtgagaggagagggcaaagatcagaggagccagaaatgcacccgaggtgacactcacaggagggagaccatggagagaagagagccacagtgaccgaggctgagagagagagtggccagagactgaaagcaaaaggcacgacggccgggagcactgaacgcttgccaggccctggaccaaaagccgtgcaaacctctctgtaaaaccatcctaagacgtaactctgtgcacytgccaggccctcagcccagagccgtgcaaacttctctcttcagagcacacttgcraggccctcggccaagagctgtgcaaacttctctctaaaaccatcctaagatgtaactctgcagctaggagagaaaaccgcgccaggtgaagtgagctgccgcgtcactcggagattgatttgtctcactccagagcccatggccgtcacccctctgccacttaagaatgccggcaacatcccaaaagcaccagagtcctggggaggtggggggcggggctggttactgcatttggcaaataagcggtcgtgactgaccacagaatacaaaatgtgagttgagttgcctgggcagttgcagtgggtttagaaggaaataagaggaaaataaaggaaaattccaggtgtcttatatctcaagcttttgtgggaacaggargttccctgattcttgagagctgaaagaaatctccataaagcccggaatgctggtccttgaggtccacacctgccaccgatcctgcgacgcccaggccgcccctcccctctcggctcctactcactcttggtggcatcgtcccacattgcactgtccccagcacgcacacattggcgtaaagccaggtcccctcttcagattccacacccagagcctgcagctctgacggctgtgctgggggtccccggcgagctgtgagcccgtgctaggtgttcctccctccctcctgcccttgccccagggagccccacaccggggggctctgttcattgctctctgcccaaccctgaggggtcaccctctgccccaagtgcttaaccactggttactcatcccagaacccaagagagatccagcacggaggttttcttaactttgctgtatcacactgtaagaaactgggtggccaatggaacagacggagcagggcagagtgagcaggaagaaatgatgctggggaatttgtgtgctccttgggtggggacgagcatggaaggcgcgtgggactgaagccttgaagaccccgcaggcgcctctcctggacagacctcgtgcaggcgcctctcctggaccgacctcgtgcaggcgccgcgctggaccgacctcgtgcaggcgccgcgctgggccatggggagagcgagagcctggtgtgcccctcagggacttctatttgcttttaggagccaattcattcctttggtgaagtattgatgctacgcaggtgaatttagtaacaggactgacgtgtgaacatggccggaaacacttgccgtcttcctgttaccgcgtccggaacttcacgktgatacccagaaatgggatcttaacctcttacacattccaggtgctaaaacaaataacacaggagtgctttcattggaaactactggtatagtggaattattttatcttttattaartacacaagataggcaaatcttatcaactttaccactggctcaggtaaccagtgatgaatgttcagaacaaaagttattcggaatcatttgaagtggtttgggcaagtgcgaaattaaggtgagtagctctgatcccatcctccaggcagctccgtgcrgtgggggtggacgcccctctgtagcggggaagtgaaggcctgtggagggaagcgaccccgggacctggctgcctgcctgtcccggaagccacgtgggcatcaccgcagcaagatgggcttgaggaacaaagcaacactgtcagtgaatcgctgaactgtcattgcrctttgactstgtgacrttctgttccgtaggaaagcctgaggagtctcgtgtctctagcgtcttggaggaaagcaagcgcctggtggacaccgccatgtacgccacgatgcagaggtgagccttgcggaggggccrccgccccaaatgccacckacaggcgcatcctccctgacatccacacacgtgtggcctgattttcgcaattgcagatgaaaacctgaagcttgccattgttaatttacttccccagtgtcatgtgcaagcagcagacagaactggtatttaatctccaatcctttcttaagcaagacacaaaggargagcaccctgatgcaattagcaattacgtataccctggttaaaagacagtagaggctgacgtcctgatagcaaaaccagcctctcttctccaggattaggacagattaaggaggaaaagagagacctagatcccagatctttggtgttgtgatataactgtaacattacctgtggcatagaataaagaattaaatggggctctcccccatttttgaaataattagcatttgtaattatataacagacaccactattaagaatattgtggtctcatattacctgtctagaaaaagaaaagaaaaacaaaaaacaaaaaacctgtaaagcagtttgccctcccaagcttattattttgtaggaagttgactaataattatataagttcttgagayacaaaatatcaaaagacagcagttaatttattccaaatttctattattccagccagaaaaataccttactgttcataytggctgcaaacaaattattatttattttctaaaaattgaatcaaagggaaaagaaagagaaacactatttctcataaactcacgcacactttaatatgtctaaaatgggcaggaattcctggggaagacatggcagtgggggtggataccaagtgcgtagtaagaagtgtgtgctgctctcttagtaacaatttgtgaacccaagtatctaagacagatctcagtcaatttagaacgttyattttaacaaggataaggatgcaccygtgacgcagtgtcaggaggtcctgaggacatgtgcccaagatggctggggcacagcttgcttttacacatcttagagagacataagacatcaatcaatacgtgtcagatttacatggtggggagcttccaggtcataagtagatgtaacagttttctgactgacaatcagctgaaggaattattatcagtaggacggaatgtctgggttatgttaaggggttrtggacaccaaggttttatkwgcttcacagagaagagatggtgaatgtttcttatcagacttaaggtctgtgttgatgttgatgctggaggggtagaaggaggtgtgtctgacccaccaccttccatcgtgacctgacccagcttttcaggctaactttggaatgctcttggccgagaggtgggatccactcaggtggttaggcgaggacattagaattttatttttggtttacaaattgcatgttaacagaacccttttgaaatcaatgccttgatcctaaggatgcattagagtgagggaagaccaggagaggcatcaactggggagactattggaaagatttgccttttgatagctctcaaaaaaatacactatactatacacctattccaactatgtttctttccttaagaaatactgtttctactgtggaacagtcattgttctagatgccgggatacagagatgagttcgatcatttcatatcctcagaagtccgtgctccttctgtaaagtcattgttctagatgccgggatacagagatgcgttagatcatttcatatcctcagaagtctatgctccttctgtaaagtcatttttctagatgttgggatacagagatgagtttgatcatttcatatcctcagaagtccatgctccctctataaagtcattgttctagatgccgggatacagagatgagtttgatcatttcatatcctcagaagtccgtgccccttctgtaaagtcattgttctggatgctgggatacagagatgagtttgattatttcatatcctcaaaagtctgagctccttctatgcagtcattgttctagatgccgggatacagagatgagttagattatttcatattctcagaagtccrtgctccttctgtaaagtcatgttctagatgccaggatacagagatgagttcgatcatttcayattctcagaagtctatgctcctcctgtaaactcattgttctagatgccgggatacagagatgagttagatcatttcatattctcagaagtccatgcccgttctgtgcagtcatttttctagatgycgggatacagagatgcgttagatcatttcatattctcagaagtccgtgccccttctgtaaagtcattgttctagataccgggatacagagatgcgttagatcatttcatatcctcagaagtccgtactccttmtgtaaagtcatcgttctagatgccgggatacagagatgagtttgatcatttcatatcctcaaaagtctgagctccttctatgcagtcattgttctagatgccaggatacagagatgcattagatcatttcatatcctcagaagtctatgctccttctgtaaagtcattgttctagatgctgggatacagagatgagttatatcattttctatcctcagaagtctgtactccttctgtaaagtcattgttctagatgccgggatacagagatgcgttagatcatttcatatcctcagaagtctatgctccttctgtaaagtcattgttctagatgccaggatacagagatgagttcgatcatttcatatcctcagaagtctgtgctccttccgtaaagtcattgttctagatgccgggatacagaggtgagtttgatcatttcatatactcagaagtccatgctccttctgtaaagtcattgttctagatgccaggatacagagatgagttcgatcatttcatattctcagaagtccgtgctccttccataaagtcatttttctagatgcygggatacagagrtgagtttgatcatttcatatcctcagaagtctatgctccttctgtaaagtcattgttctagatgccaggatacagagatgagttcgatcatttcatatcctcagaagtctgtgctccttccgtaaagtcattgttctagatgccgggatacagaggtgagtttgatcatttcatatactcagaagtccatgctccttctataaagtcattgttctagatgccaggatacagagatgagttcgatcatttcatattctcagaagtccgtgctccttccataaagtcatttttctagatgccgggatacagagatgagtttgatcatttcatatcctcagaagtccatgcttcttctgtaaagtcgttgttctagatgccgggatacagagatgagttcgatcatttcatatcctcaaaagtccatgctccttctgtaaagtcattgttctagatgccgggatacagagataagttagatcatttcatattctcagaagtccatgctccttctgtaaagtcattgttttagatgccaggatacagaaatgcattagattatttcatattctgaaaagtccatgctccttctgtaaagacagacacctgaagaaggcacttcatttagggatgaatttattagatcatcaggaaacatgatggtttgttggttggagaactgacttactttgagtaaaagttttaataataataaaatacttttatccttcaaaacacatctagttactttagagccgaaaaggaaaaaaaataacttttctaaataataatatccaaaactagagtgtgcctaaatcatttcttccactcactcatggacagtggtatggccctaggcttttggaaagtgataggaaagcacagagcctgcctacggaagtgtttacgaaaagggagagtctgagaccaccctaccccctcattcatcacttcacttacctggatagcatggggccagggacaaagggactttgctcccaaggtagatggggccagagttttagtgtttacgctcattccctgagaccagctcccatagagcaatggaaaggagaccagggcaggctgcacacagaaggggccacatctggggaggggggccctgtgcctggggacccagatctttatgatgtgcagtgagcttgccggcccaggctctggggaagagcatccctgtttgactggagagtgcagtgtgttctgaaggaagatatgatgtccagggaggcaggggagggttctggggcctgcggcccaggctgcatcagcaaccaggttcacctgcagcagccagaccctgtgagggaggcaggcattgtgtctgggccacctggccaggtgtggctggtagtgagtggccccatgagtgtgtgggggtgagggtgagtgtgcccttgacctggcaggcacccctcggacagggcagtgtgcttttctcccaccatggcaaagagcgggcactgcagatctgctccctccacctgccgtgagagtgggagcaactgtctccctttctccgcttcataattttataatttcggcatggacagaagaagcgtctgcatgaggaggctgtgggtccgggagaccagaggccgaggaaccaaatgctcccatcagtctcagttgctcaccccatgatctgtctgggctcacactccttgagcagtaaattcattcccttttagcattcagggaccatttccaatattcacaatttgctgtgagttccagggtgtattcagcctggaatatctgcatctagattggtgataccatttgagtctgtttactgttcacggtgaaacactctgggcattactgggatgacagacagaagagctaaaggagtgttattatttaatcaaatgaagctattggatgatgtccccaaaccgagagcgatccagagaattcgtgggaacatacatttgatgcatggctctgtgtgggctcttcacattaagaatgcgaaaccagctagagtcaaagtttccctaatttgagtttgattttcagatattttgctgcaattaagagcctgaaagtgtcacctattaataccttgcttatgttctgaagctgaggtcttaaagtaacatgcagccctgggctgggctgcaaactgtctgcattmggaatgacccatggctggggcccctgggaaatagcagcagatgaacagagcagactgtggcttgtggggtggytgaagcacctttccaggctctcctgaactgagctccccacaggctgggctctgcagaacatggacatgacgggaaagtgaccagccagcaagggagagtcctctgagctayacggcagttgcagggacaggaagggctggcatgggcagcatggcctggggacctatccgggggatccactgggtgataccctccacgtcactgtcaagagctgagctcagtttcccagacccctgctttcctgacgtaccccttttgggcccagattgtgttgtcccatgggtgccaggcaaaagaagggatgagacaggtgagccctcgagtgggtgcaggtgatgttctaggaagcagagaaagtggatttcatcaaaaggagcacccttggccttcagatctccagagaattctygttcttcctattagccaaatgtcttgctcagatagattttagatwaatgtstccaaggaaagcacgcrttttggggagggttgctatcctgtctaccatggcragtcctggggaacctgcacaggtgcttacactctggctctgctgctgctgtgactgacaatgtcacttgtgtctgggccgagagtctcctgtctttggctggcatccatgaactatggctggctaatgtgttagttgtaagtagctataatctcagtgtcctcaaagttcatgactrtatagtaccttttacaaacatgtcagccgatataaaacacgtgttttatattttaagttaaatgtcatacgcatttgtatgtacatgaagttatttctaatatatatggtgagtgatttgccccatcccgttggtgataagggagtttttgctcagttacttcacgtgagatctggttgtttaaaagtctgtggcatctcccccactctactctcctgctcctgctcttactccgggacctgaccactccccattcaacttctgccatggttgtcggcttcrtgaggccctcaccagaagccaggcaggtgcaggagccmtgcttatatagccagaagaaccgtgagccaattaaacttcttttctgggtaaattaccaagtctcaggtatttctttatagcaatgtgaaaatggcctaacacagaaaaytggtactgaggagtagggtgtttctataaagatacctgaaattgtggcagtggctttggaactgtgtaatggcaggggttggaagagtttggagggctgagaagaagagagaaagacaagggaaagtttagaacttcctagagacttgccaaatgactgtgaccaaaacgctggtagaaataaggacagtgaaggccaggctgacatggtctcagatggaaatgaggaacttactgggaactggaggtagaggccgcctgtgctatgcctcagcaaagagcttggctgcattgtgtccaagtcgtgggcatctatggaaatttgaacttacgagtgatgacttggagtatctggcagaagaaatttctatgcagcaaagaattcaaggggtggtctggcttcttctaacaaccaaccatcagatatgagagcaaagaaatgatttgtatttggaaattatatttaaaagggaagcagagcataaacatttggaaaatttgcaggctagccacttgatagaaaacaatatcctgttttcagggaaagaattaaagggggttgttggagtaaccatttactagagagattagcatgactaaaagggagccaagtgctactatccaagacaacaggaaaagggcctcgaagaaagcatggtataagtcctcaggacagcccttactgtaacaaggccagagatctaggaggaaagaatgacttcagagtctagaccttgggcctctttgtcctgtgcagcccagggacactgatccctgtatcccagctactctggctctgggcttggctcagaggggcccaggtactactcaagccacagcttgaacagtccaagccgtaagtgtctatagctttcacacggtgttcagccttcaggctcacagaatgcaggagttaaggaggcttagtagcttcccctagatttcagagaatccatgaaaaagcctagtgcccaggtagaagcctacttcaggggcaaagccctctcagaatgactctactagggccatgctgagggggaatgtgaggttgaagcccccacacagagtgcccactgagacactgcttaatggagctgtgggaagggggccatcgccctgcagaccccagaattgtagatccaccagcagcttgcactctgcamctgaaaaagcctcaagtgctcaactccaacccatgagagcagccaggtgggctgtgttcagggaagccacaggggcagagctgcccaaggctatgggagcccattcctcacaccagggtacaggacacggagtcaaaggagattgtttcagagctttaagattyaatgaattgcctgctgagtgtagactggtgtggggcctatcaagccttcctgttggctgatttctcccttttagaatggaaaaatatacccaatgctggtgcccccattgtatcttggaaacatataactgcttttttatctcagaggctcataggtagaaggacctcatctccagatgagactttggacttgggattttgagttaatgccagaataaattaagactttgggggactgttgcgaatgcgcaattgtattttggaatgtgagaaaggtgtgggatttgggggaacgggtagaataataaggtgtagatgcttttcccccttaaatctcatgttaaaatgtgattctggatgttggagktgaggcctggtgagaggcgattggatcacaagggcaaatccctgatgaatggtttagccccatcctcttggtgatgagtcagttcttgcccaggaagtccatgtgagacctggttgttttacgttgtgtggcacctgcccgcttgacctcttgctccttctctcaccatgtgagacacctgctcctgctgcaccttccaccatgactgtggcttcctgaggtctccccagaagccaagcagatcctgggtccatgtttgcacagcccgcagaaccttgagccaattaaatcccttttccttatraattacccattctcaggtatttctttacagcaatgcaaaaaataggttaacaagtaagctttttaaaaatttatttttattgtatgtatttcygatgtgcaaaatgatgttttgatatacaaatacataatgaaatgatcactaccgtcaaacaaagttaacatacccatcaccttccgtagtgattggtgtgtacatgtggtgagagcacttaaaatctctcttagcacattagtttttagtatycaatattattaactacggaaggaatacaagtgcttagcacagcacctaaaactttattttcactcagtaagcactatgtattttggggttattattaataaacaaaaatataaacaatgcatttaattatggcagaacaactgaagagaacaactaggtcacttttcccaaagccacagtaggtgattctgagccctgagcctcatgtctaacttgcagagggaaggaggttctcctgccagctctgtagttctgtctggcgtctgacactcgcacacctgccaacacctccccaactctactctcttgctcctgctcttgctctaggacctgtccactcacacacctgccgtggtcacttgggcagtgctggcctcctgtcagctggagaggccccgccctgcaggcgactcagccagggcagctgtctggagcccccagagcacagtccgctgtggtcactctgcttcttctttgaggcctggccctgccagctttgctgccaaaggtgattgactcaacattcagacaagaaggatggtgaacttgatgtagtcctcccttgggtcctggggactcagtaattccattctgcaggtgcctggacaatgctctgatccacccaggtgttggcagcattgttgcaaaggtcacctctgtgctttctctccaggttccccaggtcctcaaatgctagtaggcaagccagttgtgaaaccttggattggttccgtgtagctgctgctgctgagaatctaaaaaggccaggtgcttgtgtgggagaccaggagtaaggggaggcctgcaggtgaggggaggccccaggtgtggagaggcctgcaggtgaggggaggcctgcaggtgaggagaggcctgcaggtggggtgaggcctgcaggtgaggagaggcctgcaggtggggtgaggcctgcaggtgaggggaggcctgcaggtgaggggaggcctgcaggtgaggagaggcctgcaggtggggtgaggcctgcaggtggggtgaggcctgcaggtgaggtgaggccccaggtaaggagaggcctgcaggtgaggggaggcctgcaggtgaggagaggcctgcaggtgaggggaggcatgcaggtggggtgaggcctgcaggtgaggagaggcctgcaggtgaggagaggcctgcaggtgaggggaggccccagatgaggagaggcattcagatgaggcaggcttcacatatttcttattctatgagggtgtgtttagctctcactgtgaacagctttgctgccccgttctagggctgcattgagccaatgctctgcactggagtgggaagggaagaagttggagctgggacacatgcagcttctgcaggctttggctctgagatcagggcagggctgtgcgcttcccagtctcctgtttcattagctgggatgtaaacaaatcatatcttggtttggatgtgatggcctgtccgcaattgttatgagaatccaattcattctgatttggcagttttgtaaagggcaagtctgtgccattttcctcatcattcaatactgatgcatcacttacaccctattcctgttcctaaacccagtgaccccgtggacagcaactgcacatgttttacctgtgcacaccccgcagtgcctgtcacattgtctgggacacagtagttactcaataaatgtctgcttaattaattagtaattaagtaccaaagntaccatagacaaataatctattttatatcttctttatgtgccatagaaacctcaagaaaagaggaatcctttctscagctcagcttctgtctttttccaaacttcctgagccaacaagcggagtgattgcccgagcagcagagataatggaaacatcaatacaagcgatgaaaagaaaagtcaacctgaaaactcaacaatcacagcatccaacgggtaatgtgtgcccctctccccactgaggagnggcaactcccgaaggaggacaccttgactttgtgcaggggctgcttgctcagggcatgttttttacttgagaccaagcaggatgggactccagctctttcaaagcatacaagctgcaatttttaaaaatgcttaccaaacagtctcaatatcttatttttgttactctggaaaatagccatttctctcctatccaaatcaaatttgagaagtagctcaataagctaaacatccattttttatggtataaaataatttaggaattttcccatagcccccctcttagttaaaacttggcaagctcattcataaaacctctacagtgaaaggacttcatgtgtgaggcagcgcattgcagggagccccatcttcccactgagttgctggtgcctcagcagaactacccaggacatttgagagccaatttactcatctctaaaatgaggacagtggcactgctcactccaatggctatcagaagaccagtgcataaaccaggagcaaatgtcgtcatttcttcagctctaaagcactctatgggcataagatactgagatggtaatgcaggcaktcaaaagkcatattggtgcttcctatgatgcagagcaagtaagcgaaatgtctttttaattaatttatcaagaattttttctctgcagcgccatgagctacttggcctctgagttcttccttctaactagctatagatcaatttggtgctggttacttagcttttagaataagacaaacttggctaaatcagtattgaccagaattctcaaatcctaaacttaacagtgaagtttaattaatttcatagcaagctaagattcaccactttgaaatgtcctttctttcaaaccatatggctgaacgatgtttctaagaactctcggtccactgtcctgttacgggacactgtcctgtccactgtcctgtcaggcctcctatggaaatggcagttcctgacgtcagaagatgtgggtctttytggtccatgccttagagccacatgctcactgccgggtctgtagacatcgatgtttaggagaataggctgaggtatttggtccaggctataatgtagaacttaagractccataatttagaattttttaaaatgatttccgttgtaagtatagcccatcttgaaaayttagaacacgaggaacctaaaaaggtttcccattacttcatcaccaagmcagaattccattaaaggtcagtgcctgtccttctaggctgctccttcatgttggtcttgtgtgttacatgactatgacctcatagttcttttcttctttttttttgttgagatgaagtctccctctgtcgcccaggctggagtgcagtggggcgatctcggctcactgcaagctccgcctcccaggttcacgccattctcctgcctcagcctcctgagtaactgggactacaggcactcaccaccacacccggctaattttttgtatttttagtagagacggggtttcaccatgttagccaggatggtctcgatctcctgacctcgtaatccaccctctttggcctcccaaagtgctgggattacaggcgtgagccaccgtacccggccaatggttcttttctatcgcacatgatttgttgtctgcaagcacctgcttgagggcattcctgtcaagaagaatctgtgctcagctttttgaagaatgcgtaatcctccactaactgaatgcacactgcagtccaaggtttacttaactgttcccatagagccattcccgttggactgttagtgagcattcatgattgaaagactagtttgtttctcycatatctgaaaatggaatgcattccttcctggcttttttttctkttgaatatctcaatttcactggtatcttgttaatcaaagttttgtggcattatcctcaaagatttatataaaccatattggagaagtaatcgatgattacctctactaatggacaataaagccactctcaccttgatttgttgaataacatataaattatagtgacagaattaatccaaaaaaaagaaaaacaggaaattgtttcctgggttctcgtctcatctggaaagatttacaagggaaccaaaaatcaatacaaaggaaaaacgaaaggttttatagataagcgtaccatcttcatcaaggcaagattttttctacattagggttcgggataaattctactcctcactgtcttctaaagcactggggccattactaggcacacatgcctcactgttcgaatatgatgaatgagccctggagatgtgcttagtgagagttgatggtaactgcaaagttacttgctggcttatccccctgagggctgagagctcctagattgcttttctgaaagatcacagagcaaaaataaattttaaaacccccacatttctagcaataaggaagctcaagggaattaaatgagtgagcacttgatgtaaagggagaaggcagattttctcaaaaacagtgaccccagttacatatgaatcccaaattcagatgctggagtcacttttgagactgcaatagaatatttgttaggtggatttgtggttacaagcacagaattcatggtttcctatttttcacagatgctttatcagaagatctgctgagcatcattgcaaacatgtctggatgtctcccttacatgctgcccccaaaatgcccaaacacttgcctggcgaacaaatacaggcccatcacaggagcttgcaacaacaggtattgtttgtggattttcttaatcttctcrtgaaagttggatctgaacatgactagatgccatcatgaaggaacttctaccaccactggtggatctgtatccacccctgagcccctggttcctgtccttggcctccccgacatggcctcctgcatgcctggtggtgcctcaagcagcgtgccaagcagtactgtcattcccagmcacaacgtcccatccacataggtgcttacaggtgactcttaacttcctaaccccacaaattccaccgcccttcacctaagagctcaagccacgtgcttaggcgccatccttgatttcgctagctccgctacccattgtttccaatgcacccccaagactgtcacttttacctccaaaatgagtcctctccactccctgtcaccttagctgaagccaaaataaccatccagctgccatcacgtggtggtcccctcactggttctcctaatttaactcttgctttccccattcacgctccctgttatggccaacaccatctcagcaccctccttctcaactcctccctcagtccccactgcactcagagtgagttcagatccgcccaacagtggygacygcccacctcctctggtccrcaatggcaggagatggacaggagctttggccacacacagaggcatgtgattcagtctggggttcagaatggttttctgaagaaggtgatatgcgagtgagccaaatcttaaaggatgagtgggcatttctcaaatggtccacagggtagagaagagggctttgcaaaggccggaaagagcaagatgcgtttgggctgaaacgtgcagcctttggcacacagaggggcagagggagagcagccgggattgtggcgcctgtggggtctgggggaaacagtgtgcccggtggtcacctagaagctttgtcacaatagtgtggcgccaggatggctgcaggcttgatgttcaccgatgcaggcagcaaaggtgcttagcatggaagaactcctcaaagggactcragctcctcactgctgggtgtgctgaggtcagaaggaagatgcccccccygaragagggatcagcgggacccaggcagagccctggcttggacaggccctgtcctgagacagagagcaggggctttgygacaatgaacaggaatcggggtcctgggtatatgatgatggttaagaacaacagctttgcaactggacagccctggatttgaaacctggaatcaccacctatcagagggcagtttgtttcaattctttgagctgtaagagcttgtttgttaagcccacagcaggaatgcataacctggccatgtgtgaggatctgatcttaggactgcggagccccggctggaagaggcagcctgtgctgaacrcagagatgggtcagggccacacaggaggctgctgtccacccctcctgccctgaagcctgggggggggtctgtgccttcccgtggaagtgggctcagaggtggagatggcaygtgtcctgtcctcagagctcagtgggagacatagatgtagacaaaggatgcacaggagatgatgcctgggagtatggggacactgagatggctggtgggatgcacggctggagggaccaggcctggatggaggaggggatggggctggagggcctgggtggaggagggcagggggtaggtgcactgttgagtcagaagccggagcrgagatggcttggactacacggggaggagcagggtcttcagaaggacagggtggggtctaacstgcaggtacatgttgagggtggggatcccgggggacagtggygttggagatrtgggggcggggctgctctctgaatgggtttcatacttctgattttattaaagaaatataagacattgaattctgcattcctaagcacaattatcttaagaatcagcgagtcatactktccatatgttttcaacacctctagcgtgtcttaaacagcgttaacaagtctgggactctccgtggcccgaagcactttcaccagaggggtccgtgatggagctccttgggttctaggttttccttgagacctcctaacttttttccatttccttttctgcctgctgccttctgtctgtcagccatgacccagacctcaggtgcattctgatggctctccctacggaggtcgacccaggggccaccccscacccacccccaccctgccccacgtccctcctccacgtcagggggatgatgaattcagccatgtgcaacatygtgggcatccttaaagcaaattgcagtggagggtgaattacagtgcttggggaatcccygagcaaagccagtaggcctcacacatgatctaaatcttgcttgatttgcaaacagaagagaaacttaactggagattttttttttttttttgcaaatgcctggattaaagaaaaatgaaatataagcccgaccattccgaaactgccaactaacctgtttaactaggaaccttccagcaggacagaccaaataatgcgaaactgaagccagtcaaagcttttctccaatgacgtctacatccacctgcaaagcctgcccctgggtcctgcagtagagcctgaacctttctttggtttgatgcttcctgattcataaatcatgatcactcaaaaaaaactctttaaaaaatgtattgtgcctaagtttacattttaacaacctcaagaccagggcctcagccggcagcagtgagttcctgctcggcccttctgaaaggccctgctgctgtcttgggcgcctctgccccagctgctgggcgggctccactgacgctcctgggagaatctctgctgaccacacaatgacattggcactgggagctgtgatctggggacacttagatctgagctggtttctctccttctgtggtracagctacagttttcattaagaattcacagcatctggatctaaaatctcctacgttcaaggcttcacacattgtattccaccaaaaataaaacatctgctcagaaatcggtcacttgttgttataaaagtgagccacagagggcccctgacccttggcccctgggtggtttawtttttctctgcaggcctgttagtgccaaagcccaccaagaccaagctcaaatttactcatgcccaattgtgataaaaatagcccaaacaagcagacttttagccacttggagcctacctctttgcatcttccacaaaacctctcccagcatctcaggccgttggtaagatacagcctcgtggtcatcagaccccaggtcgctgctgtctctggagttgcctgcccagagactccccctctccccctcaccatgttgctgagtaatgtcaccagacatggagaccctctgatgccccactgtgagttcctcgccatcctccccatctgggtggcggtccctcaccttagcctctggatggtcccctgccttgagggatgtcccctcttctgcacctgtgcccaagaaccaccccaaaggcatgtgtgtgtctctgcctccccgatcctaacttttgccttgctcagccctgagttcccagagcttccccacacccactaaattgctaagttcccccccagcggtctcctaagccgcttcggcgtccctctcagtcaccagcacctggttccccacccacaccttcccatccttgtctgggctggtgctgcatttccaatgtgctgcgtttccactgtgctgcgtttccaatgtgctacatttccactgtgctgcgtttccaatgtgctgcgtttccaccgtgctgcgtttccaccgtgctgcatttcctgcattccaaagcgacctttgggtgttggctgcaatgacatctttaagacaaatgttagttggaattaacttttgaaattctaaatgtcgaaatggtggattttaaaactcatccatttctactagttttcttgctttatggtgtgatgtctgcatgtcacaagtggatggcagggtttctaaggcttgtttttcctttgttggtattttcctaattgcctaggacgtatcacataaaattacttaacaagtagtggaaaasaatgatttttctttcaccatttcacctggacattttgtttgtatggtgtagtcggtgccgcaggagctaccttgttgaaagagaagggggcaggctgcttctcctttgtgtggtgtagctaatgccacacctgtacttcttgtttgtatgaagtggtcagtgccacaggagctaccactttagaagggaatggagcaggctgcttcttgtttatatggtgtagtcagtgccgcaggaggcactatgttggaagagaatgggcaggcttcttcctgtttgtatgatctagtcagtgccgcaggacgtactatgttgtaagtgaatggagcaggctcattcctgtttttatggtgtagtcattgccgcaggaggtactacgttggaagcaagtagggcagggtccttcttgtttccatggtgtagtcagtgccgcaggaggcactacgttggaagggaacagggcagggtccttcttgtttgtatgatctagtcattgccacaggaggcactatgttggaagggaatagggcagggtccttcttgtttccatggtgtagtcagtrccacaggaggcactatgttggaagggaacagggcagggtccttcttgtttgtatgatctagtcattgctgcaggagctaccagttgtaaatgaatggagcaggctccttcctgtttgcatggtgtagtgagtgccgcaggaggcagtacgttggaagggaatagggcagggtccttcttgtttgtgtggtgtagtcagtgccgcaggagctaccgtgttggaagggaatggggcagactccttcttgttggtacggtgtggccaatgctgcaggacgtaccatgttggaagagaatggggcttgagtttgttttgctttacactttgtcataaaggaaattatcagttctctgcataagcccctattttttaacaagggggtgtgtgtgcatgcacggcaagctggtccctttaaacattttagaatctctaaatataaagcttaagatattaggaatgctgttgataactgtgcatttggggtgaaggtgttttggtagtatcatttaaaggatttccagcttctttctgtttctgttaccaacctgtggagacctcttcatcatcctggactcagatcagggtcctcgactctgctgcgctcccagccagctgaggctgttgttcctcacctgtgtgtttttatagaagtctaggagctggggggtaggaggtgggtgtgggcaggggtcacgtcacttgcaggttgcctttgctagaagcagtcacattggctgagaacagaatccccagggcctgaggatgtcctgcagaaatttgggttttagtgtgtagcttggcatcagcctagagataagacaaattctattttaaaaatcaagtgctccatggcgggatggtgatatagttggctgtgtccccacccaaatctcatttgaattcccacatgttgtgggagggaccaggtgggaggtaattgaatcatgggggcaggtctttcytgtgatgttctcgtgatagtgaataagtctcacgagatttgacagctttataaggggaagttcccctgcacaagctctctttctgcctgccgccatccatgtaagacatgacctgctcctccttgccttccaccatgattgtgaggcctccacgtggaatcgtaagtccattaaacctccttttcttctcagactcaggtatgtctttatcagcagcatgaaaacagactaatacasatggagtaggggagggctactgaagaaatgaagcctctcagctactggaaatagatgcaatcagggtggaattactcacggacagtcctccagaggcagtggggtcattgtggagatctgtgtgccacaacagccagaaaacaaaggggccacgagccactgtttgctctgtggtctaaatcaatggactatcttaccacatgcaatgttagacagtgtattacatatgattattcataagcagaaatacaaatatatattatatactgtaagacagtattcattatatgataaatatgatgaattcacctagatacttcatatagaatttgccttcagttttagattgatacatgtgataagaacttctctgtgtgttcttgagaaagtgctcacattcccatgcataatggaaaggacattgtattttgaaatagaagacgaaattccagccaccactttgtcagttacaagctgcttagacttcatgtcttgcttagtttctcaaattctctgcacctggaaactggcaaagatagtgatgctcatttctagggttgtcatgaggctgaagtgagacaatgcagcagaaataatttgtgagcaataatgatacaaaggtcagtgattgattatgtaaataatggccacctttgaagcccctttcttcaaagagtctgagtcttgattcttgaagaggtgtgatttttctttgaaaaattgcattatttcttgctgggcackttggctcacgcctgtaaagacagcactttcggaggctgaggtcgggggatcgcttgagcccaggagctcaagaccagcctgggcaacaaagcaatacctcatctctaaaacaaacaaacaaaaaattgtgttatttcttgagttttgatctgatgaactactgcagtaaaccactgtgtctcacagtgttggaagggaatggagccagctccttcttgttgtatggtgtaggcaatgccgcaggaggtaccgtgtttgaagggaatggggcaggctccttcttgtttgtatgatccagtcattgctgcaggaggcaccgtgttggaagggagtggggcaggctccttcttgtttgtatgacccagtcattgctgcagaaggtaccatgttggaagggaatggggcaggctccttcttgtttgtatgatccagtcattgttgcaggaggcaccgtgttggaagggaatgggcaggctccttcttgtttgtatgatccagtcattgttgcaggaggcaacatgttggaagggaatggggccggggccttcttgtttgtatgatccagtcattgctgcaggaggcaccatgttggaagggaaagggcaggctccttcttgtttgtatgatccagtcattgctgcaggaggtaccatgttggaagggaacggggcaggctcgttcttgtttgtatgatccagtcactgctgcaggaggcaccwtgttggaagggaatggagctggctccttcttgtttgtatgatccagtcattgctgcgggaggcaccatgttrgaagggaatggggcaggctccttcttgtttgtatgatccagtcactgctgcgggaggcaccatgttggaagggaatggggcaggctccttcttgtttatatgatccagttattgctgcaggaggcaccatgttggaagggaatggggcaggcgccttcttgtttgtatgatccagtcattgctgcaggaggtaccatgttggaagggaacggggcaggctcgttcttgtttgtatgatccaatcactgctgcaggaggcaccgtgttggaagggaatggagctggctccttcttgtttgtatgatccagtcattgctgcaggaggtaccatgttggaagggaatggagctggctccttcttgtttgtatgatgcagtcattgctgcaggaggtactgtgttggaagggaatggggcaggctccttcttgtttgtatgatccagtcattgctgcaggaggcaccatgttggaaggaaatggggcaggctccttcctgtttgtatgatccagtcactgctgcaggagtcaccatgttggaagggaatggggcaggctccttcttgtttgtatgatccaatcactgctgcaggaggcaccatgttggaagggaatgggcaggctccttcctgtttgtatgatccagtcattgctgcaggaggcactgtgttggaagggaatgggcaggctccttcttgtttgtatgatccagtcattgctgcaggaggtaccctgttggaaggtaatgggcaggctccttcttgtttgtatgatccagtcattgctgcaggaggtaccatgttggaagggaatggggcaggctccttcctgtttgtatgatccagtcactgctgcaggaggcaccgtgttggaagggaatggggcaggctccttcctgtttgtatgatcccgtcattgctgcaggaggtaccatgttggatatggtaccatgttggataagtggcacagtggatagaatccatcgccatagtgaccatgagtggattcctgctattaaattggggtacgacttatgcagggcttgggggtgaatctggagggacaggtggccgagtcttccatgggcctgcacccccagatgagaagcccccaggtgcagatcgagaactgtacaccccagagggctgccttctggcccctcctaggttttgacatctacccagaggtgaccattgctttgatcttcatcaccatagttagttttccctgacctggcttttataggaaggaagttagatggtaacccctgggcctggcttctccacctccaggatttatttgctcctgccttgctgagggagacactcatcgttacagggcaggcatgggcgcctctctgctgagcactggtcaatgcttccaagtggctgctccaatctgcattcccaggagcaaagtgtaagagccccacagccctcaccaatccccgtcactgtgatccctttcattttggcccttcttgaggggagggtggcatttcctgtggtttaacttcacattttcctggtgactaattgtcttgagcacttttaaaatacattcattggccatttggagactctttttcgggatgtgccagttcaaacatttttcccattttttaatgaatcttttttgatttatagatgctcatattttctaaatatgtcttcagtgagaaatatgttttacaaatgtcttctcccagctgagattggccttttcactctccatgctgtcttttgaagaaacgttgttcatatttttaatgaagtcccctttatcaattacttatttcatggaaagaaaacttttttgttatgtttaagaatcttgctttctctgaagaatgtgaaggtatttttcttgtgttttctgctgaaaatgttattgttttacatgtcacatttagatctgtgacccatctcattttatgttttctgcaacataygaggtggcaaccatgaggggtgtgtgtgtrtgtatgtgtgtgtgtgtattgtaaaccaaaaataaaawtctaagtcttgcgatcatctgaattgacccctcctgttggcaagggtgttccaaagctaacctgaaaaactaatctgaccgtgatggggagagtgaggtcagacgtgcctcatgacaccctcctcccttttggaatttctgctagaacagacttcttaactctgagaagaaacatttacagtctcttctctcagaagcctgctgcctggagacttcacctgcacgatgaaaccttggtctccacaacctgtgtcttaacccagacagtcttaagtccttagacgataactttactctttcaaaaaattgccactcagaaaatttttgaatctacctttggcctagaagcccccgcttccagatgtcctgcctttttgtactgaaccagtgtacatcttacatgtatttgattgatgtcttgtgtctccctaaaatatatgaaactaagctgtgcctcaaccaccttggacacaagttctcaggatctcctgagggctgaatcattggccattggtcactcatatctggctcagaataaatctcttcaactattttacagagcttgactcttcactgacaatatctataagtgtttgtgtatatatagaggcatgtatatataggtagatttgtatgtgtgtgtgtatatatctataataaacacaggtctatatagaggggtgtgtgtgtatgtatgtatagatatgtgtgtgtgaaagcatgtgtatatgatatttattcagaaccatcctttacccagtgaactgcacccatgcctatatcatgaatcgagtagccacatgtgtgtgggcgaggactgctagactcttaccattatgtatacaattatgagagagagggagagaacctgagttaaacaattagccacatttctctttaagcctactgagaaaaagacacagggacccagcagacatcagaacaccttgttggggcagctcgcactggggcgcaggtggcagaagcctcacgggattctgtacagcaggaagagaggccggcttcagcccctcctgcctgacagcacaggggtcttgcctggcctgggaggagccgggattggaggcaggggctgctcctgcctccagaggtttccaggagactgcatgttgtgccctgccggcatccacacatttgtgtagtacccactcccagacaaggacactcatagacttcctccggcctcgcgtgggagccgagcctgtggtctgcatctcgctgtgctccacgcagctcctgcatgcagctcctgcacgcatcggctgggctcgcagatgtcaggtccgcctcctttcctcttccctgagcctctgccgagccctcccgacccgagggtcggctgctcccttccccgcctgagtcacttccgtgactctcttcatcctcagagccatccccttcctcatctgtaatgtgggaagaacacccacctcgcagggttgtttctggttgaaaggcagcacttgtcaggctccttgcacgctgtccacagccggccatcgtaagagttacggcgactgtcacctctcagccactcctcggcatcggacctcttggctcctggccatggcattgaccacagaatgtcataaacagcccagtgtgtttttccacgagagcagtggtcggaggctcctgcaggtaaatggctggagattgattgacgtgggaatatcacggcatcacagaatcagagcacatttgttcacggtgcaggaataacatcaagtgagtggtgagctctaaaggacctggccctcgaggtagctcacaccctcgatgatgaatggagccaggccacaggtgaaatttccatccaggcgggacagactcaagccgggactgggttcccctgacgcccggcttcccaaatgtgcttccctcccggatgcacagagaacgaacgtggcatggacattgtgagctgcaggaagcgatcccaccagggatcaaaaagccaacttcctccagcggccattctgcactaagcctctttcgtggagttcacgttctgtccaatacagccttaaagcccatgaacaattctgggggagacgatcaggtctgaaaggaaaattccatatgggtatttaagttattggaagaacccttaagatctacctgggtttaacatagaatttgctatatgtaacttggtatatcattctctatagtcatttgcctaaaaatcatcaaaagtataaattcaatgttgcatctcccatccagatattttgtgttaaaaacacctcatatctgatgtctgacagctattttctttttttctatgtatttgccttgaattcacattcgtagtcaccttttttccctctcactttgtttttcatttgcattttgacctaattcatgaaattatccagcagggagagacctgatggagttttgctggaatgaagctccttgacacaatcgtctcctttttagaagtgcctgtagattgaaagttcaattgctcaaaacagtttgctaaagaacaaatgtgtgtctattaagagtttaagttgcacttgtaaatccaccaatggcactaagatatcatttagcaatattgacacttgaagtgataaaaaaacagaaaatacctttgacgtcaaataaatgtattagtctttaagaaaaaaagaggtggaattgaccttggtgtcttatgaaatcgcagaacatatgatgggtataaacaatgccagaataaacaagattttcaaagtttttggaaaaagctgagctcatgccgattatagaaagcatttgcatcttttgaagggttttcctctgagggttcaaatgtccctcagggatcatgctggtgataatcccagctcacaaactgactggtcttaattgccttcaatcaagtagctccagcaggagacgggaaaaatcaccgctgagtttcctcatacttctggccacctgacagggtgtcaggcgtttttggggacaaaatgaatcctcgcacacctggcccagcaggatgagggcatcccgtgtcccgctgctgcyccgctgagaaagaggtgccgttacaggagtggaaagctgacttcgtccacagtttctctcccagcatttcacactgcattgctgtttgcttcttttcatgggcggcacacatctctggcactcagcgtgtccatgtgctgttactggatggccatacctggcaaacatattgacctgtgtcttgcggcctcagtccacagctttatgctcaagcgctcttcaagatggaagtttagaatttcttctttttggaattcagaaatcacaaagtctccagtgccaggtgcctgggagaggggaactagggtcccagggaaatcagagtgactcggagcctcagcaggagcacagacctcagtctccctcataaaactctcctccagaaatgtttctctttgttcattttgtcagctttatgagcctttttccaatgctgccattaattcagatctaagaaaggaacagtgtggtacaatagatttccactgggaaaggatctttccaacaggagctgatcaaagtctcagagggacccttctcagtcctgctgacctgctgaccrtgaaggtcaggtgacacatttgcggagggtccacaacaaaygtctgtgagtgcccttgagccattgtaatgtcctagtgaactgctgacatataaaagtcaatcagcaaaaaaaatcactgcttaagcagttaaattaacattatttttaattgagtaatctaacacctccctatgagccatactttatggaatttcaataaagacaaaccaaccataacgaatctgracactttattaaagcaatctttccaatcttcagttgctgacgtattgcagctgattatatgcattactctcccatacatttttgcaaattgagccactttggtgtgctggagattaatgaagtattaataacagaattattctccccttatggtccctgcagacatagagaagtaaccatgtccccaagcctcctgccgctgctgaccactcatcatccaatgtgtcctggatgaggtagcagctggtgcacaacagtaagaataaaagctcctctcctctaatgtacggagctgcgtggtggccttagagacttttaaactggaagagtctcagctcttcagtctacctcaaggacaaaacggatctttccttcacaaatgttgcccaggttacaaacagttcttagtagaaccttagtcctttcattcctgtgcagaacatctaaatcggtcacatttaatacgaatgactaatgtatgttataaccataaaggcgatggtaatttatgacaaaaccactaatttttaaatrtttatattcccaaacactccaaatgttttaaaaagttatttatcttgtcacgattcttgtagacttcactccttgtattttttaagtgygtacatatcagatacatgggaggattttcaaagcctgcatcctagtcacgcstgactcttttgtcatgtgccttgcaaagcctcccaataccagttgtccatgatgcagcttcagactctgcagactcagccctggttgtgttgcatgactctgcagctgccacacacagaacctcmgtgctggttgttcccacacgggcrtgactgacagataccaatggaacccggatatcatgacaatgttagacccaaaacaatctgtatttatttttaacaaaaggaacctacttttttccacaaaaaatttctatttttttctctttgaattgacttttatattctaattctctcatatttccttccaaatgcagaataatttatgccttataaattgagccattttcttccaaatgtagaatattttatacttgagaaatcctttatttttaataagttttacatatttctttacctatcctctacagatatgtatgctcatgttatatatttgatacattcatttatatattcttcacattcatatagtcttaccatgcatttatatatttgaatatgtattttattttgcatgttactttttatgtattttataaatttaaatttcatatttagaaaatgttcagtgagcacaagggcctcagtgttcattgttttcttcaagattkagttattttttacacattattagaacacaattgatttaataagcacggatctatgacagatgttggtaattattatgcatagagataaatatttattggaattagtttattgatgagatgggtggagttycagttagttccttcatcagttggctgaacatcacctgtgggccaaggggccatgcaccctggttacccgagatccttcctatttatgccttctgtcccaggaaattattaataactaatagtgctcctgtctcctcaraagtattccactttggttaggaattatacggttgccctacatactatagatgagacagttcagcagcaaccctgtgattatttttacctttgcagatggaaggtgcctagaaacctgctcctgtgactatgtcgctgggaacagttttgccataggaatgccatctggccctcaaaactccttctgagatatagaagaaaatgaacatrtaatgagctatcattaaaatgatttttattcatgtatcagcaatcaattcaataacattgtcctccaaatttctaaacaaaatattggaaaatacctcatttgcacaaaggattagttaccaatctttagtcttttatttcctcagtttctagaagatgctctgagacatatcaagtgactgttaattgtgcctacaccccttcaacttaggggcaccttgcttaacacagtacactcggaactaagtgtgaaatcaaaatattcaacacacctttaccttatcatgcacttcaaatacatttttgtcagaatatattttgaccaatagaacaaaactgcagaccagcctacttatgggaaacttcaccatctagcctattggctgaagccattgtcatcrccaaatcaaacagccaaatacaactgactctctctctctctcaggagagacttaactttatttttaacttactttattttaattcaaattcatttattaatggttcctttgacaacccgctcacttctgaaatcagaaaaccagcaacttcctcagttcccacaagttcrcctggacaatcacacgggcaggaacaggcgcgacaccctggtggcttcatggtgctttgattaaaggatgttttatgccacaggatttcaaatgatctctttgtttggagtaccagaagtttctgtcctccagagaactgcccctggtacattctagaagggtgggagaccctccttcggaaaacaggggagtgggaaggaaccctgcaggcagccacctccagacagcatgtgctgagctcgggagagggtgcctgtgggaaccaagcctctggaatgagctcccttgaagccagtcatgacctgggcctccaggaggcctttygggtcttctggggagctgtgccccttgggcctccggagagnccccacttattctccctgagaatggtgtcttatatctggaactcactgcttctgtgttcttctcccccatctcaaacacatccttgcatttgtctccacagagaccaccccagatggggcgcctccaacacggccctggcacgatggctccctccagtctatgaggacggcttcagtcagccccgaggctggaaccccggcttcttgtacaacgggttcccactgcccccrgtgggtactcagaacgctactatcctggactaagattgggtcctgtgatgctgagggagggaaatagccttttactgggttcttgctcgtgctgggtgctgcgtgcaatcccttcagatcctcccagcctccctttgatgtagcaatcactgtttctgccctatggcttaggagccaaggctcagggagattgaaatctcttagtgagtggaaccctgcagatttaaattaagttttctcaaccctaacgtttctgttcctgaaaatcacttcagtgttttcagataaattcctttatccatcatgtgggctaggtacatcccaagatgattatgagttcagcaatccacttgttgatgtaaagatgactgctttactcccagaggtgaatttatttgctggacaytcatagcctagtagaatctactggtctatttggtcaaaaaatsggtcattttgcytgtaatttaactactcatttcaatgaataagccagcctgtttgctcttgtgccatgttcagtgatgaaattatctagaaatacatcagtggatgttctgtttagcccaaagagcgcaggtggtgggactcaggtctgactcagaccagctgtggacagatacaccagcacagagttcccctacraaagccaacaactttacctaggcaattttcctaggcgggcttttagtaagaggacctggtrttcccagaagccgtgagaagccctgggtagagctggaggctgtgtcactgaagacggctcggtgctcccagcagcagggacaaggcaattgggctcacgctctgctcccactggcttcctgcaagtcgcttkccttcttggcctcagttggacaatccctaaartgggataagactgtcttacccaccttatgctcaacagtggaccagttcaacccccgaggctttttaarctctcagtattatgagattgtgattctgtaaacccatatttgctcagaattatttcactattgagaaaaatcagagttcaagtgtctttaaatgaaattgtgttggttttctacccagctgtgacaaattgctycaaatttagtggctgaaaacaacataaatgtgatcttccaatttcacaatcagtgtctgatgtctcacttggctgaaatcaaggtgttgcagagctggttctttctggaagctccaggggagatccctttcctggcaattccagcttctggaggtgcctgcatcccctggctcatggcmcctccttccaagccrgcaatgttgtctgtctctgtgcctttgtttggagtcacatctccacctcccgtcaggagagggcctccaactttaaggacccatgtgactggattggacactygtggagacccaggacaaccttcccatctcaaggcccttaatgtaatcgcatcagcaggctccaaggattagcgaatggatgttgtgcgagaggcatttttctgcctccacagatgacccactgaccctcaaagattcatatccagtccacatgcctaacatgctcaccccattccaaggttcccccaaaccccatcccatgacggcaccaactctaggcccaaaatccaatccaaatctcaycacataaatcatccacatcaggtagggcaggctcagggtaagatccatccaggacaaaattcctctccatctggacctagcctgtgagacagggaagcttgtcgtctgctctccagatgccctggcggaacggtgttaaacataacagcaacagatgtctgcgtggagaatggaaaggaaggggagtcactcctcccaacccacgtkgaaatccagccaagcaactcccttaggcttcaaggccaaggagtactygcttgtggctggaggctctgccctctgagtcatgaactcaactgtcctaaagcctggctgttttgtcaatgactcttcacttaatccccacaacaacactgaaagctcaacctttccatattaacttacagatgaggaagtgagggctgagggaagttaatgccaggccctccagccaccacaaatcaaggcagggattcaagtccaggggcatctgtcttcaaagcttatgctcctcctgccctaactccagggcacagatctcctaggggcacctggagctctgtgaacaagaaccacaccaggaagtgcatgatcccaaagggtcatctttctgctaccacrgggtcctcctatgtcctgaccaatggtctcttcctacccaggtccgggaggtgacaagacatgtcattcaagtttcaaatgaggttgtcacagatgatgaccgctattctgacctcctgatggcatggggacaatacatcgaccacracatcgcgttcacaccacagagcaccagcaaagctgccttcgggggagggkctgactgccagatgacttgtgagaaccaaaacccatgttttcccatacaagtaagttttagaaaacgtttctatgtttgttatgaaactaagtgctatttaaaacgtcaaacagaatggtataaaacaaaatgtgraagtctgtttctttgtcctattcccaggggtagcagttgtgaatatctggtgcatctcactggaaattccctgggtacaygtatatatagcatgtatgatagtgtgggtacacatatatatagcatgtatgatactgtgggtacacatatatatagyatgtatgatagtgtgtgggcagatgtgtacatagcatgtatgatactgtgggtacatatatatatagcatgmatgwtagtgtgtgggcagatgtgtacatagcatgtatgatactgtgggtacacatatatatagcatgtatgatagtgtgtgggcagatgtgtacatagcatgtatgatactstgggtacacatatatgtagcatgtatgatagtgtgtgggcagatgtgtacatagcatgtatgatactgtgggtacacatatatatatagcatgtatgatagtgtgtgggcacatgtgtacatagcatgtatgatactgtgggtacacatatatgtagcatgtatgatagtgtgtgggcagatgtgtacatagcatgtatgatactgtgggtacacatatatgtagcatgcatgatagtgtgtgggcagatgtgtacacagcatgtatgatactgtgggtacacatatatrtagyatgtatgatagtgtgtgggcagatgtgtacatagcatgtatgatactgtgggtacacatatatagcatgtatgatagtgtgggcagatgtgtacatagcatgtatgatactgtgggtacacatatatatagcatgtatgatagtgtgtgggcagatgtgtacatagcatgtatgatactgtgggtacacatatatgtagcatgtatgatagtgtgtgggcagatgtgtacatagcatgtatgatactgtgggtacacatatatagcatgtatgatagtgtgggcagatgtgtacatagcatgtatgatactgtgggtacacatatatatagcatgcatgatagtgtgtgggcagatgtgtacatagcatgtatgatactgtgggtacacatatatatagcatgtatgatcgcgtgtgggcagatgtgtacatagcatgtatgatactgtgggtacacatatatagcatgtatgatcgtgtgtgggcatatgtgtacatagcatgtatgatactgtgggtacacatatatagcatgtatgatcgtgtgtgggcagatgtgtacatagcatgtatgatactgtgggtacacatatatgtagcatgtatgatagtgtgtgggcagatgtgtacatagcatgtatgatactgtgggcacatgcatatatagcatatatgatagtgtgtgggcagatgtgtacatagcatgtatgatactgtgtggtcacaagtatatagcatataggattatgtgtgggcacatgtattggcacatcacaggtgggctcgtgtgtatatagcatgtatgatattgtgtggtcgtgtatatagcatataggattatgtgtgggcatgtgtattagcatatatgatctcgggtgggcacgtgtgtatatggcatataagatagtgtgtgggcacgtgtgtatatggcacataagatagtgtgtgggcacgtgtgtatatggcatataagatagtgtgtgggcacgtgtgtatatggcatataagatagtgtgtgggcacgtgtgtatatggcatataagacagtgtgtgggaacgtgtttatatggcatatgagattgtgggcacgtgcgtttatggcacataagatagtgtgcaggcacgtgtgtatatggtatataagatagcgtgtggacacgtgtgtatataggatataatatagtgtgtgggcacatatgtatatggcatataagatactgtgtgggcacatgtgtatataggatataagatagtgtgtgggcacgtgtgtatatagcatataagacagtgtgtggacacatgtgtatatagtatataagataatatgcggacatgtgtgtatatagtatataagacagtttgtgggcacatgtgtatatggcatataagacagtttgtggacatgtgtgtatatggcatataagatagtgtgtggacatgtgtgtatatggcatataacatgctgtgtgggcacatgtgtttatagcatataagacagtttgtgggcacatgtgtatatggcatataagacagtttgtggacatgtgtgtatatggcatataagatagtgtgtggacatgtgtgtatatggcatataagatactgtgtgggcacgtgtgtttatagcatattagtttgtgggcacgtgtgtaaatagagcctattatcccatgtgtacctgcactttttctcatcctctgtgtcacatcatgtgcatgctcagtgcctggtaaggaccacttagcaatagttcttatayatgtctgcttaacattaagtgaacagaaatgtaattgtttacaacttagtattccatttgtgtgtgcattataatctatctaaccactttccctattaatgagcatgagttgccttctgcttcattgctgtttttatgctgtcacaaataatgaagcaaagagcacacttggccctcaatctttgtgcccatgtgcacacctgatagatccaggggtaagattgctaagtcacggtggaggtgcctgtggaattttgataaatattgcagaattactctccattaatattgcacaaatgttcactcttaccagaaaagaaagagacaatataggtagatttttaattttayttctctctggaaaccagccttgaagttaacaagggacattttctttttttttttttaagacagggtctcacccagtcgcccaggctggagtgcagtggtgcaatctcggctcactgcaacctccgcctcccgggttcaagcaatacttctgcctcagcctccctagtagctgggactacaggcaggtgccaccacacccggctaatttttgtatttttagtagagacggggtgtcaccatgttggccaggctggtctcgaactcctgaccttgggatccgcctgccttggcctctcaaagtgctgggattacaggtgtgagccaccgtgctcagccaacaagggacattttctacttaagagcacagatggtttcgatctcatgtcctctctaacattcattcaataaaacttcactggcagttattctgtgccatgctgtgctgtgtgctaggcaggctgaaaaggaagacaggctggtccctggaaggtgggcaggacagttacataaaccagcagttacaaaaytctgggcatctgcagaggaggtcccagtgggcaaaatcaagacatctaaacaaaatatcccaaaaggaataatattgggggaaaggtggaaaaggagcaccataaagactgtgtcaatcatagaaactgaatttcagccaggtccagcctctgtccctgggaggaggtctctctctctcacacgctggggctcagaccctgggagacagggggccccttgctcttctctgcagagccccctcaccagggcggccccctgcatgtgttccctgctgcatgtacctctaacctgggattctttctttctttttttttttttttgagctggagtcttgcccaggctggagtgtagtggcgcaatctcagctcactgcaacctccgcctcccrgatataagcgattctcctgcctcagcatcctgagtagctgggactacaggcatgcgccaccatgcctggctaatttttctatttttaatagagatggggtttcatcgtgttggccaggctggtctcaaactcctgamctcaagtgatctgcccaccttggcatcccaaagtgctgggattacaggtatgagccactgtgcctggccctagtgttattcttcaccactcaggaccccaaagttctcatctgttaacattagagctgttagatcttgcagaagtacctgtatcttcagcaatgaacagtctgccaagcagaggccctcgttcccagctaagtggctccccagcagaatctgtgcaaaaaaatgactgagttatgcagcctggagaagcagtggagatgggcacctattatctatcaggtcttgggttccaggcttgccttgtaacttattatctgcgtgtatataggtttgttgtccataaaaagagtatatttcccaggctggccttgtaacttattagctgcatgtatataggtttgttgtccataaaaagagtatatttcccacctaataatgtagcaattagaatgaaatgagatcgaatttgcaaaaccaggctcagagaaggaattcaatgaacgtgtattgttattgctgtgttgctggaagcgtagacctctgagagggatgtggggtgattagggaagctcagcagggaggsagcacgttgggtagggagctgcactgagagaactactctgtgtggaggttgggctcccctggagctgcactgagagaaccactgtgtagtggggtgggggctccacctttgggstcccctggagctgcactgagagaatcactgtgcgtgggggctccacctttggggatctcctggagtttcgctggtttgggcaagagctggtgaaaagcagccttggaagaaggagggattgttcttgcaagtctgcggctgctattggggtaatttatgtttgtccagacaggtgggacagttgggggccaccatctgggtgggaaggacacgggtagccctgaggccagacaaggaccccaggaaaagcccagcccttcagggccacacacaccgtgggggaggttggggggcctctggccagggcatcatcctgggcacgttctgctggtatccagggtcacgtgatggttgtggtgagccccacacacccgcccccagaggctccttcctccacccacaatactcagttatgtggatggctgcgttcgtataaagataaatatattaatgtgggttcaaacgttctttggcctaaatgtttattattttcttctgattttaaagcaagttaaagattttgtgaccacacttgctcctgtggccctaggcactgtggctatggtgccgcctgggtaggctggccctggggaaactggacttccacctgcctcaggggaggaattggcctttcgtccyaagaaaagtctcctcagaagaacccgagtgggagtgaaaagcaaaagtgagttgggccccagggccccctgccccaccgggcataaatatacccacaggcatgcacacactcacaggcacaggtgaccgtgaccrcccgtacacctgtgtgcacgcccttgtgcacacacaygcacacccacccacacccatacacacacgtgcacacaggcacacgcacctatacatgctcatgacacacagacccacacacacacctgcacacacctcacatgcacacagctgctccaggatccttctgctgacaygcggaccctgtgtaactcaggagtgtattggacgagggcagggggggccgtggcgaggagcaggatactgtgatgcccgtggagacccccgcagaggttccggggggtccgggcactggctccttcggggctccctactggatctcaagggaaaggcgggtgcyctcatcagccatgtcactctccagtgtcctcctttctttttagggctcagttagagtgagcccggtcaccccaggtaccgtctctctgccctatttcaactttctcttctggctcttctgggccagcctgtctttcgtggggcaggactggggttgacagcacttcccttccacacggagcacatgcttgtgggaccctgaaggcagagaggctggggcaggtgctgygggcagcaggcggggaggggctggaccatctcaggcggggagcctgcagggcttgttcccaggagctgaggagctgactccagacctcagggctctgcgctaaggtccctggacacaaactcagggcacagacaagaggcaaaccctcaggggacgacttgaaaatatggaatcacaaggaattgttatcttcattctataaagagctcttataaagcaatgagaaaaaaataaacacccaatggaataaacacccgatgtgaacaagaaaattacaagaaaacccaaatacgtgtgtgtaggtaaacacacacacacacacacacacacagatatcaatgaaagataaatgaacagcaagatgctgtttttaaacayacagactggaaagaaattatgaaattttaatttagtgttgttgagggtattgagaaatcatttgcatccatgcattgctgtgcaaaagtaaactggtgaatacattcgggacacgatgtgacataaggtatgaaatgaaatcaggcccattcacagcaccacaagaatcttccctagggacaatgtccaaactgcccttaaaagtgggtgaatatattagtttgtcacgattgtttatatcaccaaaatactgaaaaactttaaacgttgatcacaggctatgagcatgagaaacacaagcaactttagacaatcatgttatacagtgatattatggaaatggtaaaatgttgcccagcttagtaaaattttagatgatattgtacttgtcacttttcttatttcaaaatgttcattattgagcatatattatctttgtacttagagaaaaataacaataaaattatttgtaaacaattttaaaaataaaaggcaagaccacatctggcagggaggacacctgcgtgcccgtgggtgagaamgtgggagaggccccagggtgggtctccagggcactttccagggctcttggtgtcaggcatgaacctcctggcttgcagttaagagtgtccatcaattattcagatcctgtccatccccagggcagccttcagtagttgagtgattgagctaacagtcactccagtgagatgaaaaatataccgtatactctaggagtagctccataaacccaatagatgacacatcataaatcagtgcttttaaatgtttgatgtcctttacactcaaagcatccagtttggtctctgagtatttacggtggagtgagagggtggaagttcttagtgagcttggagcaagttgggacttttgaatcccaaagcaaaacagaaaatgatccacacaatttatcatatctatgtttattcagttttcctaagagaaacatgtttccagcaactacacgagactataaattaaagtgttttgagtctctgactactgatcactcagcccagggagctgtgagagctttgcagcatcctctattttaggactgggcttttcttcatgaccttgctccttctggtctcggctaagtgggggtgcaggcagcccgatgatgttccactgggtgctgcaaaccccccatccactgcagaaaatatgtagctatgaatgtatcgacaacctcaaagctatgcaagcctcctcatgcacaccaatgtgtatctctaggtacatattacaaagtggagttagtgggttatgaattatgttcatgttggaattttttatttccataagttattgagaacaggtggtgtttggttacatgagtaagttctttagtggtgatttgtgagatttcggtgcacccatcacccaagcagtatacactgaacacaatttgtagctttttatctctcactcccttcccaccctttccccctgagtccccaaagtccactgtgtcattcttacgcctttacatccccatagctgaggtgtcacttatgagtgagaacataaaatgtttggttttcaattcttgagttacttcacttagaataatagtctccaatctcaaccaggtctctgcaaatgccattaattcactcctttttatggctgagtagtattccatcgtatataaaaaatcacagtttctttatccactcattgattgatgggcatttgggttgcttccacagtttggcaattgtgaattgtgcrgctataaacacggatgtgccaatgcatttttcgtataatgacttcttttcctctgggtagatacccaggaatgggatcgctggatcaaatagtagttctacttttagttctttaaggaatctccacggtgtttttccacagtggttgtactaatttacattcctaccagcagggtagaagtgttgttcccttttcaccatatccacaccaacatctattattcgttgattttttttattatggccattcttgccagagtaaggtgctaatgtgttgtgttttgatttgcatttccctgatcattagtgatgagcattttttcatatgtttgttggccatgtgtgtatcttcttttgagaattctctattcatgtccttagcccactttttgatgggattgtttggtttttcttactgatttgtttgagtttgttgtagattctggatattaatccttygtcagatgtgtggattgtgaagattttctcccactctgtgagttgtctgtttactctactgactgttccttttgctgtgcaaaagctctttagtttaattaagtcccaactatttatctttctttttattgaatttgcttttgtgttcttggtcattaaatccttgcctgagccaatagcaagaagaatttttccaatgttatcttctagagtttttatggtttcaggtcttagacttaagtccttgatccatcttgagttgtttttgtataaggtgagagatgaggatctagtttcattctcctacacatggcttgccaattatcgcagcatcatttgttgaatagggtgtcctttgcccactttatgtttttgtttgcattgtcgaagatcaattggctgtaagtatttgggtttatttctgggttctctattctattccattggtctatgtgcttatttttgtaccagtactatgctgttttggtgactatggccttatagtatagtttgaaatcaggtaatgtgatgcctccagatttgttctttctgcttagtcttgctttggctatgcaggctcttttttggttccatacgaattttaggattttgttttctaatttgatgaagaatgatggtggtattttgatgggaattgtgttgaatttgtagattgctttcagcagtatggttgttttcacaatattgactctacccatccatgtgcatgggttgtgtcccatttgtttgtgttgtctgtggtttttttcagcagtgttttgtagttttccttgtagaggtctttcatctccttggttaggtatatttctaagtattttatttttttcagctattgtagaaggggttgagttcttgatttgattctcagcttggttgctgttggcgtatagaagagctactgatttctgtacattaattttgtatccagaaatttttctgaattatttgatcagttctaggagctttctggaggagtctttagggttttctaggtaaacaatcatatcattagcaaacagcaacagtttgacttcctcttcgccgatttggatgccctttatttcttttgtctgattsctctggctaggatttcgagtactatgttgaagaggagtggtgagagtaggcatccttgtcttgttcccattctcagagggaatgctttcaacttttccccattcagaattatgttggctgtgggtttgtcatagatggcttttaatacattgagctatttcccttgtatgccaattttgctgagttttgatcataaaaggatgctggatctttttgaatgctttttatgcatctatcgagacgatcatgtgatttctgcttttgattctgyttacatggtgtatcacatttattgacttgtgtatgttaagccatccctgcatccctggtatgaaacccacctgatcatggtggattatctttttgatatgcattggatttggttagctagtattttgttaaggattttagcatctatgttcatcagggttattggtccgtagttttcttttttggttatgtcctcttctggttttactattagggtgatactggccttacagaatgatttaggaagggttgcctgtttctctatcttgtggagtagtgtcaataggattggtaacaattcttctttgaatgtctggcagaattcttctgtgaatctgtctggttcttgactttttttgttggtaatttttatattaccatttcaatcttactgcttgttattgttcagggtgtctaattcttcctgacttaagctaggagggttatatctttccaggaatttatccatctctaggtttcccagttgatgtgcataaagctgttcatagtagccatgaatgatcttttgtatttcagtggtgtcagttgtaatatctcccattttgcttctaattgagcttatttggattttctcttcttttcttggttaaccttgctaatggtctatcaattttatttatcttttcaaagaaccaggtttttgtttcatttatcttttgtattttttttgttgttgtttcaatttcatttagttctgctctgatcttggttatttcctttcttctgctgggtttgggtttggtttgttcttgtttctctaattccttaaggtgtaaccttagattgtcagtttgtgctctttcagattttttatgtaggcatttagggctatgaactttcctcttarcaccgcctttgctgtatcctagaggtttcgataggttgtgtcattattgtcattcagttcaaagaatttttttttttttgagatggagtttcgctcttgttgcccaggctggagtgtagtggcacaatctcggctgattgcaacctctgcctcctgggttcaagtgattctcctccctcaggatcccgagtagctgggattataggcatccaccaccatgcccagctaatcttttgtatttttagtagagattgggtttcaccatgttggccagactggtcttgaattcctggtctcaggtgatccaccagctcagcctcccaaagcgctgggattacaggcatgagccactgtgcctggccccgaagaattttttaatttccatcttgatttcatttttaacccagtgtcattcaggagcagattatttaatttccatgtatttgcatgattttgaaggttccttttggagttgatttccagttttatttcactgtggtctgagagagtgcttgatataatttcaattttcttaaatttattgaggcttattttgagacctatcatatggtctatctcagagaaagctccatgtgctgttgaatagaatgtgtattctgcagttgttgggtagaatgttctgtaaatacctgttaagtccatttgttccagggtatagtttaaatccacagtttctttgttgactttctgtcttgatgacctgtctagtgctgtcagtggagtgttgcagtcccccactattactgtgttgctgtctatctcatttctcagttctgttagtaattgttttataaatttgggaactccagtgttaggtgcacatttatttaggattgtgatattttcctgttggacaaggccttttatcattatataatgaccctctttgtcttttttaaccactgttgctttaaagtttattttgtctgatataagaatagctacactgctcgcttttggtgtccatttgcatggaatgccttcttctacccctttaccttaagtttatgtgagtccttatgtgttaggcatgtctcttgaaggcagcagatggttggtgaattcttatscattctgcaattctgtatcttttaggtggagcatttagaccatttacattcaatgttagtactgagatgtgaggtatcattccattcattgtgctatttgttgcctgtaccccttgggtttttgtgattttgctggtttttttaattgtatttttgttgtataggtcctgtgagatttatgctttaaagaggttgtgttttgatgtgtttccaggatttgtttcaagatttagagctccttttagcagttcttgtagtgctgccttggtaggggtgaattttctcatcatttgtttgtctgggaaagattgttatctttccttcatttatgaagcttagctttgctggataccacatttttggtggataattgttttgtctgaggaggctgaagatgggtcccaatcccttctagcttgtagggtttctgctgagaaatctgctgttaatctgataggtttttactttataggttacctggtgtttttgtttcacagctcttaagattcttttcatcatcttaactttaggtaacctgatgacaatgtgcctgggcaatgatcttttagcaatgaattctccaggtgttctttgagcctcttgtatttggtgtctaggtctccagcaaggccagggaggttttcctcgattattccccaaaataaactttccaaacttttagatttctcttcttcctcaggaatgctaattattcctaggtttggtcattagacataatcccagacatcttggaggctatcttcatattttcttattcttttttctttgtctttgttggattgggttaatctgaagaccttgtctttgagctctgaagttttcttttgcttgtttgattctattgctgagactttccagtacattttgaatttctctgagtgtgtccaatgtttcctgaagttttgattgttttttatttgtgatatctatttccttgaatatttctcccttcacttcttgtatcatttttctgatttccttacattgggctttgcctttctctggtgccttcctgattagcttaataattaaccttctgaattctttttcaggtaaatcagggatttctccttggtttggatccattgccagtgagctagtgtgattttagggggtgttaaagagccttattttgttatattaccagagttggttttctggttccttctcatttgggtagtctctgtcagagggaaggtctagggctctagcctgttgttcagattctttcgccccagggggtgttccctggacgtgattagtactctccctgtttcctagggatgtggcttcctgagagctaaggtgtagttattgttatctctcttctggatctagccaccaagttcaaattgttacaaagttcagctggcagtttccttctccctgtggccttttacaggtgcctctggcagccctcctgaaggacccctgtgaggcaaggtggaaatggcttcctaggggacccagagatcccacagggcttttctggctgcttcctctactcttgtattccactcggctctctaaatggactcagctccgggtaaagtcagaatcttctcccgtaatctagaccttcaggttccgcagtgggggtgcatgttcagggtggacgatctctcccacttcctcagtttgggcactcacagtatttggggtgtctcccgagtcctgcaggagccatccgctttcttcagagggtctgcggtttctcttggctttcctaatgtattcctgccgtcgttctggagcaaaagttcacgacgtgaacctccacacactgctctgtttgtccaagtgagagctgaaacctagtcctgcctcttgtcygccatgatccgtcacaaaaaatcctcctcatgttggaattttaataggtactcccaaatttctctgcagcaatgagatggcgaattgtattttctaattgattatttytcagcaacaattaatcttacataattcctatwattttccaatgcggtaaagaagaaaatcttgaattttacattattggctttaaaacctgtatctgtgtctcttttgttgacctaaagcaagaagctgaggcacaaaatacattttaaagagtttacttgagccaaaatgagaatagctgcccggaatacttagatccaaataactttggacgtgagctttgttagatctttgctgcaaacaggtttcaaaggcgaaaaaggtrgacaaggagtgagccttggtccttcactctatatgattgcttggcttttcattttgtttacggtgccattattcataaatttaggtcgattttcgtcaattttttttcttctctatgacatctacattgttatcttactgagcaggtcttccttatctggtatatataataatatatatataaatatatttttctatattttattttaaacatattaaaaactgggcttgatatacaactttgttttattctgactctattttgtgtagataaaatactgctttagtgagtaacatttaaaaaagccatggtgagagcagcatctgcctctgttcctagataaagggcatgattctgatgtttttcctcacatactgtgtctactaggaatttctgctagacaacttcagttagaaatttgaaaatcttatttgtaatttcccaagaattttaatgaggcttgtgggttccagctttactcaataccttcccagcatcggcagaggaggccacagggcttccacttcacttcattattgtgtgagctacactggtagatttccaacgcagtgccatatttacatggcctgcatgatggtgatgcaggttttcatttattcttggattgaatttgctaatattttatttgaaatgttgcctctctcttcataagcagagttgtgctacagtgctcttttccgatgctgcacctatttgggtgttacaaacacaccagcatctgacagtggtcaggggttgcccattcttttactatgctcaggattaccttgtctaaaatcaaatttgggctttttgttttgaataactggtagagcttatttgtgactctggtcctgataacctctggggtggcagatctttggttatgggctcagttctgggtgcagttagtctattcgagcccataagtctttcctgttctttattttctattaccttcctattacactttttcatctacttcacatttctcaccctcttatgctgaaagcgagttgagttacgttcactgtgtcgtgctttttgacaagtgtagttaagactatgtattttcctgtgacccccccccacaaattttgatacatggtccttacattgatgttaattcaaaataggttttaattcaaataagaatttcttacattaaacttgagcacccacatgtaagtgtaatttcacataaatgtaaaacttaaactgtgcctgactctcccgacacgagtctcttcctctccctccctcatttgctagactctcctcctgctcactcccatgttctccactcatgcccctgcccccaaaccaatcatttgactcccaaatgttgatatttgaagtgtgtgtaggggaaagggggcatgataaatgaaactagaatagtaagaagctggtgtagacagcatagtgggctcaaagggattcactgggcaccccgttttaatcagcatgcccttgctatgatctcagcactcatggcatgcccttcccatgatcctgatgttcatggtgtgcccttcccatgatcctgatgctcatggtgtgcccttcccatgatctgaaagttcatagcacatgcccttcccatgatctgaatgttcatagcacatgcccttcccatgatctgaatgttcatagcatacccatcccattctttgagtgctcatagtatgttcttcctgtgatctgagtgctgatatcatgcccttcccatgatgcaaatgctcacagcatgcacttcctgtgatctgaacgctcatagagtgctcttcctgtgatccaaatgctcatggcatgccctttccatgacgtgaatgctcatggcgtgcccctcctgtgttctgaatgcttatagagtgcccttcacatgatctgagtgctcatggtgtgtcctttctgtgatccaaatactcatgctatgtccttcccttgatccaaatgctcatggtgtgtccttctgatgatctgagtgctcatagtgtgctcttcccacgatatgagtggtcacggtgtgccctttccatgatatgaatgctcacttggctacacctaaagaagtcatgcacaagcatattctcttgaatgttgttaacaaaaacaagactatgctgagtacacgttctgtatcttggattctcactcagtagtgatgtgtcctgggaatccccccagtggagcgccaagccatccctgcttacggctggactgttccacactccgggtcacagccatgggtgtgcccttccgtgttacagcctctgccacagcgtggatcaccagaagtgacactgccaggttggaaggcagctttagcactgctatgctggtactactgtctaaaaattctgtgaccctcacagcaacgactgagtgtaccccttacycacattcgccatccacactggcaacagccttgtttttttctcatttttttctgcttgtttggcggcaaaaaaaaaaaaaaaaaaaaaaaaggagagagagagatatttcgttgttacattagttgctttccctgaatattagtgaattttaaagttgtcctttatttatctttttttggcaatttgtatttgttcaacgaatgatctgttcatagcctttgtccatttttctactatttgactgttaattgattttaattgctcctttccactctagatgttaactctctatctctcacttttcttacaaatgtttttctacagccccatcaatacagaactgtcagcatgaagcactttcatattttataaggccaggtctacttatgtgttgatggcttctaggctcagttttggttcaggaatctcctttgctcgaagtcgacagtgacctcctkggtggtattacagcacgggtttccattcattttgcacagtggacagtctgggtgcgttttattcccattcagatggaaaaccagctggttctgccctccttctccccacaggcctagatagcactttgtcacagaagaactggggtctggttctgggctctctgtcttcttttattaacagattcatctgttcttgttgacaataccgtgtggacttggtcatagcggccttatagtatatcctattatctgtcaagtcaataccrcatcaccattcttttccctagtttattaaggaataaataaataatggaatttgtatcttcatataaactttaaaattaatttatctatttcaaaatgaaaaagtactatcattattattgtaaatgaaattgcatttaatttatacattcatttagagagaaatgatcttttcccaaattttttgtatatttaatgatgttttatgattttctttttgtagatcatgtgattattttgttaaatttacacacctgattttgatcaacttttttgtcattatgaaagggatttttttttctccattaccattcatggtactttgctaaagaacaaaacaaaaaagaaagaaggaaaagaacagttttatacttatcctcagatcgaagacattttttaaagaaatgttatcaattttttagaatttttagatgttgtagacatctaacatagcattaagaaaaaataattttattatgttttaaatcttattttctcttacagtagctttaccagctcttattttattttctagactttggtctaactgagatagtactaagtaccaacaatgatagcgggagtttctgctagtccttaattttaaattaaattgttccattgtttcactgctcgagataatatttgttattgtttctacattatattttagcaattccaatctattctatttctatttaaccaggaatggtaagtaatagtaaattgtgttattgcattttaagtacctatgatattaatttttcttctttaatttgctgacaccctggaaaatacaactctattctccaacacggaaccattctgtgaatagattctatttgactatggtaattgctgttttgatttgctgccctatcttttattattttatttagaagggatattgatctgtatgccctgtccttgtcctgttttcatcagaggccaatacaaaagtttcgctgactctgtagagtgcactggggcccttttcatcttttccatggctgaaatagtttaagcaaccttggagttacctatcctttcgagatttgatagaagtccaccgtcaatgccatctgacctctggatttctgatcaccttgtctatctcttccatcctcattgtccattggagttttacatttcttcttggaaaagctgtggttatttctattttgttagggagtcatcgatctgttcttcattttccaatgtgctgccatgaaaccgcatatacagtcgctcctggttcttctcatctctcctgcatgcctgagccctgctcctttctcatggcaaatcctgcctcactcggtgctctttctttgttttccacactgggttgtgaagcagggcttcatgttttcttcccaccaggtcttttattcatagttaattattttaacttctgcatgcattaatttaactttctcatttatttgtgctttagctctttgttacttaactaaattcttaaaatagctacttaatttcttggtttttgttgttttgatgaaagcaatttaaagagcacagattttcttctgaggaaggctttgctggtgtgcttgaattttcttaacaagtgagttaacttttcattgatttctggagacactttcagctcttcttaagagtctctttgaatcagtgagtaggagaatttgcagctccttgttatttatttgtaattttattattatttgtgctcttcaatttaattcctctatttcctcccattcttggggcctctgggcctgtatattctgaagggcgtgcactgaagttccggctgtcacggttttcttggctttcctactcttttgctgaatttcagctcctccctgggttccctgctggccccaagtactcacctcgtctactctaagcctcgcaggcctccctgaggctctcagtggaagcgctttttttttttcttttttcttttttttgagacggaatctcgctctgtcacccaggcaggagtacagtggcccaatctcggctcactgcaagctccgcctcccaggttcacgccattctcctgcctcagcctcccgagtagctgggactacaggtgcccgccaccgcgcccggctaattttttgtattttaagtagagacggggtttcacygtgttagccaggatggtctcgatctcctgacctcgtgatccgcccrcctcggcctcccaaattgctgggcgcccacctcagcctcccaaagtgctgggattacaggcgtgagcccccgcgcccggccggaagcgcttgtttaatgcacgatcttttttaaygtggaccckgtgstggctctgagccaaggctggggcctcgttgctgccccgacccccagctggccttgggctgcacagctgccaggcctgggcgctgcccagaggggttctgacagcatctgctttgctgcttcaccacaaggccgactccctctcacctacattctttctgctgcacctcctgtgcctgggtccatcaggagctcggcctgtctccctgcaccgcacggcaccgagcggccaacccctgagcggctgctggctcgctggccgcatttccctaatgcagcccaggtcttccgttccttcctactcctcagtgcccaggctgcactttgccccgagaggagctttccccttattttcactggtaataataatgtcctattacgagaagaccgtgatcttcaggaagagtctctttcggaatctgtccaaccccggtgatcttgtgattctggatgagcgatttaacctcctaaatctgataacgcccagggtaggccctgaccccgtgacacctcaccagggaggaagagctgacagggaaagggcacatgctctctgcagcccacagagctcgactcttcccaggaaacctgtaaatctggaaaaaatrttttagatctccatgttacagatgagaagatggaagctggccacagccagagttggaatcccacccaaggtctcctcactcccctcaagctgcctttacactaaacagtgatgcccacaaaactcggagactgtttactcattgtgctcctaaaccaagtccatggcactggaaaggaagaagtcagctcttccgaaagtcagaaaataaaccagaccggggattccatgagcagctagagcaggtctgagcaggagcgagactggctcaggccaagagcgtctgagctttggggagatgtggactcctaggatgtggggtccatcctctgggttcaacctcttccaggcaagagaccaccagtgagcaggctgaggggaggtgcggggctggctggaccgacccctgcagcctcttccaggcaagagaccaccggtgagcaggccaggggggargtggggggctggctggaccaacccctgcagcctcttccaggcaasagaccaccggtaagcaggccggggggggaggtgaggggactggctggactgacccctacagaggactggaggggcagagaaacgtgcggcgctgcggggtcgtcgccggcctcgaacttccagagtcttacaaagggtgcacgggggccctgggtgaccttgaactcccctttgcctgcagctcccggaggaggcccggccggccgcgggcaccgcctgtctgcccttctaccgctcttcggccgcctgcggcaccggggaccaaggcgcgctctttgggaacctgtccacggccaacccgcggcagcagatgaacgkgttgacctcgttcctggacrcgtccaccgtgtatggcagctccccggccctagagaggcagctgcggaactggacsagtgccgaagggctgctccgcgtccacgcgcgcctccgggactccggccgcgcctacctgcccttcgtgccgccacgcgcgcctkcggcctgtgcgcccgagcccggcatccccggagagacccgcgggccctgcttcctggccggagacggccgcgccascgaggtcccctccctgacggcactgcacacgctgtggctgcgcgagcacaaccgcctggccgcggcgctcaaggccctcaatgcgcactggagcgcggacgccgtgtaccaggaggcgcgcaaggtcgtgggcgctctgcaccaggtgcgcggggtggtcctgggcgccctgggtggctgcgggcaaagcggggggcgcctcgtgtgggtgcgcagcatcgtggcttctctctcccaggtacttgcacagccatcatgggygyccacatgggtgagctccaggtcgtggggccctgtgtgggtgcgcagtcctgctgggcgccctgcatgggcgtgtggagggtcatcgtgagctcctgtgcaggggccgaagggtaactccggagctggcggccctccggggcccctctgtcccacctgcttaccctccagccggctggtgattatcccaccaagacccaacaaccacagccccmcaacagtggcagccagaccacccaggtttcccggtgcgcacagccaagctacgtgctttacagatttcaactcatttaataattcccagaacaacccttggaggtgggtggaccaggggtgctggtgtttttgtatttcagagacagtgcagtgaatgaagaaccgactctgtgtgaggattctgaactaacaagttagagtctatttgaaacctttcttcattttatgactttcttaagtatcacatgagagggtcttgaatggagagtcaagttggccttttattaattgtgtgatggagaaaagcacttatgcacctggaaatgcggtccctgactctaggggtctcacaggttgttaggaagaaggatgggctgtttgatawgcgagtcaccgtgtgtgtctgttgcaccaggccctgtggcggcctgggcatcgtgtctgcagtcctagccgggagcctgcagggaggtgcgcgtcagtcctgttctaaaggaggcactggagccttgtccgaggaggcacaggggctgtgtgtggcaccggctgcccccgggcaccatgcgcccctgccgctttctggccttcactgcactggggtccaggccccaaaggtcagagcagagggtctgggaagcctccatgcgctgggtgttaacccttagttcctgggtggcgaggggacctggagcttcctggaacaggggctggcagcagcaggccctcacacttctccggcaagcacggcagacgggctcactgtcctaacacgcatccacacagcaaacacagcagacgagctcactgtcctaacgcacatccacacagcaaacacggcagacgagttcactgtcctaacgcacacatccacacaggaaacacggcagacgggctcactgtcctaacacgcatccacacagcaaacacagmagacgagctcactgtcctaacgcacatccacacagcaaacacggcagacgagttcactgtcctaacacacacatccacacagtagcgcttggtggggagcatcagccggacggaggaggcttatgtgggtgagaagatcgagttagaaatgaaaacaggaaccttgtcacyatgtgaagtaaaaatcatcaggcacccacgtcgctttcaagcagcgactcagacactttcctgcttccccgtgcraacgggaatataaacccaggagctgctgagcggtggaatccaggtcctcgtctccrtgagtctggacttccggccacacgcgtggggaggcaggtcccagacggctgccttctcccctctgctcaacccctgaggccttcggcsctcctgtctgcttccttgcttctgtgccccttccctgactgcgacctccacgggcagatgttcatccatttaattcttgtttctcaggacccacaatttgccaggttgcttcataaatatatgtagagtttgtgaatgaagtagaatctcaaaaataattctggaagtcctgccccttctgtctcctcaggagcaggatttggtttgaaccttctttgagtgagaacctcatccagcccagggagctgtgagaagagcagctgcctctgatccctggagcccgttcacagagcgggaaacgcccaattgtcacgcaccctgttgtctttcttctccatggagttctgggattatttagaggcgtgaattattaccaggcccagtcattgtagattagagacagtttaattccaagttactgagaatcctactgacctagaaataatgacatttggttgctgcggctgtggctgctgctgctcctccttgtcctcctcctcgtcctcctcctcctcttcttcttctccttcttcttctttttttttgagacagtctcactctgtcacccaggctggagtatagtggtgagaccttggctcactgcaaccaccacctcccaggttcaagcgattctcctgcctcagcctctcaagtagctgagaccacagacatgtgccaccactcccagctgatttttatatttttaatagacatggggttttgccatgttggctaggatggtcttgaactcctttcctcaagtgatccgcctgcctcaggctcccaaagtgctgggattacaggcctgagccactgcgcccagctgccttttcttattattaatgaaataataacaacagcaaccaataggaaaagtgttcttctctgtttcatatttaccttcctcaattcattttctgtgtgttctgctttttaaaaaactgtgaacattcttttcttcttggttttacatttcacttttgaatttccttttgtatttttttcagttaataggtcctctttggtgctttttgcaaaaacctttgatacattaaaataataagttgtgtttaacgtgtcgatagagccactgctgcgacttctagccgtatttgaaagatccacggtggcctgggcctggaagcctcatttttctctccctggttctaccgactcgtagtttggtaactttgtaatctgaatctctcttcttctgaaaaacattagataatgaaaagagatgccagggcaaccttatgaaagagaaatagcatccccccctctatcacccctcaaaccccctacacacacacacacacacacacacacacacacacacacacacacacacgagccagccagggccaggctaatgcacacatcagcaagagacaggaaaggtcatctcagagccgggagtcacagctttctcctccatctgtccacaccacctccctcctccttcatccgtccaaaccatgtttctcctgctgcatccgtccacaccacctccctcctcctgcatccgtccacaccaccttcctcctgctgcatccgtccacaccacgtccctgctgctgcgtctgtcctcaccatacccactctaatttgtcagggcccaaccacagccgcccccactctgaggatcttggctcctctaatttcttttgtcgaaagctgagagctatcccctccctcagccctgggccacaggacttctgctgtgggcatgtttgggagggatctgcagggccgccctctgtgctggttcctgggatccggcatctctcgggggactcgcacgtaggaagggctgataaagttgctcttgctggcttgagatcccacaggaccctggatccataagccctgcttcccaccaggaggaactgaagctcttgctcttcaatcccagaaaaccctagctgctttaggtgtgtcataagacaagaactcacaatcagttgctcactttggtgataacttttgtgttctacagacaagaaaagaatgagaaaggaaacccttcccagcacaggtgtgagggaggcagagaggaggtagccatcctcggggagtctgggtgtgccatccaggcagcatggagtttgggttccacagggtgaaaagataaagacatcccaaatatctggcgtggatgttttctatgccccggccatcagatagcagacctatttctggagcacagccttgatttccccagatatccagggacccacagaagctttgctttggatgtgtgtggaggtagaaccagaccccggagggactgcagatctccctggacatccccatcccgggcaggcagatccatgtctcggggcaggggctgcatccctgggccactcggctgctgacctttgctgtagctgagtactttttcagattggttgctcttccagagcaaaggagcagatggataaagtcatgcttccaaggctggaaagaaagagaaagggccgttcctgcagtgggtgctgttgctgccccacccaggcccctttatctgcagggccccatcccccagtggcctccaatgttggctgacaaagtctcctggtcgttcctctccaggggtagctgtggaggctgttccctgccctgcagggacagccaggcccctacctcaaggctggaccaagcccaggtgcgccatgctgcagggcttcctgcggaggagcacaagccaggcctggctgtgtcacgtccttggggagctgggtgcctgctcagcctcctccctggagcaccctcagcaagcatatgggagcctcttattggactaatagggcatgtttgagaaaatgctgagtgatgttctgcgtagagcagggtaggtgactttgaaagcagtcgagagtcagaaagttcagaggagcctgtgccaggggctacgcggctgtttcccaccgtcggtgacaaggatcgcatctccaggtctcttcgtcctggtctccccgtgtgctggggtcctggcttcccgtcaccttcacgcccatcattttcccaagtgtggacctttcagtcattcccactggtgagttgtgaaggcaaagaaatggagagtggccacaagtcagcacctggtggctttggcagaggctgtggggaaccaggaggctggggtgagagcagacgtggaggagcagcttgaagcagcctgggaagatgaggcctctacatggcaccgccagcagaggaagaagacatggcccacctgggaggtgagcaggaggggcacctgacagcgacgatgccccggtctcacagtatggcgtctgcccaggtccaatagttcagagtaaccatttcccccatgcgaccaggtaaagaaataccagaagcatttccagaagaattgccatgaaaattccagagagctgtttacaaggttcaagtgttttctttttctctttttgagaaagcatctcctctatcacctaggcggaagtgcggtggtacaatcatagctcactgcagcctcaacctcctgggctcaagcaatcctccacctcagccacccaagtagctgggactacaggtgtacaccaccacacctggctaatttttaattttttaaatttttttgtagaaacagagtctgactgtgttgcccaggctggtcttgatcttgggctcaagcaatcctcccactttggcctcccaaagtgctgggattacaggcgcaagccacygcgcctgactcaagattcaagttttaaggccccattggtcagaacaatgggtgcttctgcccaacctcgacggctcccaggggaggctgcagtatctgagccaatcacttaccagggatgtttcagatcagatgaggaggcagtggggaagaggagagacacactgttcagagctctggcaagatcagacactgaggaagtacagtgtctgtgaggctctgatgaagggcgcaggtttcctctctgttaacagctagccgggcacaggtggagctgctgaacctgaggctcaggcctcagttctctgcctgtgcttgctgcatcccctggctcacaagtcaaacttcaggcaggcaagaaggggaagaggtgtcttccttaaaatagcttgcacttgaatttgaaattgtctcagtccctgggctaaaaagagagaggccttttcctttctattgtagtgagaagaaaccaaagaatgttccagggaacagaaggtgctgcctgagttctgaatgtgggaagcacacggaccttctcacgcggttaggaggagccccttggacacctgtgtggttcagaaacgttgccacataaattgcacctgaggtggagaggctgtttgcacgatgaagtcgtgcaactrctctctgggatgctgacccatagcacagtgcttggcaccaatggatgaactagcacagggacggaaaccccactgggaaacatttggatgctgccttttcctccttgtctgtccaggtctccgaggtggagcgggacagcgagggcaggtgcaccttcagtgaaggcccaggccacacaagactcacggctctccctggtctccctgaagggccaaattacgtgcttaggaaatgcattctggcacatggaagaaacatattacaagtgtgtaaataatattggttatttttaaacaatccrcttgccttcctaaactggtaagctaaaagagaagattcatattctagaattattcctattatgcttcatttggatgcagtttattgaccaaaatattccccttaaataccaaaacaacttgacactgatttttctgtctgaaagaaacactgttaaacctgaaagtagaatcttggtacataattctcctgggaccatgtatcaaatcgtaatttccaggccctgtgattgcaactgtaattttccatcgacagagctctctgccatacaacatgctttgatttaatcctcacaaaggctctgggaattaggtattattgttgctttgtagaaaaaggaactgctccccactgtcaatcatccagccaggagtctagctgcccagcctggcccggtggccattgttggctcgacagaggtgctgtctcttgccactgccagccccatcaccatcctgggaaggaggctctctagtcagccctataaacgcacctcctgaatatccatgaaaaaatcagcaagaaggcatttctgggaagttcagctgaggcccttattacaagacgagaagggtccagttccctggggctgtcaaggaagatgctcttccacactgccgctcgaggcgaccctcctctggtatcctgggcctcactgagatgcttttcctatctgcacagatcatcaccctgagggattacatccccaggatcctgggacccgaggccttccagcagtacgtgggtccctatgaaggctatgactccaccgccaaccccactgtgtccaacgtgttctccacagccgccttccrcttcrgccatgccacgatccacccgctggtgaggaggctggacgccagcttccaggagcaccccgacctgcccgggctgtggctgcaccaggctttcttcagcccatgkacattactccgtggaggtgagtgagtgcggtccctgcagctggtccccatgaactctyccttctttttttaatttttttaaattatattttaagttctagggtacatgtgcacaacgtgcaggtttgttacgtagggtatacatgtgccatgttggtttgctgtacccattaactcgtaatttacattaggtatttctcctaatgctatccctccccctgacccccaccccacgacagacgggatatgatgatccccgccctgtgtccatgtgttctcattgttcaattcccacctatgagtgagaacatgcggtgtttggttttctgtccttgcgatagtttgctcagaatgatggtttccagctgcatccatgtccctgaaaaggacatgaactcatcgtttttttatggctgcatagtattccttggtgtatatgtgccacattttcttaatccagtctagcactgatggacatttgggttggttccaagtctttgctattttaaatagtgctgcaataaacatacgtgtgcatgtgtctttatagcagcatgatttatagtcccttgggtatatgccaagtaattggatcgctgggtcaaatggtatttctagttctagatgcttgaggaatcgccacactgtcttccacaatggttgaactactttacagtcccaccaacagtgtaaaagcattccttttctccacatcctctccagcatctattgttttcctgactttttaatgatcgccattctaactggtgtgagatggtatctcattgyggttttgatttgcatttctctgatggccwgtgatgatgaacattttttcatgtgtctgttggctgcataaatgtcttctttgggaagtgtctgttcatatccttcgcccactttttgatggggttgtttgttttttccttgtaaattggtttgcattttttgtagattctggatattagccctttgtcagatgggtagattgcaaaaattttctcccattttgtaggttgcttgttcactctgatagtggtttctattgctgtgcagaaactctttaattagatctcatttgtcaattttggcttttgttgccattgcttttggtgttttagtcatgaagtccttgcccatgcctatgtcctgaatggtattgcctaagttttcttctagggtttttacggttttaggtctaacatttaagtctttaatccatcttgaattaatttttgcataaggattttcgcatcgatgtttatcaggtctcacttctttcttatgactcatcgcagccgtgcagaccttccgtatgggcacacttgctgatcctacacaaggtttttaatatctgtggggaaaataaatgtgtttaaagcattttaaaaggctaaactgggctcaggcacggtggcttacacctgtaatcccagcactttgggaggctgaggcaggcggatcacttgaggtcgggagtttgagaccagcctggccaacatggtgaaaccccatctctactaaaaatacaaaataaacaaacaaaaaacattagccgtgtgtggtggcagrtgcctgtagtyagctactcaggaggctgtggcaggagaatcgcttgaacctgggaggcagagggtgcaggtgagccgagatctcaccattgcattccagactgggcaacagagtgaaactccatttgaaaataaaataaaataaaataaaaataaaaggctaaactgttctatagttatgatcagcaccatcatctttagaatgttaatgatgggttacctttggaagttaattatttggaagaaaatgatcctattcccccaattagttttttggaagggttatttttaagcttccccattttttctttatattcctttcccagtagtctgtaagtccttctgggagcttctaacctgtctcaaaagttgaccggctccaggcgtagtggggagtggggagggcaggggtgctgcagtgcgtccggcgatacctgcttagatgagagctgagtcatgcacagtgcaccagaggggcaagggccagcctggccctcagcaggtgcccggcatttgaagacacccaggtcatcccacacaggacgatgcatgtcgtgatttctaagtcttccttttgggcatcctaaggccaaaccgatcctttaaagactctggtggcatgcagtggtgggttcacacgccactgagatagacsgaccctgacaggccgtggggcctgctttccatgcggggcctttggagatgacaggaacagtggtccccaggcaccctggccactccctcagctaagctgagtcttcctttcactgttctggatgttagaattcagcaaacgcttcttttttttktratmwttctgttgctgagaaataaaacaaaaagctttaaaaactggtgggctccttctccaggcccctttctttctgagggtccatcccccatgagccacattgtcagtgccagcccagtggttcacctgccaacaagggcagtgtcctgaggacattcaggaaactctggaatcacacaagctgaattcatgaacttacacgaaggtttgctgaggataagattgagctattgggctgggcgcggtggctcacgcctgtaatcccagcactttgggaggccgaggcaggcagatcaccaggtcaggagattgagaccatcctggctaacacggtgaaaccccatctctactaaaaatgcaaaaagaaattagccaagcatggtagcgggcgcctgtagtcccaattactcgggaggctgaggcaggagcatggcgtgaacccgggaggcagagcttgcagtgagctgagatcgccactgcactccagcctgggcaacagaaagaatgagactccgtctcaaaaaaaaaaaaaattgagatattgttgtttctctagaactgagccaagagctgtccttgccttgtgcatggtattttccaggtggtttggacccactaataygaggccttcttgcaagaccagccaaactgcaggtgcaggatcagctgatgaacgaggagctgacggaaaggctctttgtgctgtccaattccagcaccttggatctggcgtccatcaacctgcagaggggccgggaccacgggctgccaggtctgccagttccttcccttgcacacctcatgcagctgctgcgggatttgccgagctagcaacctgctgctagagagactgatttagaggaaaacaatcacaaatctgaggccttctaagcaacggctcttaaagggctccagttcattcagctaaagtggccacttccagcttttcttagagatagaaatggcacgaagagggtggttctgaacctcccaggaacgtatgagctgggaccttgagaaacagccgcttctagtagagggaggagggagtgcgcgggcagacaatggcaggtctgtrtctggtatcccgggaagctcctgggatggctagagtgcccccctccccttctcctccccaccacaaggtcccagagcctgcaaagatcattccgtcacatcaggactgctgttaactaactggtccaagctggcccctggcaggagtggctgctcctctcaggccagcagccccctgtgctccccacaccccacccggctcctgcctttcccaggccccacccggcagcctcctccctgacctgcccagtttccaactccctgacctcaggcccacctcagccttccctcctctgggctcctaggtggttcggttgtctggtcaacctgcagcacctgtctaggcccgatcccctgacacctcctattctgtgtgcagctctgttctctccacgtaccctgggagcttgggaggtgccctcctgttgtgtgtgggtgacatgtgagatggacagtgctggcaagtcctgccctgccccgtccctgggccttcctctgtcccctggcccttcccccatccctgtcttcctcaccagtggcatctggaagggctgggatcagcagccacacaggctgtgaatatctggggactaaatgtgagttgggaggatgcagaaggggcccctatgtgtgtcaggataacgcacactgtccccctcactccctgcacccaaacacagctgctttcttgttgccagagctcagggagcacagcctacacatgccttcacatgcccggcacatacccagcacacacccgcacatgcccggcacatgcccagcacatacctgcacatgcctgcacacacctacacatgaccagcacatgcccacacatgaccagcacatgcccagcacatacccagcacacacctgcacacgcctgcacatacccatcacatgcccagcacatgcccagcacacgcctgcacatgcccagcacatgcctagcacatacccagcacacacccacacatgcccagcacacacccacacatgcccagcacacacccacacatgcccagcacacaccttgcctctggctgggaccccctttgctgctggccctgctcaggccccacagcttgatctcctcatgttcccactgctgacttccccaagctaactgtgccacagagtgggggaccccctcccggctctcacaacccccaccttcctctgcttcacttttcaccaactgaaatatggccaaaggcaaaaacccatgttcccactggcctgtgggtccccccatagatcgtaagcccaggaggaagggctgtgtttcagggctgtgatcactagcacccagaaccgtcgactggcacagaacaggcacttagggaaccctcactgaatgaatgaatgaatgaatgaatgaatgaatgtttgggcaaataaacgctgacaaggacagaagggcctagcgggaagggaacaggagtaagaccagcgcacagcccgacttgtgttcagaagacctgggattggacctgaggagttcaattttggatgaatctcttaattaacctgtggggttcccagttcctcccctgagcgcccaggacagtagagtcaacctcacgtttgagcgttggggacgcaaacacgagagtgcttggtgtgagcacacaggaggagtcacgacagagcagtgtaagagccgccacgtgggtcccacacagggggagtcacgacacagcagtgtaagagccgccacgwgggtcccacacagggggagtcrcgacacagcagtgtaagagccgccacgagggtcccacacagggggagtcacgacacagcagtgtaagagctgccacgtgggtcccacacagggggagtcacgacacagcagtgtaagagccgccacgagggtcccacacagggggagtcacgacacagcagtgtaagagcygccacgtgggtcccacacagggggagtcacgacacagcagtgtaagagccgccacgagggtcccacacagggggagtcacgacacagcagtgtaagagccgccacgagggtcccacacagggggagtcacgacacagcagtgtaagagctgccacacatgggtccctgcggcctgcagttcgaagcccactgcatgtgttagcactctataccccagccaccgtagaaggccggactgcgatcactttctaaaagatggatcgagagactgaagcacagacagtttaggcaacttccccaggtctgaattccagcaactggaggcatcgatgcaccagaaaggccacaaacctggcagaggcttcattagatctgatcagttcgatctgaggataaatcagataaaagagaaacgctcatgtctcagcaagctgagctgtgatgatgatttccactacgccctgaaatcttttgttgtactttacggggaatataaaatgtacaaccttccccaaaacacttttttgctgctgggcacagtggctcacgcctgtaatccctgcactttgggaggccgaggcgggcagatcacgagttcaggagttcaagaccagcctggccagatggtgaaaccctgtctctactaaaaatataaaaaatcagctgggcgtggtggcagacacctgtaatcccagctacttgagaggctgaggcaggagaattgcttgaacccaggaggcagaagttgcagtgagctgagatcatgcctctgcactccagcctgggtgacagagcgagactcagtcaaaaaaaaaaccaaaaaaacacttttttttgcattcccgtttctgcagtgtctcccacaggcagggacatctaaagtgatgttctttcttcccagctctgcggcctctgaagctgtgatgagcttcagcctccatgtctttacctcctgcmcaggccttgcatattttccctctagagttggaaaaagatgcaaatgtgtttcctcttagagcaataagaaaggaaattacccttctaacttcgttgttttttctttttgaaattaagatttccatctctcacaggtattagaaatgttttaattattttggactacttaaaacagtttgacaatggtctaaattgactatacagaaactttctctcctcatttgagaactttaatttgctcattattttggtttctcactagtctgaaaataactgcattcttttagtaaatatttaatgaaataactgctgtgtcccccaagccctgtggcaagcaatgggcgtctgttttctatataaaccaagtgtctacaggttacctattcctggagctgagaaatttgtggggtatgtttgggatggtctaggctacagtagattgggtgataaagatgaaattttgttggaggtgctgagatggagagacacagagcctcttgacggggcaaagcacttcccggtggctttgatgagagggctgggatggcccatctggagacagaaaacgagagtggtttctgcagatcacagggcggcagagcccactgtggacagcaggagtcaggctgaggcagcgcagcttctcacgggggctcgggggaacccttgccagatgtggaagcaccagggctacggggccagccaaggcrggtgactctaggagcacaagagtcagacacacacttgttcctcctgagggtgaaccagggagccacctgctaagaaatggactcaatggcacctgacagcagttttctaaaagctcaggattttttttgttttttgtttttttgagacgaagtctcactcttgtcacccaggctggagagcaatggggtgatctcggctcacggcaacctccgtctcccaggttcaagcaattctcctgccccagcctcccgagtagctgggataacaggcacccgccatcacgcccagctaatttttgtatttttagtagagatggagtttcaccatgttggccaggctggtcttaaactcctgacctcaggcaatccgcccgcctcggcctccaaaagtgctgggattacaggcatgagccaccgcacctggcctctagaagcgcagattttgaatctcactcatgccttcctctttcactttgtccattcttccaatccctcttcttccaagttgttcccacccctttgctccatgagtctgtttaccacatgggcatccccttcccagaccaactggaggatgcctggctatttctcccagttctgtttggtctaaacatgagacaccaagaggcccaaccttctgtcccatgaaagcctcactgtccctggggggaaccagcccagtgctcacatgttgctgtgcgtgtgcttgtccaggacttctgctgggagcctgtggtgggcagggcgctgagagtagaaccagacagtcttagctaaagcaccacacagggcgggtggatgagtagagacagtagcagaggccctgggcggcgctctgatcagaacccgtgggagtgagggtcgcccatccttgaggagggagcacttctggaggaggtgacagctgaaccaagaggagtggatgagggacgaaggcagatgtgaggagtggggcacagggaggggcacgagtgtcaggcaaaggcgcagccacagagtcagaccatggacgggggcctgggcagggagcagctgaggcgtgggtcagtgagcaggaggaggagtgagaagagaggccagggattcaccagggctcccaggaagaaaagatctccagtcttcaatatggagatgagtggccagacagataaagatatttgtgtgtgtgtgtgtgagtgggtgggggggggggtgctggcttctgtgtgtgctcctgatgtcattgtgggaggcaaactctgaagaggatgcagagctgtgtcagttgccctgtagaggcaagaactaagtgcaggctgggcaataacaggaatgcacttagatgtcayggactcagcattcttgctgtctccagctcctttatgaacaaacctgcaaaaagagctctggcgtccgagctggaacattctagcctggcaaactgccgggcagtgtcacagggtgggacaggactctgcccggcatctgagctggaatatcctagcctggcaaactgctgggcagtgtcacagggtgggacaggactctgcccggcatccgagctggaatatcctagcctggcaaactgccgggcagtgtcacagggtgggacaggactctgccgggcgtcggagctggaatatcctagcctggcaaactgccaggcagtgtcacagggtgggacaggactctgccctgctgcgcttccagtctcggggaccatggcatgagtgagatgggctgaacaaaagttcagttctgtgagagaaaccctgcagcctctcccctgtgcaggttacaatgagtggagggagttctgcggcctgcctcgcctggagwcccccgctgacctgagcacagccatcgccagcaggagcrtggccgacaagatcctggacttgtacaagcatcctgacaacatcgatgtctggctgggaggcttagctgaaaacttcctccccagggctcrgacagggcccctgtttgcctgtctcattgggaagcagatgaaggctctgygggayggtgactggtacgttcctatccagagcrtcttccttcacgttctgcrcagaggcaggtggtctgcgttggttctgaagccagccagacctgcattcamattccggctccaccattcaactcttacgtaagcctggtcasgttgtttctcccacccacagcttctttaacctagaacagtgtttttataacaatgaagcaactasgaagcacgtagcacttagaatgggagctagcactgatttttcctagatccaaccacacgagcaagcaggcacctaactaaacaaattgtgacacaatcgtgacagcccggagactgcatcccatcccycacgtcccatgacaaygcccgggaaagcgcagaggtggacagtgactcaggcgcagacacaggccatgcccggtgctcatggatgcctctaggctggacaggacttcccggccccccagaccccacctacagatagcagatggttgccggtagcagaaagctgaggtcccgctttgcctgcctcatgcatgtctgctccctcctcaagttcaacctagaatttggaggtttgtactggagggagtcagaggcagatcctgttcccatctgactctgagtgcatgccccccgtagaagcaggtgcgcaggataccagtgttaggattttggaacaacacagacaaaagcaataggaaaatgttttcttttgcttttamatacatccctacctatccaattctctctctatttttggtagtcactgtgccgaggtcagatttttgttgtaaaggatctgtgttcttcccagagagtgcacctgccacacgctggggctcctgtcctttccccagtgtgacttttatctctaatttctgagatgcagcctttcaaagagctacgaacacctgggtagaaatcaccaggagaacttgtctcccttatagctgtgtcttcagcaaacgtgcggtttggaattctctgggacatgggaagccactcgctcagaagggggaagatttcaccagcttgccccatacgtgtgtctcccatgcgtgttttatgccacctgtggctgaagcgccatctgaaatcagtgcagaggcagctggcaggttcctagggtggtgcccccaatttctcatcctatgtatttatgaccacatatctccccaatgcaaaaatgggatcaattaacttacgtatagtggggcctctttttcatgttctaagaggaattcatccctgtgatgggaagcagaagagttttacgtggcaggggagatgcacatgggagatgcatgctttacggcattcaggccaggagctattggggctttggcaactattttcatattttgagaggaaagtggracttcatttcttcacattgcaattttyctgattaatcatggcctggaggaagaagctgaaggtagagagactgtgcagggcacgttgacttcagaataggagcaccctctaaaatagctggatttgctgtcatcattcttgtttttaacacagcaatacaccccagataacagcaatgcagcaaaatagatgctcatagtcaacaagcaaagtggctctgagcccctcttctgaggccgctcgttcagacagccaggtgcacgctgtgctgcccctccacatctccttcgggtcctcagtacctgcacctgagtggtcccgggtgctcaggggtctgggcagacgccacagggtctccttcaggtcctcagtgcctgcacctgagtggtcccgggtgctgggggtctgggcagacgccacagggtctccttcaggtcctcagcgcctgcacctgtgtggccccgggtgctgggggtctgggcagacgccgcaggagaggctggcagcacacagctgtgggcagctggtcytgagtgcctgccctgggggttctccatgcantgtgaccttactcactgtctccttctctggaggttttggtgggagaacagccacgtcttcacggatgcacagaggcgtgagctggagaagcactccctgtctygggtcatctgtgacaacactggcctcaccagggtgcccrtggatgccttccaagtcggcaaattcccygaagactttgagtcttgtgacagcatcmctggcatgaacctggaggcctggagggaaacctttcctcaaggtgamgttcggtctcytctcacaccacsttacagcacgtgcatctcatcaaacaaagcttatcttccccaggagctgattttaacttttcactgtttagaaaatagtgtcaacgccctgccttacaccctcagggcagctcctggggcggggcggggcggggcggggcccttctctagtgagaaaggaactggaggcctagagaaagggagcccgcggggcccgatctgggaagaggccgtgtgtgctgcgtgggtgctcagtgagtgaccacagcagggctccccggccctggcaccagcccctccagggcacaagcgcacccgtgacagggacgttggtgtgtggttttcttttctcgtagtttgactacatgtcaacctgtccacatttcatagacgacaagtgtggcttcccagagagcgtggagaatggggactttgtgcactgtgaggagtctgggaggcgygtgctggtgtattcctgccggcacrggtatgagctccaaggccgggagcagctcacttgcacccaggaaggatgggatttccagcctcccctctgcaaaggtcagtcctttcttcaatgacaattacaaaacatctgaatgtttccgatataagttaayaatgcaatgtcattgaaaatttcttcgccaaaaggtgcttctgaaactgttatcttcccaggagcaatytggggatagaaagcaagggctctccccttggctggccatgttcccagctggcctttttctaggtagtgaggcctcaggacaggcacgtggaatcgtgaccaatggggtcaccggtgagggaagagagaggggagtccgtgagttccaggcaaagttgtggtgaactcgcaggggcgctttctcaaagggaacacagcagcaaacgtctccactccaggaacccatagagtaaggctcgcctccacctccacctcctacaggtggctgattcccaagcccatgcctggtcctcctccagccactgggttccactcccagcctcccgcatgtttaggtgtggacaagtgtggcttcctggcggtaatttgagagcaggatggggaggcacctttcaggccgcaaggcaagacagccgtgggccacttccacctgctcctcccatgtgctggcttgagcgggtgtcagcccagggcacctgggagcaggtgtgctggacaacagagcctcccggggggagagccgtgtactggggttcctctgcggggaacagcagaatgagagtccccatctgactgttctgaggcagagccctctgggtgcgactcctgaggctggggcttcctgtcagagcagcttgcgtcctccaactacttcagaactgccctgccacaaaacctggaccgctggttctggtctcatgggacagtggcgtcagggcaggcaggagcaggaatggctgctgttctgggaggaaggctgctcagatgacactcaccagcaatctttagaaggccaaccagctgccttcagggactgcattttaggagaggaaagttggcatcagactcacagtctcctgtgagctacgtgctatgagctgcacttacctagaccgcagaagaaagagatggtctcgtgcaagaatctggctggtttgcaagcagaaatacaagcaaagtccacagttttcagttttctcagagttttcagaagatgaaagagtcctggagccagtgctttgggagacccaggtgagagaatcctctgaggccaggagttcaagaccagcctgagaaaaatagtgaaaccccatctaccaaaaaaaaaaaaaaaaaaaaagtggctgggagggggatggtgtgataagttgcacaaggtcagtgtgctcaatgccagtgaactgtacatttaaaaatggcagaggtggtaaagtttacattatgtataattcagcacaataacaaaatttccatttcaattttgaaagtccaaaatgtttctccttgaagggttgcagtggtcaactgcttccagaccctcagtcataaagggagaggctgagaccctgtgtgcaccagagacccaccaggactcagtgctgtggcaggggtcaggtaggggtgcggctcccgccaagtctgtggtctcaggtgccctcccgggagccaccttcccattagaagaggagagaagggatgaggagaggaagaaacaaagctggcctggggaacggtgcctcggaaataactttcaaactcactaacggcacaaggagctgcctgggcatggatagggcagaggcctgctacataggtgagggggtgtcatcactggaaaccagcagcctgggctggaaaccctctgtttaaactgttaattgcacaatgccagatttgcagacgtgctcccctgctgcattttgggattggtcatgaatgacagtgtacaaggagatcacccagagattacagtgccccasagaacagcagaccaggatgtttctcccagagaactttccagaagcctcggtgatagaaacacaactactctgtcgggtgatgacatctgtgtaaactcgtggttgctgttaacactattgcatgactcctgaccataggctctgccactgacmcttcagtgacaaaagggtcacgaatcgcaaggttttcctgttcccttggcttagagactgcacaaacttgaaacggccacttcacycacgattcctggttttccgtgttggcattacagttaaggaattgatggcaggtgcttcagggtatagcatgttgcgtgttctacgttaacaagycttcctatggtgcacttcactgtacacctgcgtctctccttgcccaaatacccagacgtttcacgtgtccattttagcttcattttaagtatgaatgaccccaaagtgctactcacaggcatcttcaaggtgcaaataaaagatgggtgagaccttagagtggatcaggaagggagactgctggagtcctacaacctgcctgtgtggagctgccccctgtgcgcgtgccctctgaccttccgcctgccctctgaccttccacctgccctctgaccttccgcctgggacgttgctcatctgtctcctaagtgaggaatgctccttcagcctcctgtagaccatcctatgccatcaaaatcactcttctgttcttgaaattttttcatttatcttccttgatttttagtccaacaattaacagctgtctgaagttaagatccattgtaagaaggactatttctgaaccagtctgggtgctccccagggtgcaggggcctgtctcggcatggtgcgtgcacagcagccagtgctcctggtgggctccctggctgcagcaacatcaccaaggagcttatcacacctgcggcgtctggggccaccacaatccctgagtcagggctgcagcaacaacatcaccaaggagcttatyacacctgtggtgtctggggcaccacaatccctgcgtcagaatccacactcttcacaagaccccatgagactgtgtatatgaaggtctgagacacccatcggccaaccctaactcatcctgtcttctctctctagttcactaacttgggcccaacttcatgttctcctgccacagacatttccgtagccatttaatctgtctcccaaattgctgagcctctgtgtgcctccacggtttcaaatgtgaaatgaggacaggaataaggcattgatttaaattagttataaatgcacagtacaaagagcggggtgcaggcctgttgatattaacactgtgagtgctcaggagccgtgttctgaatgctgggacagccacacccagaacaattacactacacagttagcagggcgtctgttgacttggaagagtgttggtgacatgtcactcaataagcatgtaagctacacagcaatgtgtacattgggaatctgttcgggttttttttaaagcagtgggccacaggcacacacatcactttgatgagtgtcctcccgaatgtgaggggagcgctaggctctgctccagaacctgttaatactggagacctcggcagcctgagatggggacaggtaggagagattgctaaccttcatcaatacaactcttttttttgtttgttttatcatatctgtaattaaaatatatcttagagataaatgacaaaactccaaaatctggtacaaatgcgtgtgcacagatatttttactacagctgttccctgcactagaagtttcaaaatcgagaatcacaagggaaaaaactcaagtataacagacaggaaactttacgtttatggtaaattgataagaatataagcactcaaggagatcctcagtgaaacctcatcaacacatctgcggctacagaaaggaaggctacgggcttaactgaatatttgatacagaaaaacaaatagtattcgctgctctcttctctattcaaattctacttattcactcaaactcattcacataaaaacttgatattaaggccgggcgtggtggtttatgcctgtaatcccagcactttgggaggccgaggcaggtggatcatgaagtcaggagttcaacaccagcctggccaagatggtgaaaccccgtctctactaaaaatacaaagaagaaaaattagccgggcatggtggtaggcgcctgtaatcccagctacccaggaggctgaggcaagagaattgcttgaacccgggagatggaggtttcagtgagccgagattgcaccactgcactccagcctgggcaacagagtgagactccctctcaaaaaaaaaaaaaaaaactggcaaatgcattgcagtgagtctcctctgagtgcctggatgctgcaaatttcaaatagataaaaagctgtgagtcagtggctttttccatgagttattgtcaggaggttatgcagtaaacgaatatacataaatgctttgtgcatattatggaaaatacagttcgcaaccagtactaatttacttagagaaatggaaacatctgtgcactcactgcatgtggagactggacaccacagccatctgcgcactcactgcgcgtggagatgtgtggacaccacggccactcttcttgaaactcaaggcgaagcagtcrgagagcagagcctcggcctccatgcaggtcaccctggtatctggggacactgcggctgaggctggtttcctcctctgtcgggagcgctgctcttcagacaaggccgatttgtccccctccttcctgtccatcctgggaaggagacctacacagcgctggcccctgactcggccttctgcttagaagaaactgaccgtgggtggagcgttgtgggccaaactgtgcccccaaaaagctatgctcaagttctagccccgtgtacctctgcatgtggcctgatgaagaagcaaggcctttgcaggtgccgtcgagttaaagtgaggctgtcgggtgcatcctgctccaatgtgcagtgccctcataggaagcagagacaagacacagacgggaccctgtgaagacccaggatggaaataaagcttctgccaggcatgggccccccaggacccaccaggagccagggcatgcaggaaggacgccccccgactcccgagagcctgctgaaggagcaccacccggccgacaccctgatttcagacctgtgacctctagaactcttggaggatgcatttctgttgcttggagccatccactttgtgatgatttttcccagcagccacagggaactcataaggatgagtctgaactgcagggatggggtgaggagagggggcagaagctgctccaagggaactccccgagagggatgcagggatgtgttggcagctgccattcccattctgaggaccccattgcacatcccaggggatggagagaaaatgggcttgtagcgttcatgggtgatgactttgatttttcacacgatcatgatggaaacactccctaccccagaggcggctgcagatgccttcacacagctctggtgctccacagctctgcataacgggatgcaggaggggctggttccaggggcagctttagccaagaaagaccttctaggtttaacagccttgacatggttacctgtacatgaaacactttaatagctgctgctagatagagacaattaacagccgatagtcaatagctccaatcccttgaaayttcttgacccttttcttatacttctttttatttttttgagacagagtctcactcygtcacccaggctggagtgcagtgccgcaatctctgctcactgcaacctccgcttcctgagctcaagtgattctcctgcctcagcctcctgagtagctgggattacaggcacccaccactgcacccagctcatttttgtatttttagtggagatgggatttcaccatgttggccaggctgggctcaaactcctgacctcaggtgatctacccacctcagcctcccaaagtgctgggattacaggcatgagccaccggacccgacttcttatactcttatagaatggttgtcattatcaataatggcattattaaagaccgtactgtttagaaagcctgagatatccctgacaccctgctagttgtcataagcatcgtctttgattccacgcccatttttcacagctgacataatgatacccattctgtaactgagaaaaccagcatgggccaagcctcccccggggttaggagtgggcagtcccatccaatgcagcccctcaccctggggagcaggtggccagccgaccaccccagctggccttcgaggcctcacgggtctccggcactgggtcgcctgagcactgcccaggttcgcacattctcatcgtcctggggtggccgagtcggggaccaagaccctgtggcctatgtggaccccggctcctccactcagcrgtgagactggggagggtccctccacctctcccagtgctttygctctgtctagggrtgtcgtcagcaccagggccccaggagtgcagggaggttgctgcctccagcctggccctcggcggaggctgcacccaggccagctctgttccctccagacagagcagctcctggaagagctcgtgttccccacactgacagcacctgctccatttagagaatgcgcactgggcatgtagagaagacctgtgacacgctacagcttcttttctaaaactggccagaaaaggaacattatttgaacaaaatgtacagcaggttatctggaaacatacgcctaggggatgagatactaggttgtaggattcttgtgcagggggagcaggagcaggaggggaccccacatcctcactggcggtggcaggtggccccagtccttgctctcagaggacctgccggccagctgggagcatctgcctgggcgaagcagaccctgccccaccctcaccctggccccttcctgcccccgtgtcctgcacttggccaaattccacattcccaggcagaccctgatttcctccaggaagtctcctgtgactcgggcctgagtgagccccagtgtgtggactccctgcaggctcagagcccgtggccagcgcacatctgtctgctcctcatcaccttttcggatgtgccgggagcagggggcggccggttccccctagaccaggtgggatggcaggcaaagggctgacctccccagagagaagcacctcccagaacgggggtcgctcgcgggagatgggggtgcagccgcttcctctcacgtgtgtggccttgtgtgtctggcagatgtgaacgagtgtgcagacggtgcccaccccccctgccacgcctctgcgaggtgcagaaacaccaaaggcggcttccagtgtctctgcgcggacccctacgagttaggagacgatgggagaacctgcgtaggtgaggctgttcccctctctctctgtccgtccatttgcgagtttttgtaaaatgaagaaaagtgtgttcaagttaggcaactgtcaatcaccatcttgattgggaagggcggagatgaataagacaccaagcccacggtgcccgaggggcgtctgcgctgtgctgggggcagaggatgcacttcgtgtgcctgctgtctgcagagaccctcgaagcacactgaggctggggacggcagccagaatgcattgccagacaaggcccacaggtgtatacccagcctagatcacaccccagacaaaaaacctatgaaacaggcaggattcattacagacccatccatcacctctcctcctcctgggacccctccaaatgcayccgactgcaccctgaccagggccagcagcacagctgcctgcctgttctcccacctccacctccggatgtccccgcccggcatggggcctgggtgctcaacatctgcctcggatggccttgtccagtcccccagctctgcactcagctcagggacagcgtcttcctcaccgctgcctccaagccaggtgccagctacgcccaaacttttgacgaatttactcccctgaaaattgtggctcttaggtaagcactatctttaatcttcattttatagaagaggatactagtgataagagagggcgagagacgctcctggtcacacagccactccgtagctggccgggaatttgtgttaatagtctggcttccagctcttatagaaaaataattatttaccagactcaagttacagacagacttcctttgagctactgtcataggggagagaggtctccrgaaagaaccaagtgcaaggctcaaatgcagcaaaggtagctgggacgtccagccagggcggagaggggtcagtgcaaaacgcttcatgactcaactgcattgaggagcttctgctaaactggaataataggattcttgctgaaactcagctcctcagcgaagggcacaagggccagggtcaaggccagttatcaagcaagtgagtctgaaaagagatggccaggacgcggctgcccggggccttcagaggctggggaggctctttctggggctctcaagctacatccgcttgactggcacgtcccccactcctgtgtcaggcatacacccccttcctgtgtcaggcgcaccccctcctgtgtcaggcgcaccccactatcctatatcaggcacatcccactctcctgagtcaggcacaccccaccagcttgtgtcaggcacacacccccacccccgtgtcaggcacaccccaccagcctgtgtcaggcacactgccccatcctgtgtcacgcacaccctcccacccccatgtcaggtgcacccctcttcctgtgtcaggcgcatcccccccaccccgtgtcaggcacacccccaccaccatcctgtgtcaagcacaacccccctcctgtgtcaggtacagcccccaacccccatgtcaggcacacccccactccttttgttgttgttgttgtttgtttttatttcttctaaaaaaaaagtgataaatgatgtgaagaacatgcaggtttgttacataggtatacgtgtgccatggtggtttgctgcacctattgacccatcctgtaagttcctcccctcatcctccacccctcaacaggccccagtgtgtgctgttctcctttctgtgtccatgcaaaggaaccatttgtttacttaggggttgcggagaaattcttgtggctttctttttggcagtttttttttttttagttttattattattatactttaagttttagggtacatgtgcacaacgtgcaggtttgttacatatgtatacatgtgccatgttggtgtgctgcacccattaactcgtcatttaacatttggtatatctcctaatttaacatttggtatatctcctaatgctatccttcccccctcccccaaccccacaacaggccctggtgtgtgatgttccccttcctgtgtccatgtgttctcattgttcaattctcacctatgagtgagaacatgcggtgtttggttttttgtccttgggatagtttgctgagaatgatggtttccagtttcatccatgtccctacaaaggacatgaactcatcatttatggctgcatagtattctatggtatatatgtgccacattttcttaatccagtctatcattgttggacatttgggttggttccaagtctttgctattgtgaatagtgctgcaataaacatatgtgtgcatgtgtctttatagcagcatgatttatagtcctttgggtgtatacccagtaatgggattgctgggtcaaatggtatttctagttctagatccctgaggaatcgccacactgccttccacaatggttgaactagtttacagtcccaccaacagtgtaaaagtgttcctatttcttcacatcctctccagcacctgttgtttcctgactttttaatgattgtcattccaactggtgtgagatggtatctcattgtggttttgatttgcatttctctgatggccagtgatggtgagcattttttcatgtgttttttggctgcataaatgtcttcttttgagaagtgtctgttcatatccttcacccgctttttgatggggttgtttgtttttttcttgtaaatttgtttgagttcattgtagattctggatattagccctttgtcaaatgagtaggttgcaaaaattttctcccattctgtaggttgcctgttcagtctgatagtagtttcttttgctgtgcagaagctctttagtttaattagatcccatttgtcaattttggcttttgttgccattgcttttggtgttttagacatgaagtccttgcccatgcctatgtcctgaatggtattgcctaggttttcttctagggtttttatggttttaggtctaacatgtaagtctttaatccatcttgaattaatttttgtataaggtgtaaggaagggatccagtttcagctttctacatatggctagccagttttcccagcaccatttattaaatagggaatcatttccccattgttgtttttgtcaggtttgtcaaagatcagatagttgtagatatgtggcattattactgagggctctgttctgttccattggtctatatctctgttttggtaccagtaccatgctsttttggttactgtagccttgtagtatagtttgaagtcaggtagtgtggtgcctcccactttgttcttttggcttaggattgacttggcaatgtgggctcttttttggttccatatgaactttaaagtagttttttccaattctgtgaagaaagtcattggtagcttgatggggatggcattgaatctataaattaccttgggcagtatggtcattttcaccatattgattcttcctacccatgagcatggaatgttcttccatttgtttgtatcctcttttatttcattgagcagtggtttgtagttctccttcaagaggtccttcacatcccttgtaagttggattcctaggtattttattctctttgaagcaattgtgaatgggagttcactcatgatttggctctctgtttgtctgttattggtgtataagaatgcttgtgatttttgtacattgattttgtatcctgagactttgctgaagttgcttatcagcttaaggagattttgggctgagatgatggggttttctagatatacaatcatgtcatctgcaaacagggacaatttgacttcctcttttcctaattgaataccctttatttctttctcctgcctgattgccctggccagaacttccaacactatgttgaataggagtggtgagagaaggcatccctgttttgtgccagttttcaaagggaatgcttccagtttttgcccattcagtatgatgttggctgtgggtttgtcatagatagctcttattattttgagatacttcccatcaatacctaatttattgagagtttttagcatgaagggttgttgaattttgtcaaaggccttttctgcatctattgagataatcatgtggtttttgtctttgattctgtttatatgctggattacatttatcgatttgcgtatgttgaaccagccttgcatcccagggatgaagcccacttgatcatggtggataagctttttcatttgctgctggattcggtttgccagtattttattgaggatttttgcatcaatgttcatcaaggatattggtctaaaattctcttttttggttgtgtctctgcccggctttggtatcaggtatgatgctggcctcataaaatgagttagggaggattcccgctttttgtattgattggaatagtttcagaaggaatggtaccagctcctccttgtacctctggtagaattcggctgtgaatccatctggtcctggactttttttggttggtaagctattgattattgcctcaatttcagagcctgttattggtctattcagagattcaacttcttcctggtttagtcttgggaagaagtatgtgtcgaggaatttatccatttcttctagattttctagtttatttgcgtagaggtgtttatagtattctctgatggtagtttgtatttctttgggatcagtggtgatatcccctttatcattttttgttgcgtctatttgattcttctctcttttcttctttattagtcttgctagcggtctatcaattttgttgatcttttcaaaaaaccagctcctggattcattaattttttgaagggttttatgtatctctatttccttcagttctgctctgatcttcgttatttcttgccttctgctagcttttgaatgtgtttgctcttgcttttctagttcttttaattgtgatgttaggatgtcaattttagatctttcctgctttctcttgtgggcatttagtgctataaatttccctctacacactgctttgaatgtgtcccagagattgtggtatgttgtgtctttgttctcgttcgtttcaaagaacatctttatttctgccttcattttgttatgtatccagtagtcattcaggagcaggttgttcagtttccatgtagttgagcggttttgagtgagtttctgaatcctgagttctagtttgattgcactgtggtcggagagacggtttgttatttctgttcttttacatctgctgaggagaggcacacccccactcctgtgtcaggcacacccgccctcttctttcagggacaccacaccctcttgtatcgggcacaggataccctcttctttcagggacagcacagcctcttgtttcagggacaccacaccctcttgtttcagggacaccacatcctcctgtttcaggcacaggataccctcttgtttgagggacaccccaccctcttgtttctgggaaaccacaacctcttgtttcaggcacaggataccctcttgtttcagggacaccccaccctcttctttcggggataccccatcctcttgtttcaggcacaggataccctcctgtgtcaggcacaccccaccctcttctttcaggcacaccccaccctcttgtttagggcaaaccacactctctggtttcaggcacaccccccttcttctgtcaggcacagcccaccctcttgtttcagggacaccccacccccttctttcagggacaccctacccttttgtttcagggacaccgcacctcttatttcaggaacaggacaccctcttgtttcaggcacacacaccctcttgcttcaggcacaccccactctcttgtttctgggaaaccacaccctcttgtttcagggacaccccaccctgttgtttcaggcacaccccccctcttctttcaggcacaggataccctctcgtttcagggacaccacaccctcttgtttcaggtgtcctctctctgcacagcatttccccctcacactcattgttttatcagcctctggttttattcatgttttttctccatatgaaatagtatcctctcttcctttcaaaccagagcactctcaatcatggaaaattagaaacagcagctcttgcattcagatttttaaataaaatgtttaaatcaatggttcagatgtgaattgcaaaggtagccaggtagcgaagctgccacattcacagagaggagctcagctgctttccgcattattattacaaacctaagaaagcggattcagaaccctgctcaggtgaaggcagtggggcatttacgtcaagactgcagttttgctggactacagcccagaagcacttgctgtatttttgataatatctaaccctgtcagatggctccatggggccccaggaaacacttctactgctgtactccagctgaagccaccaccctccatccctcccaatgttttcttctggactcacccacagaaagaaggagaaaggagtcccagtggaggtcaggaacagccctgggagagcacccagagatgaattcgtgcctaagagggctcacccactacgtctcttcctcctcccggagagcacccaaagatgtgttggtgcctaagagaacttgcccactacctctcttcctcctgggccccctttgaatgcctgcaccgtgaccggggccaggagcacatgagcctaagaccattctgtgcaccagggcccatgtctgagagattaatacacaggtgcccagggcttctcctgtctccgtggtgatttacagacttagatttagatacagatattgattatggatagagacagtttagatataggcacagatgcagatatatagatatagatataaatttacatataggtataaaagaatagatttagatttcggtacaactctccctatataagtttagacgtagatacacatatagattcaggcatcgatataaaagaatagatttagatttcggtacagctctccctacataagtttagatgtagatacacatatagattcaggcgctgatataattatagagggagctctgcttttgcagtgttttgttcctaacgttgcggttaaaggaactgtattcatttcctgggggtgccacagcacagccctgcagactgggggtgccacagcacagccctgcagactgggggtgccacagcaaagccctgcagactgggggtgccacagcrcagccctgcagactgggggtgccacagcrcagccctgcagactgggggtgccacagcgcagccctgcagactgggggtgccacagcrcagccctgcagactgggggtgccacagcgcagccctgcagactgggggtgccacagcgcagccctgcagactgggggtgccacagcgcagccctgcagactgggggtgccacagcrmagccctgcagactgggggtgccacagcgcagccctgcagactgggggtgccacagcrcagccctgcagactgggcacttgaacaagagatttctctctcagcaagtcctggaggctggagtccaagatcaaggggagggcacggttggctccccctgaggactcaccccttggctgcagataccaccttctccccatgtcctcccagrgcagtccctctgtgtgtccatggcctcatctcctcatctcataaggacatagctgccttgggccacggcccacagtgacatccccatgccactgcaattacctcctcaaatgctccatccccaaatcagccacattctgaggcccagggtgttggggattcagcatgagaatctgggagacccggttcagcccacgacagccaattggtccatagtgccatcttttaatcttcagaataaaactttagaagaagtgtatacaacaggagcatgagttgcataaactaatttccaatattttgtttcaaacgtcttgttttagtttttgtcctgagaacaattacaacatacatttatctatttcctgcatcttttttttttttgagacggagtctcgctctgtcgcctagactggagtgcagtggcgcgatctcagcccactgcaagctccacctcccgggttcacgccattctcctgcctcagcctcccgagtagctgggactacaggcrcccgccaccacgcccggctaatttttgtttttgtatttttagtagagacggggtttcaccatgttagccaggatgtatttcctacatcttaaggactcttttctataaacgctgaagccaaatgtgtctctagagttgagacgttccctcccagtgctacctctttgctaaggaatcctcctgcctggacactgtccatctgcctctccagatcctgcccccgccaagggcgtccgagagagcccctgagcccggcccggaccagcgcccgtgctcagggcagctgtgcgctccgcgctgccttctggttctgtgtgatggatgtgatgcttgcatggtgctgtccctgccccgctccgcccctgctgggctcctggctgccgaacctgaagtcagggtccgccgcagaacacrtcttcccgctgagccctgcagcccctcaagcagctggctgcctccgaggagcttcctctccgacagctgccgtgtacctccctgacctccctggctgtgactcaggccctccggaggcactgggccaggccgccggtggagcctgatggtggacgatggtggacagtgaccttctccttctaaggaagggactgagggagggaaagtgcccccagagcatctcaggagctgggaggtgaacagctggggatgctggcttcagtgcttcccccaccaccagcacccttatgattatactgctgcccctgcaaaaaygaccatggaaaattaggatgctgggcatgacctttctgcatccctgacgcacaagcctaactgttgttgcacggaggccacacacgtccctgatgaaagagccctgctcccgtgcaagcagccgtcagtgccctctccgtacagatggcgcagccatcagtgccctctctgtacagacggagcaggccagcaggacccagcactgtccctggatgcaccagctctgtcactgctggctggaacacccaaaagggtgatggacatggctgtccctcagttttcagaatgacagcgtgaaacccaagcctgcctgcatgaggaagggtggacacagacagcagcagaggcctcggctgagtggacatgcgctcaggtgctgagggctgagagtgacccaggagcaacagctgagccatatttacagcccctcctacgagccctggctggaggccagaggttccagggaaggtgggcaccagggcccatgtctgagagattcataaacaggtgccacggcttctccttccgtcctcacagtgactcacagacaaggatgccaaggcctggaagatgaggcatggctgtgagaggagctcacactcccctggcctgcgagagctctggccccggccagcccgtgtgctgatcgtattagacggagtctccagagaaacaggagcaatcagagatgcagatgtatgtatagaaatagttatagattagagacatccatagagacacagtttgtagatgtagttacgtagatttagatatagatatcgatttaaatatggatatatgtagatatactatatatagatttacatagattgaacatagatatagataacaaatatgtagacatagatatagttatactgatttagatatagatactgattgtgggtatatatagttttaggtacagatgcagatataaaaatatagatataaatttacacataggtatagaatagatttaggtgtagctatacctatgtaagtttagatatagacacaatatagattttggtatagatgtaaatatagaggtagttacccatacatagacatagttttacatgtgcttctagctctatgtaccgatatgtgaaagcatctctattctgcagaattggtcatgaaattagagaggctgaggagtcccaggatctgctgtctgcaaactggagccccaggggagctggcggggyagttcyagtctgagggcaggtgaagctgcaatgagatgtcccagctcaagcagagagtcaggaaaagagaagtgaagccctttttcctccacttcctgctctactggggccctggaaggatgggacagggcccacccatgttggggagagccgtctgcttttctcagaccacagattccaatgctgatcccttccaggacccaactcaaaaacacagygggaataatgtctaatctgggcgcctgtgctccagtcaagcggacacataaaattaaccatcccagtcatgttattctgacctgaattctccaaaatcccagtgccctctgtctgcccagggcctgcccaaacccgatgccgtttctttccaaaggccctcgttggccttcacccagcctcagggactcccccttgcccagccccaccagaggggcacccacgcccacagcagagaactccagggctccccggggtggcactgaagaggtcggaaagccactccggcagcagccgtgacctttgtgatgcccccgtaggacatgcaggggcttcaggacctgtctcagctgggtatctcccagaagcacacagccttcaatctggttccaagcggatttactggctcttgaaattgaaaatgccaagaaacaaaaatttggagcaaagaataaaggaaagtttctgctgtgcggcatctggccttccccctgcccaggctcgtttcacacttttgggtaaacatggagctgcttacgtccctgctgtgggtctgccrtttgctggtgtgaggtgggcttcaatcagatgctcgccacggcccaggacgtggctcctcctctcactcaaggctctgatgtcagatgcctggctttgctggtttttgaagttccacaggtggcccctccagcccaagtttctcagaaccaaatccagccggaaatgtcaaacaccaattccagaatgaatttccacggctgccctgtcctgactgccctgacctggcctgtgcttacctggaattcccacccaggcctcgatcagctcagccttccccgcacccccagccccaggcacacaggcggagcccccacctctagcagccatgggggtgagagcgagtagcagcagatggaaacaagaacccagcctctttctggatgcaggaggagcggcatcccagggccagcaagcagctctgctccccatgggcttttagcaagaggctggtgtgctcaggttgccctgcagactcccctgcgtctgtgaaaggtggcaggaaggagatcctggaggcgggaggatggttagaggagcccaggaggaaaagtcatgaggtgcaaaggctaagaggacaggatcgttttggagaaacagtcaggatgcgcatttagggtttattcattcattcttgtatccaacaaatgcttgctgagtgtccaagacccatgcgaggaagacagccacggacaccacctgtgtctgggctgggaaagacccatgataggaagacagccatggacacgacctgtgtccgggctgcaaatgagacacacctgcaaatcatgcccaggtgctaagtggcacagggaaccgcagtcacccacagacgcattcatcaccgactttaaaaaatccagtgtgagaaatagaaccaaaccaagcacccattcccccagccgctgcctctgtctggtacctgaatgtgctctcttagccccagagcctatcttcaaccacacgtgatgatgtttatccagggcgacccatgtttgtttaaaaaaaaaacgctgattggtagtatttaaattcttatttaaaagtcagttttcgtttcatcttggatttctcctcggccacctcgaatgggtatccaaacagaaaagtcggtaataaaactgtggtcaaaggagctctgagttcagagccgcagtggccccaggctggcagctccttgcagaaagcacagaagccaagggctggagcccaggagccgttactcagtccccggctttttcagatgaagacacaggtccaggtgggaggcacttcctcaggcccctcaccagatgctctggggccggctcctgggctgcctctctcctctgtcccatcaggcctgcacttctctgtctgattcccaccaaccttgttcggtttctttctggaattggctgatgagacccaggatgagctccaaaatctgctgccatcccgtgcccccgtccccccagggctccagctctgcaaggtgctgtccaccttccttcaaccacggtttcacctccaggaggcttctgggaaagataaaatgcagccaagggcaaaacctcacagcgttataccgcgtcccttacagcccaccttgcgaacctttcccgccccggtccgaggcctccagggctccctgggtcctgtggtccactccgagggcactgagagccctccctggtttgggcagcaaggtgtgctttctgtcctgcaggacgcgtccatgccgaacccacagtgaggttccatagagagagctaacttctctgccctgtgtcccctgctggctctccccacacacgtcacattcggatctggacttagtggtctaaatggcttttctgggcagataaatgtccctccctccctgcgtcatgctgtggggtgaaggccactggcccaggacagggtatggcccagactcaggcaggacaacctggcttgcccaggycctggaaggttcttctaaccaggcytctttctgtgccccagactccgggaggctccctcgggyracttggatctccatgtcgctggctgctctgctgatcggaggcttcgcaggtctcacctcgacggtgatttgcaggtggtaagtccttcactttttgactgttacttagacacaaagcaatctcctttcctctggacatggctgcaatgaagctgctttattttccyraagstaacacaggttactggtatctcaaaggcattgatctcagagctattttgtacaacgtaatagactctccggatctttcattatgctttaaataatgaaagtggagtgatcatttgtacaccttaggtggtgtcaggtatctgtggacgaacattcagcaatatggaacacttttctaacactaaatgattgcattgaagtagtctcttgttaggagtaaagattcttacaaaggtttctcagagaaaaaaggtcatccatgaataaaaagttttattcttcagttttattccctcccttgagggcagaaattggaagttgaactttcatgttaaaaatggcgctgctgttgaaagactcagacccgcacctgagaggccctgccctgtgagagtgctctctgcagaaagagcccctcgaggcttcctcaggtgcggcagctggtccatgtccctagccctgaggaaccggctctgttccttgctgctgcctctcaccttgctgctgcctctcaccttgctgctgcctctcaccttgctgctgcctctcaccttgctgctgcctctcaccttgctgctgcctctcaccttgctgctgcctctcaccttgctgctgcctctcaccttgctgctgcctctcaccttgctgctgcctctcaccttgctgctcttgagcaccaaactccttgagcatcccttccatttttaatgcacaattgttcattttatatagacagtattaaaaataacagcaaacactataagaagtcattgcaggcccaggctgggcccccagggccatgcccaggatacctgcagatagaggccacagtttctcggcttctgctctccctgagtgccaggctcccccccccaatatgccctgtgcacactcctgctgcagccagccctgccctctgccaggatgacccctgcagtcaccttcgccctccaccccggccttcagagctcctcactggcggagcccccagcaccaccccataccacacatgtatggattatccaagcctcccagcctcacccgataccacatatctatggattatccaggactttcccactctaaggccatcttccagggtgtttctcatcttcccaataatagaaactcaacattctagcaaacttcatttttctagcaacttctcagtacactgaggaacatctgccccttgaacaggaaatctttttcttacagtctttgcacctcctacaggaactggtttttaaaaacttgaaagcttagcaaccagatgttacccatgatctttatcgtttccaaagggccttgtcaagaatccacagttaatggmctcttttctgttgtttttatttttgtgatcacttgtaagggaagactctgtacctgccatctgctctgcatcctgtctctctggggctgagatatggtagtaaagccagttccccatttcagttattctgcaaggcctctgacaactgctgtggttgacccagatgcctgcatttgatgcatgagcttatgatactatccggcatatgatatttcagtgacgtatttctgagtagcttcatagcttctaacaaaactaacatacaccataattcagacaactgtgagaaattccttccagtagagaggtgatagtaatggctaaagccatgtgtcagatgtaatgctaagtcatccttagccactgtctcctctgattttctgatcaatcatctgactcaggtgcttgccatggcttgaactgtgcattgcccagaacatatgtttatatcctgacctttaggacctcagaacgtaaccttatttggaactaaggtctctgcaggtgtaattagttaaaatgagactgtcctggagtagaggggcccctaattcagtatagctggtgttcctctagaaagaagagtttggacagagtcatgctgagcaggcgaaggccatcttgacgggaaggcagagatcagggtggggtttctctaagctggggcctgggaagatcgccagcagccacaggaactgggagggaggccgggggagccgcctgcaggcaccttgatgtggactcctgcctccagagctctaggtcataaactgctgtttaagcagccaagtctgtggtcctctgtgactgcagccccagaaaacttaatgaagtgctatgattgtgtccattttcagtgtagcatgtggaggtggagcgagagcctgttacttgctcaaagctggtaggcccagagcagatccttgaacccaagacctgtctggtgctggaggtcgtgccacagctgccctgcttctcctcgcgagaagattatattccacatgccagggctgttgtttcaaataatcattaccagtgaagattgaataatcacctactctctctacaagacactatactgatctgttttggaaagagagtactttaacctttaaatggtgtctctagttttagatggggtggtggcaggaaatattccctatgttttatgaatcatttggtctttaaaccttaaaaactttaataactaataattaaaaccctcagctaaccatgaaatagactaagcaataaaaattgaataggctgtaagcaaataacttcaaattagctggttctgtaattagaactatgaaatgtataattgtaacaaaaactgatacgactataatttcctattcataaacaattttgtatttgcaaacatccctataaacatctatcacattatcattataataaatattagtgtctgtagcccacactcacaagaaaaatagcaattttctttaagattgacagccatagatgaaatgaatacctttccaagggaacttgggagagaaatatttggctatagttgattttagactctggagttctaaaaatacrctaccaagcaccaatttagtttgcaaaatgccacttagctgaaagatatgaaaaagtggatgttaatgtgccatcacacgcttgagaacacaggcagttacagagtcagagaccataacagggaagaccctggggctccagggcagaaacatcctggaccaaaaccacagcacccccagacctgtgattaggtgagctcagaaggtcaagtcactcattaggaaatgtcttcccaccacctaccctgagaccccyattctgctcccagcaaatgggctcaacacaatcccagcctcgcctccctgtgtcttattcttcagcttttaaaaacatgatcttatttccaccttagggcattattgtgcggtgaggagtagggaggagaacagagagggataggaagaaagagagacagagacagcagagagagacacgggaggggagagaacccagcacggtgtggcacacagcaggtgctcagcaaacacgtttcctctcctagtgagacaaaggtgtttgcttctctactctcctcgttttctacccaccctgctgtctggggtctcacactgtatgttttggtgtgattgttattaatgtgacaaattgttgatatattttcactgcaaatctacgattcggagttaactccatgaaaccaactcctccatcaactttcttgacactgcatttaaaatacctccacggtattatgcttgttttattgcattgaaattgttttcaccaagttgaattctttctgtgcaaacttttacactaaaaattcattcctcaaatcagttctttggtccatgtcagttttgccaattagacctttcgccatggaggtgttttcctttgtgttatgatttcttcagatccggctttcttagctcagcattttaaacttaaatttcatgaagactttgtctgtctgttgattcttactgtccagggaagatgctaaatgtgcagttccagtcctttctccattcgctcttgtttttattatttttaccaattctacttttccaccatcacttagttctgcaatttctgaaatacaatttttcaggttttccttgtcgttgataaacggtgccctatacctttttgctgttttcagttgtattttgtattgatattcctacctatggtatgcattataaattcaagaaagtttgaatcatttgcattaatttccagcaaatccatgggaaagccgcgaggtccttccctaggatgcagccaggtttgtcctccgtccaggacgtctaaccctttgttccctcctgcaccttcccacgctgtgagctgacgggtgctgtttctctaggcacgtcacggggggttcctgccatctctcctctctttatcattagattcataagcgtgctggagggaggccagctgggactaggccgaggcagccatggggcagtgggccacgggatccctgtaagccatgggtgaccgggtgccctcttcccccaggaccctcctccccagggaccctcctcccccagggccctctttccccagactcttggggtagagacggcctgagtctcttgagatggagtctgaagcttctggtcatctgaactgcatgttgatgacaggaattgtcttcaggacgtcattagggaagtccgagagaactggccctttgctgggggacagacgtagagtggccagcctgggctacacagcatgggggatccgaacctgttgtagtggaatccttcagagtcagtacggcgtctgtgaggcactcrggccccagaggacctggggaaggacctgygctccttagagacccacgtctgccctggaaatgagcagggggagctgttcccagcctggtcacacatgaaccacagcaaggacagcctcccaccccagtccccccgtgggttcagctaaacgcattgtccagtttccagcccagaacccaagcctggctgccaggctcatctgctttctctgggcagctcccagcccctccctctgtggccccactttcttcacccacttctgagcaagtataggtgggaaatgtgccttcctccctctcctgaccccaggctgtctactccacaccggccctgccaccgtgccctggcagtctctctacccgacaccggccctgccaccgtgcccttacagtctctaccccacactggccctgctaccatgccctggcagtctctctaccccacaccggcccrccaccgtgccctcacagtctctctaccccacacctgcccgccaccgtgccctcacagtctctctaccccacaccggccctgccaccttgccctcacagtctctctwccccacacctgcctgccaccgtgccctcacagactctctaccccacaccggcccgccaccgtgccctcacagtctctctaccccacacctgcctgccaccgtgccctcgcagtctctcttccccacacctgcctgccaccgtgccctcacagactctctaccccacaccggcccgccaccgtgccctcacagtctctctgatctgtctccctctcctgcccccagaccatctacctcacacaggccctgccaccgtgtgatgcccagccattcccacttcttggcttttattcaagcctcaatctctccatagaatactccctccttatcatctcaacctggcttcgaatgttcaagtctgacacatcgcaaaggctacacccaaacaccacccactgtctgcaacctccccaaacccccactgtatgcaaggtcctcaaatccccccactgtgtgcaacctcctcaaatcccaccactgtgtgcaaccccccaaatctcccccactgtgagcaaaaccccaaatccccccactgggtgcaacctcctcaaatcccaccactgtgtgaaacctcctcaaatccccccactgtgtgcaacttcctcaaatcccctccactctgtgtaacctccccaaattccccccactgtgtgcaacctcctcagatccctcccacgctgtgcaaactccccagatccccccaactctgtgcaacctccccaaatctccccaactgtgtgcaacctcaccaaatcccgacactgtgtgcaacctccccaaatcctgcgcactctgtgcaacctccccaaatccgccccaccctgtgcatcctcccaaaatcccccacactgtgtgcaacctcctcaaatccccccaactgtttgcaacctcccaaatccccccactttgagcaacctccccaaatccccccactgtgtaaaacctccccaaatccccccactgtgagcaacctccccaaatccccccactgtgagcaacctccccaaatccccccactgtgtgcaacttccctaaatccccccactgtgttcaacctccccaaatacctcccattgtgtgcaaacaccccaaatccctcccactctgtgcaacctccccaaattacccccactgtgtgcaacctcctcagttccctcccactctatgcaaactccccaaatccccccgactctatgcaacctccccaaatcccccccactctgagcaacctccccaaatccccaccactctgtgcaacctccccaaatcccccacactgtgtgcaaactcctcaaatccccctactgtgagcaacctcctcaaatcaccccccactgtgttcaacctcctcgaatcaccccactgtgtgcagcctccccaaatcccccccactgtgtgcaacctcctcaggtcccccactgtgtgcaacccccccaaataccgccactgtgtgcaacctcttctaatcccctcactgtgtgcaacctccccaaatccccccactgtgagcaaactcctcaaatccccccaactgtgtgtgagctccccaaatccccccagtgtgtacaacttgcttaaatccccccaactgtaatcaacctccccaaatcccccctactgtgtgcaaccttcccaaatccccccactctgtgcaacttccccaaatcccccctactctctgcaaactcaccaaatcccccccactctgtgcaaccttcccaaatcccccccattgtgggcaacaacaccaaatcctgccactgtgtgcaacctcaccaaattccccccactccgtgcaacctccccaaatacccccaactctgtgcaacctcccaaaatcccccaaactgtgtgcaacctcctcaaatccccatcctgtgtgcaacctcctcaaatccaccccactgtgtgcaacctcctcaaatccccccactgtgtgcaacctcctcaaatctcctcacagtgagcaacctcctcaaatccccacactgtgtgcaaccaccccaaatccccctactgtaagcaacctccccaaatccctccactctgttcaacctccccaaatcccccccactctgtgcaacctccaactttccctcccattgtgtgcaacccccccaaatccccccactgtgtgcaaccccccaaatcccacccactgtgtgcaacctcctcaaatcctcccactgtgtgcagcctccccaaatcccacccactgtgtgcaacctcaggtcccccactgtgtgcaacccccccaatccccctactgtgtgtaacctcctcaaatccgctcactgtgtgcaacctcctcaaatccccctactgcctgcaacctcctcaaatccccccactgtgggcaacctccccaaatccccccactgtgtgcaaactccccacattccccccagtgtgtgcaacctttacaactctactcactgtgagcaacctccccaaatcgccccactatgagcagcctcctcaaatcccccaactgtgtgccacttccccaaatccccacattctgagcaacctccccaaatccccccactgtgatgtaacctcctcaaattgcccgcactgtacaacctcctcaaatctcccccgctgtgtgcaacctcctcaaatcccgactctgtgcaacctccccaaatccccccagtgtgtgcaacctccccaaatccacccaactctgagcaacctcgccaaatcccccaactctgtgcaacctccccctatccctcccactgtgtgcaacccccccaaatccccctactgtgtgcaacctgctcaaatccccaaactgtgtgcaacctccccaaatcaccctcactgtgtgcaacctcctcaagtcccccactgtgtgcaatccgcccaagtccccccactgtgcaacctgctcaaatcccctcactgtgtgcaacctccccaaatccctcacactgggtgcaacctcctcaaatcccctactctgtggaacctcctcaaatcccccccactgtgtgcctcctcaaatcccctcactatgtgcaccccccccaaatctcccccactgtgagcaaaaccacaaatccccccaatgtgtgcaacttcctcaaatccccccactgtgtgcaacctccccaaaaccccccactgtttgcaacacccccaaatttcccccactgtgagcaaacccccaaaacccccactgggtacaacctcctcaaatccccccactgtgtgtaacctcccaaaatccccccactgtgtgcaaaccccccaaatctccctatgaccaaaaccacaaatccccccactgtgtgcaacctcctcaaatccccccaatgtgtgcaagccccaaaatcccccccactgtgggcaacccccccaaatcccccactgtgtgcaaccccccaaaactcccccactgtgagcaaaaccacaaatctccccagtgtgtgcagcctcctcaaatccccccactgtgcgcatccctccaatcccctccactctgtgcaacctccccaaattcccccaactgtgtgcaacctcctcaaatccctcccactctgtgcaaactccccaaatccaccccacactgtgcaacctcctcaaatcctcccccactgtgtgcaacctccccaaatcgccccactgtatgcagcctccccaaatcccccctactctgagcaacctccccaaatccccccactctgtgcaacctcgccaaatcccccacactgtgtgcaacctattcaaatccccccagtgtgcaacctcctcaaatgcccccactgtgaaaacctccacaaatccccctactgtgtgcaacctcctcaaatccccccactgtgtgcaacctccccaaatcccctccactgtgtgcaactgcccccaaatcctcccagtgtgtgcaacctccccaaatccccccactgtgtgcaacctcctcaaatcccccgccactgtgagcaacctcctaaaatccccacactgtgagaaacctcctcaaatccccccaactgtgtgcaacctccccaaatctccccagtgtgtgcaacttccctaaatcccctaaactgtattcaacctctccaaatccccaccactgtgtgcaacctcccgaaatcccatcaactgtgtgcaacatcctcaaatccccctcactctgtgcaacctccccaaatctcccccactctgtgcaacccccccaaatcccccccattgtgggcaacgtcacaaaatcccacgatgtgtgcaacctccccaaatcccccacactctgtgcaacctccccaactccccgactctctgcaacctccccaaatcccccacactgtgtgcaaccttctcaaatccccctactgtgtgcaacctcctcaaatcccccccactgtgtgcaacctcctcaaatcccccccactgtgtgcaacctcctcaaatccccccatggggggcaacgtcctcaaatcccccgactgtgttcaacctcctgaaatcccttcactgcgtgcaacctccccaaatacccccactgtgtgcaacctccgcaaatccccccactgtgtgcaacctccccaaatcccccccactctgtgcgacctccccaaatccccccactatgtgcgacctcctcaaatccccccagtatgtgcaacctcctcaaatccctccactctgtgcaacctcaccctatctttcccactgtgtgcaaccccccccaaatacccccactatgtgcaacctcctcaaatccccccactgtgtgcaacctccccaaatccccccactgtgtgcaacctccccaaaaccccccactgtgtgcaacctccccaaatcccccccactgtgagcaacctccccaaatccccacactgtctgcaaccaccccaaatcgcccccactgtgtgcaaccgcctcatattccccccactgtgtggacccttctcaaatcccccctaatgtcagcaacttccctaaatcccccaactgtgttcaacctccccaaatccctcccactgtgtgcagcctccccaaatcctcccgactctgtgcaacctcccaaaattgcccccactgtgttcaacctccccaaatccctcccactgtgagcaacctccccaaatccctcccactgtgtgcagcctccccaaatcctcccgactctgtgcaacctcccaaaattgcccccactgtgtgcaacctcctcaaatccctcccactctgtgcaaactccccaaacccccacactctgtgcaaccgccccatatcccccccactctgtgcaacctccccaaaacacccctcaatgtgtgcaacctcgcccaatcacgacactgtgtgcaatctccccaaatcccgcccactctttgcaacctcgccaaatcccccccactctctgcaacctccccaaatcacccccactctctgtaacctccccaaatcacccccactctctgcaacctccccaaatcacccccactctctgcaacctccccaaatcacccccactctctgcaacctccccaaatccctcacactgtgtgcaacctcctcaaatcaccctactgtgtgcaacctcctcaaatcacccccactgtgtgcaacctcctcaaatccccccactgcgagcaacctcctcaaatctccccactgtgtgcaacctcccaaaatctcccctattgtgtgcaacgtcctcaaatcccctcactgtgtgcaacctccccaaataccccccactgtgtgcaccttcctcaagtcccccactgtgtgcaacccccacaaatccccccactgtgcgcaacctcctctaatcccctcactgtgtgcaacctacacaaatgccccccacagtgcgcaacctcctcaaatcccccaccactgtgagcaacctcctcaaatccccccactgcctgcaacctcctcaaatccccccactgtgtgcaacctcctcaagtcccccactgtgtgcaacccccacaaaactcccactgtgcgcaacctcctctaatcccctgtgtgcaacctccacaaataccccccacagtgcgcaacctcctcaaatcccccaccactgtgagcaacctccccaaatccccccactgtgagtaacctcctgcaattgccccgcactgtgcaacctcctcaaatcccccccacagtgcaaaacctcctcaaaacccccgccactctgagcaacctcctcaaataccccactgtcagcaacctcctcaaatccccccaactgtgtgcgacctccccaaatcccccccacagtgtgcaatctccacaaatccccccccactctgtacaacctccccaaacccccccaactgtgtacaacttcctcacataccacccactctgtgcaacctccccaaatccccccgactctctgcaaactccccaaatcacccccactctgcaaactccccaaatctcaccccactgtgggcaaccacactaaatcccgccactgtgtgcaacctcaccaaatttccccgtgtgcaacctacccaaatgccccccactctgtgcaacctcccaaaatcccccacaatgtgtgcaaactcctcaaatcccaatactgtgtgcaacctcctcaaatccccccactgtgcgcaacctcctcatatcccccgactgtttacaaccttcccaaatctccccactgtgagcaacctccccaaatcccccactgtgtgcaacctccccaaatccgcccactgtgtgcaacctccccaaatccccccactgtgcgcaacctccccaaatcctcccactgtgcgcaacctccccaaatccccccgactctgtgcaacctcccccatccctccatgtgcaaacctccaaatccccccactgtgtgcaacctcctcaaatccccccactgtgtgcaacctcctcaaatccccccgatgtgtgcaacacccccaagtcccccccactgtgagcaaccaccccagtccccccacagtgtgcaaacaccccacatctcccccactgtgagcaaaaccacaaatccccccagtgtgtgcaacctcaattccccccactgtgtgcaaccccccaaatgccccccaatgtgagcaacccccccaaatcaacatgctgtgtgaaacctcaaatcccccaactgtgtgcaacctccccaaatcccctccactgtgtgcaacctcaagtccgccactgtgtgcaacccccgcaaatcctcccagtgttcgcaacctcctcaaatcctctcactgtgtgcaaccttctcaaatcccacgccactgtgagcaacctccacaaatccccccaactctgtgcaacctccccaaatctccccagtgtgtgcaacttccctaaatcccccaaactgtgttcatcctccccaaatcccccccccactgtatgcaacctccccaaatcccacctaatgtgtgcaacatcctcaaatccccaccactctgtgcaacctccccaaatcccccccaatctatgcaacctccccaaatcccccccaatctatgcaacctccccaaatcctccccactctgtgcaacctccccaaatcccctgctttgtgggcaatgtcacaaaatcccccggtgtgtgcaacctccccaaatcccctccactctgtgcaacctccacaaatcccccacactctgtgcaacctactcaaatccccacactgtgtgcaacctcctcaaatcccccccactgtgtgcaacctcctcaaatccccccactgtgagcaacctcctcaaatcccctcactgtgtgccacctccccaaatccccccactttctgcaacctccgcaaatacccccactgtgtgcaacctcctcaaatccccccactctgtgcaacctcccctatccctcccactgtgtgcaaccgccccaaatcccccaactatatgcaacctactcaaatccccccactgtgtgcaacctccccaaaacccccactgtgagcaacctccccaaatcccctcactgtgtaacctccccaaatcccctcactgtgtaacctcccaaaataccccccgtgagcaacctccccaaatccccgcactgtgtgcaaccaccccaaatcccccccactgtgtgcaacctcctcaaatcctccgccactgtgagcaacctcctcaaataccccactgtgtgcaacctcctcaaatccccccatctgtgtgcgacctccccaaatcctcccagtgtgtgcaacttccctaaatccctccaactgtgttcagcttccccaaataccaactgtgtgcaacctcctcacatccccaccactctgtgcaacctctccaagtcacccctactctctgcagactccccaaatccccccccaatctgtgcaacctccccaaatcccacccaattgtgggcaaccacacaaaatcccgccactgtgtgcaacctcaccaaatttctcccactctgggcaacctccccaaatcccccccactctgtgcaacctcccaaaatcccacacactgtatgcaacctcctcaaatccccatactgtgtgcaacctcctcaaatcccccccactgtgttcaacctcctcaaatccccccactgcgtgcaacctcctcaaatccccccaatgtgagcaacctcctcaaatccccccactgcgtgcaacctcctcaaataccccactgcgtgcaacctcctcaaatccccccaatgtgaggaacctcctcaaatcctcccactatgwgcaacctcctcaaatctccccactgtgtgcaacccccccagatctcccccactgtgagcaaaagcacaaatcccccactgtgtgcaacattcctcaaatccccgcactgtgtgcaacccaaccaaatctcacccactgtgagcaaacccccacatccccccactgtgtgcaacctcctccaatccccccactgtgtgaaacctccccaaatccccccaatgtaggcaaccccccaaatctcccccacagtgagcaaaaacacaaattcccccactgtgtgcaacctccacaaatcctcccaagtctgcaaccccccaagtccccccattgtgagcaaccaccccaaatcccgccactgtgtgcaacctcctcaaatcacccggtgtgcaacctgctcaaatccccccactgtgtgcaacctcctcaaatctctcaactgtgtgcaacctcctcaaatccccccttctgtgcaatttccccaaattccaactgtgtacaacctcctcaaatccctcccactctttgcaaactccccaaatcgccccactctgtgcaaccgccccaaatctaccccagtctgtgaaacctccccaaatcccccccactgtgtgcaacctcaccacatccaccactgtgtgcaacctccccaaatcccccctaccttgtgcaacctccccaaatcccacccactctgtgcaacctccccaaatcccccacactgtgtgcagcctcctcaaatccccccactgtgtgcaacctcctccaatccccccactgtgagcaacctccccaaatcctcctactgtgtgcaacctcctcaaatcccccactgtgtgcaacctccccaaatcctctccactgtgtgcaacctcctcacgtcccccactgtgtgcaacccccacaaatcctcccagtgtgcgcatcctcctaaaatccccccactgtgagtaacctcctaaaatccccccactgtgagtaacctcctcaaatcccaactctgtgcaacctccccaaatctccccagtgtgtgcaacttccctaaatccccccaactgtgtttaacctctccaaatccccccactgtgtgcaacctccccgaatccccccactgtgtgcaacctccctgaatccccccactgtgtgcagcctctccaaatcccccccactctgtgcaacctcctcaaatcccccccactgtgtgcaaccgtgctaaatccccccactctgtgcaacctcctcaaatccccccactgtgtgcaacctccccaaatccccccactgtgtgcaacgtccccaaattcccccactgtgtgcaacctccccaaatccccccactatgtgcaacgtccccaaatccccccactgtctgcaacatccccaaatgcccccactgtgagcaaccttcccaaatccccccactgtgtgcaatctccccatatccccccactgtgagcaacctccccaaatcccacttgttgcaacctccccaaatccccccactgtgagcaatctccccaaatgccccaccgtgtgcaacctcctcaaatcccccaccactcagagcaaccttctcaaatccccccaatgtgagcaacctcctcaaatccccccctgtgtgcaacctcctatcacccccactgtgtgcaacctcctcaaatccccccactgcgtgcaacctcctcaaatccccccactgtgagcaatctcctcaaatccccccactgtgtgcaacctcctctaatccccccactgtgagcaacctccccaaatccctcccattgtgtgcagcctccccaaatccccccgacgctgtgcaacctcccaaaattgcccccactgtgtgcaacctcctcaaatccctcccactctgtgcaaactccccaaaccccccccttgcagcctccccatatccccccaactctgtgcaacctcccgaaaacacccctcactgtgtgcaacctcgcccaatcacgacactgtgtgcaacctccccaaatcacccccactctctgcaacctccccaagtctcccacactctgtgcaacctcctcaaatccccccactgtttgcaacctcccaaaatctccctatgcgcaacctcgcaaaatctcccccactatgtgcaacctcctcaaatccccccactgtgtccaacctccccaaatccctcccactgtgtgcaacctcctctagtcccccactgtgtgcaccccccaaaaatccccccactgtgtgcaacctcctcaaatccccctactgcgagcaacctcctcaaatctctccactgtgtgcaacctccccaaatcccccactgtgtgcaacgtccccaaatccccccactgtgagcaaccttcccaaatccccccactgtgtgcaatctccccatatccccccactgtgagcaacctccccaaatcccccacactatgtgcaacctcctcaaatccccccactctgcacaatctccccaaatcccccccactctgcgcaacctcctcaaatacccccagtttgcaacctcccaaaatctccctatgtgcaacctcgcaaaatctcccccactatgtgcaacctcctcaaatccccccactgtgtccagcctccccaaatccctcccactgtgtgcaacctcctctagtcccccactgtgtgcaccccccaaaaatccccccactgtgtgcaacctcctcaaatccccctactgcgagcaacctcctcaaatctctccactgtgtgcaacctccccaaatcccccactgtgtgcaacgtccccaaatccccccactgtgagcaaccttcccaaatccccccactgtgtgcaatctccccatatccccccatatccccccactgtgagcaacctccccaaatcccccacactatgtgcaacctcctcaaatccccccactctgcacaatctccccaaatcccccccactctgcgcaacctcctcaaatccccccactgtgtgcaaccttcccaaatccccccactgtgtgcaacctcctcaaatccccacactgtttgcaacctcctcaaatccccccaaatgtgtgcaacctcccgaaatcgcccccactgtgtgcaacctccccaaatccccccaactgtttggaacctcctcaaatccccccactgtgtgcaacctcccgaaatccccccaactttgtgcaacctccccaaatgcccactgtgtgcaacgtcccgaaatcccccccactctgtgcaacctccccaaatccccgccactctgtgaaacctcccccatcccttccagtttgtgcacccccccaaatccccccactatgtgacacctcctcaaatccccccactgtgagcaacctcctgaaatccctctcactgcgtgcaacttcctcaaattcctcccccactctgagtagcctcctcaaatcccccccagtgtgtgcaacgtccccaaatcgccccactgtgtgcattctcctcaaatgcccctagctttgtgaaacctccccaaatccccccccccactgtgtgcaacctccccagatctcctttctgtgcaacctccataaatccaaccaaatgtatgcaacctcctcaaatccccaccactctgtgcaacctccccaaatccccatcactctgtgtaatctccccaaatcccccgcaatctgtgcaacctccccaaatcccccccactgtgtgcaacctccccaaatcccgccactgtgttcaacctccccgaatacccaccactctgtgcaacctccccaaatcccaactgtttgcaacctcccaaatcccccccaatgtgagcaacctctcaaatccccctgtgtgcaaccccccaatctcccccactgtgtgcaacctcaaatccccccactgtgtgcaacgtcctcaaatacccccactgtgtgcaacctccccaaatccctgccactgtgtgcaacctcaccaaatccgtccactgtgtgcaacctccctagatcccccctatgtgcaacctccgcaaatacccccactctgtgcaagtgccccctatttccccaactgtgtagcaacctccccaaatccccccactgtgtgccacctccccaaatcccccaactgtttcgaaccacctcaaatccccccactgtgtgcaacctccccaaatcccccccaccctctgcaacgtccccaaacctactctgtccaacctccccaaatcctccactctgttcgacctccgcctatcgccctactgtgtgcaactccctcaaatccccccactgtgagcaacctccccaaaccctcccattgtgtgcaaactcccaaatctccccactgtgtgcaacctcctcaaattcttccactctgtgcagcctccccaaatccccccaactctgtgcaacctccgcctatcccccccagtgtgcaacctcctgaaatcccccaactgtgttcaacacccccaaatccccccattgtgtgcaaactcctcaaatcaccccgctgtgtgcaacatccccagatcccccccaatgtgtgcaacctccgcaaatccccctactctgtggaacctcctcaaatcccaactgtgagcgacctccccaaatcccccaactgtctgcaaactccccacatctccctcactgagtacaacctccccaaatccccccattgtgagcaatgtccccaaatccccccactgtgagcaacctcctcaaatccccccactgtgtgcaatctcaaatcccccccactgtgtgcaacctcctcaaatccccaccactctgtgcaacctgcccaatttcccccactctgcaacctcccgaaatcccccgtagtgtgtgcaaccttctcaaatccccccactctgtgcaacccccccaaatccctctactgtgtgccacctcaagtccccccactgtgtgcaacctcctcaaatcccccacactgtgtgcagcctcctcaaatcctccccactgtgtgcaacctcctcaaatccccgcactgtgttcaaccttctcaaataccccatactgtgtacaacctcctcaaatcccccctgcagggagtggcttctccctgtgaatctctcctcccttctttgcccagaagcatgtctcaattagtaagagtgcagttaatatttctcatcttaaggtggtgctccgacctgatacaaaggaaagcgggttgaattcagaggcacgggcataccctgtccttgtttctaaagtgttcatgaagaagatcgaattcaaatggtgaaatatccatatatgcaattgtatagaaaagtcaggattatttgacaaggattgtttttgatgcttttatgcaattcagaacctcaatgaatatagaaaataatttaaaaagacataagagctctctagrttgaaataagcatggtgcttataaaacaatggtgaacagtgaatgccaattattttaatttaaatttctattatgcagcaaattcataaaatggggaaagtcttttttcaacatttccaagacatgctctgttaagacatggttgcttcaggtggcttttacttgggatattgagaggtaaggcagagtggtgatggttcaggctgaggagggcgagggctgccataacaaagaaccacacgtttggtggcttaaagcaacagacgttgatgttctcacagttctggagaccagaagagcaagtcacggtgttggcagggctttgctccccccgaaggttggaaggacgaatgcgccttgcacatccagcctttggtgccctgctggtgttcactggcattgcttggcctacagactcctcacgccaacctctccctctgtctttacccggccttctcccctgcgtgtctgtattcaaatgcccctattcctataagggcaccagtcctgctggattccaggttccaccctaccccagtatagactcaccctaactaattacatctgaaaaaaaccttacttccaggcaaggtaacattcccaagttctgggtggatgtgactttgaaatgattatcaagtagatccagttccgtttacagtaatgagcagacagtgaatgagaaattaatgtgctttcacatcgcacgaacacctgaccttcactgaattttaatagaagctggcattggtgctaactccttacagactttatgtcagtgtattctcactgaaggaagttgctattttatcccactttacgaatgagaaaactgagatgcggagaggtcaccaagtcaaactcaagcgacaccccagcccccctcggtgatcaggctgaagcratgactaaatgccatttgctcctaatgacaccgtcacaagcactgaagccaccaaggaccgttgggcctgtacagaggagaggcagactcaggccctccccactgacaggagggctgtcttccatgtacacctaggtcggagtccgcaagggtggggcggtgacggtgcactggactttgctggcggtgctggaatggctrtgcggagggcgctgtggtgcggggactgcgctccccaggaggacctcgggagttgtttgtttgtaggtattacagtattgtctaacgttgccgcgttgacacagggtcacgggaagccacctccagggcctgtggtcctcttcaggcaggcggggcggggaatgctcaggaccggtgatgatggtgccatgcagagttcagggatgaatgaccaccaaggcaagggaaggagtccagcagctcagtatttggggaatgggggcgggggcaggtaaaaacgcagaatcaagggaaacaaacagctggaaaatatagtagctgttaagttctgatggaaaagctgttttgtacttacagttaaatcccacagtatttgtgatgtatttccgggtaacttgctcttccctcctcaaaaggtcccagcctcaccagagcttcccttcctgcaccggccccagctctccacgcctcccagagaccagggggcctccacccttgctcctctgggacggcgcttcctccccctcatctccaggtcggggctggggtcttcaggctcaggttgaagatgctgttgggccctttgcctgtacagggatggcgcccgacccaggaaaagcctaacgttgtctgtcatttggatgcgtctcttggcagtgactggggggaaatcctcactgcagcccgcgtcccttgcatgattgttgtaagaaagccccagctcagctgcgtggagacagggtcctcttggctgcawattctaaaatcatttttcctatgaagagagcagtgctaattttttccaaaatatatcagattatgatcgacttgactgaagtgtgaaatgaaagtgggttggagtgttcctgccaaagacaagcacggctgccttgccgtygctcgtgccgtgctctctaccctccacagtcacggtgccggaccctctcccgataactggacacgtgtctcccacaggacacgcactggcactaaatccacactgcccatctcggagacaggcggaggaactcccgagctgagatgcggaaagcaccaggccgtagggacctcaccgcagcgggccgcagctcaggactcggagcaggtgggccacaccatgccgcatgtttccagctgccaccgcagtggttggacaggatctgggtgtcggagcagctctgctggggctccctgcatatttctgtttactccgtgtttcctagtccgttctgcaccttcctccgggaggttttatttacaagctaatgacagtgagccagaatgtgagcctgcttagtgagaggaatgaagatgccttccatttgtacaaaccggttccaaaactaagggctcactttcaggcgtttgcttccacttaatctgaggatcggctggaagcacaggagaggaaggagaagctgaagcaaaaccctgacttttaaattctgatttttaagtggaatagttataatcagtgtggaaaaatgtgtatgtttatgttttacccccttaccttgtatgcagaaccccaagggaggccatatcaaaaactcacttgtgtaagtctgacttttgaactgagagaagcagagagcagaacagtggcctccagaggggagtgggggaggtgctggtcacaggcacaaagtctcaggcaggaggagggcgcctcaggtctgctgcacggcatggggcgcacgcttcctcataatgatcgcatatttcaaaattgctaaaacaataggtttttttttttttgagatagagtcttgctctgtcgcccagactggagtgcagtggcacaaacatagctcactgcagcttcgaccctcctgctcaagcaatcctcttgcctcagcctcttgcgtggctgggtctacaggcgctcaccaccatgcctggctaatttttaaattttttacagagatgcagcctcgctatgctgcccaggctggtgttgagcccttaggcccaagagatcctccagtctgaaactcccaaagtgctgggaccacagccacccactaaaataatagattttaaatgttctaactgccaaaaaaagatgtgaggtgatatgttaattaatttgatataatctctccacaatgtaaaggtatcaaaaccatgtttaaaacataaatatatgcagttagtatttgtcaactaaaaatacaaattttaatttaaacaaagtcacttacttgcatacaggaggggggcattgccaacatgatcggtctcccttctgaaattcagtgtgagattagatcctgtcctcggagataagcagagcccagggtcgttctgctgagagcacattcgtctttgcacctggctcccacgcatggaaccaaaaggacctggcctggaagtgaggctctttgtgaatttaaatagcttttccagccacagcaagggcagtgccagcaagtcccctgggcccctaattagtctgactgacaccaggggcaaggccaggcgttctgtkcatctgtggtcgcagggacctgtgtgctcagcacggcttcttcctgaaggaccctgcctgcggattgcagatcccactctgtgagtaggaasctttgccacgtggatcctctgtggcctcctgcaaacaagcatttgtccggaagccagaaacttccctccagcatgacaagcaagaaggatggctcatctcgccagcggtcctttgtgaaaagagctcctgtccaggcccttctgtcttgtatcaagtgtgtgctgttactggagcagtcagaattcagacgttattaatgtttgttctgcatttttrcaggagagtgctgggatggaaggccgggatactcacaggctgccgagagccctctgagggcaaagtggcaggacactgcagaacagcttcatgttcccaaaatcaccgtacgactcttttccaaacacaggcaaatcsgaaatcagcaggacgactgttttcccaacacggktaaatctagtaccatgtcgtagttactctcaggcatggatgaataaatgttatagctgcatttgtctggccttttcttgtaaacattgcctgayttgttccttctggggctttgccattaaaatgtatttacagattacacatctttattttgtgaaccctggaaacaccactcttgcaatcctcctgtctccaccttctggcatctctgatgccgtgctcgtctgcactctgccccggcggtccctccagcactggtttttccacaccccctgcccatcaccaggtgtccacagggcctacatctggcttccctcttctcctgggaagagcactcctggcttcctgcagggccggtgggaggaggaaagtgattctgagggagaggctggagccttaaggaccaacaaggcaaagtgacttgtctcatcctccagagattcaccaacacatgagcctcagaccccaggcttctgcctccagcagccgccctgccgcacactgctcttactcctccttataccctcactcacggggaacacagcccagtgatcccggaggaaactcactccctccctgactcaacaaggcagtctcgggggcaccgttagccacgcgaccctgtaaagctgccgtcctcatttcacatgtgaagcagctgaattccagagtgctgggtcccagcccaggcagccctcagcctcacgcaaggcaatagttaggagtccttcggcattgaaagcaaactcagacacatctgacctggagttctacctgcactaagagaagagagtggtaactaattcatggataaaacagaccatcgaggcagcactgaatgatctcacccacgaatgacaacagtggcacaggagggctatgaacattttgcttcaggatgttttatttcgctctactgttatgtagagaaagcatggtttgctttttataacttttgtgacccaaaaataccagactgttgttttccctaggtgccaggccatcctgttctgtgtgttcccaaactcttagttttgttcatgtaaaactcatgatttcataattaaaacaatattaaaataaaactcatgaatgatttcataattaaaacaatattaaaaatatcctggcaaatttcacaaattgcccttatcacaccggtaagcagcccgttctcacactgccataaagaaccactgagactgggtcatttagaaagaaaagagttttaactggctctgggttgcgcaggtggtgcaggacgcatggtgctgccatctgctcggcttctggggaggcctctggaaacacagtcatggtggaaggggcagggtaggaggcccatcacaggctgggagccaggagccgggaggsagaggggcagccacacatggagaccaccagatggcaggggactcactgcacaggaccaagaggggtggtgctggacccttcctgagaacccaccctgtgatcccaccgcctcccaacaggcccctcctccaacactgggagtgacaattccacatgagactgggtgggacacagaccaaaccatatcaacacccagggaagggacaggacccagcttctgcagaggagctgctgagagttcccatcagcaggtgaggagagacgcagggaatcgcagcaacgcacaacacatcagcacccgctctgggcagtgaagggaggtggccgcccaacctcaggatcatttccacgaagggaacacaggcctcctacttccagctgctgccctgccatgcactggaacacactgactggggagcggtcttcccttccacctcggagcctcttgctgacaccaaaacaaggaaccctggcttgatgcggtgcctgcatgacctctgccctctgggattagccagaaggagtagtgccatatagtgatggttaacaccaggcctcaacctggctggctggagggaggcccagctggccggtgagatcttgtctcagcctcagctagatggatggataagaggatgagctgttttggaggagactgggctgtgagtcagcagactgagggggaagacctgcctgaatgcagggtaggcaccatccaatcccggatagaactaaaaggtagctgtgtctgtctcctagagctgggacacccttcttctcctgcccttggacatcagcactctagcctcttggccttcagactctgggcttgcactagcactccctgccctgggctctcaggccttcagccttggactgagtcatgccattgtcttccctggctctgaggccttgcaactcgggtcctgagtcacatgaccggcatcccagagtgtccagctctaagacagcctgtcctgggacttctcacctccaccatcacatgagccagtgctcctattgaatatcctctttccatccacctagttagctatctgtttgtctatctatctatctatctatctatctatctactctaagacaggctgtcctgggacttctcacctccaccatcacatgagcccattctcctactgaatatcctctttccatccatctagctagctatctgtttatctattattatctatctatctatcacctgtctatctatatagctacctacctatgtagcctattggttctgtctcactgcagagccctgactatagtgatacacatattttaagagtccctggatgattacacactgatggctcacaaccttgacaatccccgatgatgggatcagccttaattcgtctgcagcatcttcacagtgctacaatcctgacactccttggggtcaaagagttttagagtattagttacttaatgggtataatgatcttggttgatatgctgccaggatttgtaacaattttgccaaatctcaatcgatttaaagatctaactgagaagattgtgcctggctaagtatccagggagttggtcagcttccttcccaggtctttctgtgtctgtcacaccatccactcactttgattatttctgttgggccactcacaggagaatttcaggcaaactggccgcggctttggcctcttactgggataattggtaccgtgttagccctggagaacaccccaaggtcactctgtacagccccttgattttggagaggaaatagctgagtcccaggcattggaagtgaattgcttagagtcacgtaacaaatttaagttcaggaagagatgacaacacacttcaccatcagcacttggtaagactgcctcacccctgccacggcgctaacagcccacatctctaccaaattgtgtttgctatttgggtggctgctgcttccatattaaacattctgctattcgtgaatgactctggccaaattaatgaaagccatacagcctgctgggcttgtaacacccattccttatgaatattacacatgttggaccacgttcacccagcagtcccccaggagcgggggttctgagtgtatggggccctacaagtcataggtatctcactaaggatgtaatttctgagtgaattgacctttccttcgtgaaaaagaaagagggaaattgtatcctagcaaatgcgggtttccatgagcagacacccccacctgctgggtgacttgggaaacagcagaatcaccatttttcctgacctgcatcttccttccgctcaaagagcacacgtgtctgtttcgttccagggcgctggatacatgcgttgcacatggaaaccttattattgtactttttgggtttttcatgcttatagttaaacatcaccactttctcactcagctgtgaatgtcaagagccttgtgccctgtgggcttactgagctctggaataagggagagaacctcatgacatccatgtcagcaatagctttgcagatgccttcgcaaaagccacagaccccagacatgctaaggacaggaactgctcattgcttacggactcacttacccgagcatccacttagggccgacagacggtaagattgacgagaaggccaggaaaggacaaaggctggaaggtgcatgtcctccgcacctgcaggcagctgctgagttcaaacagtgaagggcgtcgggcccagagagagcccagagcttctgtgaacctggagctttcctaataaagtgtgctccctgggcagtgagagtttctacagaatgcgtggtgtggcctcggactcaggggtgtgcgtcctccctgtggacagatggatgaagcggaaactccagacagacggaagcacggtctatgaagaaagcctacccaggacacagcacacgtggagatgtcagcacatgcggggtttgggagaggctcacggtctcttcgctcatgacttcctgcaaccaagaatgcaatctgcagttagggcaccggactgggggtcgtggaggaacactatccctagggttagggggagcactatccctgggagtcaaggagggagcactgttcttggggttgggggcagctccaggcctggggaaagtgggagcacgacccctggtggagcggggagggagcacttgacctggggctgggagagacaagtaggtcttgggtttggggttcagaccctgcaggtttccgtctctgcctgtgttggtttcccggggttgcgtcatggactcccacacacagggtggccccacacagggaatggacactgtccccgtggcagagtccagcactcccaggtggaggtgtctgtggggccgcgctccctctggaggctcttcggggcccttccttgtctcttccaggttctgggggctccaggcaaacctgaccggggctgccccattccaattccgctgcttccacgtctcctttccctctgtctgtggaaaacccctccacttccctttggaatgggcctgggttgtggcactcaggctcccccaggtggtccaggcagctctcctgttctccagacccttaatcttttccctctaaagatcctttttctttctccacgtaaggtctcgttcacaggttccagggactcggatatctttcaggcaatcagtttccagccttccacatcgccatgaactttctggaataaaacctcaaatcctaactaactctgcatttgcacaatttaaataatcaatatttactgtcaagaagagacacctctcaaaaactgaaatcctgtgatcagtgaaataagtacgtcatgtgagtatatcgataagcattacacaaagaaagacagaaacacacactgcacacacacccaaaacccctcacaccacccaccacacacacacacagccacaaatcactcacaccacccaccgcacacacacacccaaaaatcactcacaccacccaccacacacacacacccaaaaatcactcacaccacccaccacacacacacacacacagctaaacatcactcacaccacccaccacacacacacacacccccaaaaccactcacaccacccaccatacacacacaccacatacacgtccccacagtcaaaaatcactcacacttcctaccacacacacaccacacctgcacacacaccacacagacacaccacataccacacctgcacacacagacatcacaccaccactcctgtttaggagtatggaagggctttctttcacccgatcagtgaaggggaatcaacccttaagaactaccgggcgcggtggctcacgcctgtaatcccagcactttgggaggccgaggcgggcggatcacgggtcaggagaccgagaccatcttggctaacacggtgaaaccccgtctctactaaaaaaatataaaaaaaattagccgggcgtgctggcgggcacctgtagtctcagctactcaggaggctaaggcaggagaatggcacgaacccagtaggtggagatcgcaccactgcactccagcgtgggtgacagagtgagactccatctaaaaaaaaaaaaaaaaaaaaaaaactctaccaacaaaaaaatgacacttcattggtcagtgacagactatttaaggataaatatttttagtcagtgtttaacttatgtacataaaaactcaatgaaatcataagacagcattaaatagcttgtttaaaataaaccgagggaactcgcctcttgggaatctttaaa

SEQ ID NO: 94901 - DNA, 24279 bp, Homo sapiens
tgtggctatgatgtgttgacccagagagaaaaaacagaaccaatacatggaagttacaaagagatttatctaaggatagtaaaaaggcctttctaattactgagaattacagggagttgaaaactacagttaaggacacagtggaaatgtgagcctgtggatagctgaagggttccaggttacagattccagtgaaggaagaggtaactgtgggagtagtgttttgataagtagaaaaggatgggcatcaggatagagctgaaggggccagtctttgaaagctggagggatgttttctcagctgaggaagagacaggaactaatgtaaaggaagaaacataacaagcagaggacttccgcaagagaattctacacagggttctcaatcttctcagaggaagttcccccaagtttttagttgaattaaggagagggtggttcataaggcaagagatgaagtttttgttttaactgtacagatgatgtatagtttaagctaaggaggaacagcagtctagctatagctaacaaaaaactctaaactgtttgaaatatttttttctcagtgatggacatgagggtgcccatctctacacaggaggtccctttggcttagctcaggaaatctgcacagctctctttgttggcgttacgatcttaggacttcatgttgaaagagtgaacttccagggctccccaagcagaaaatatccctccaaataaactgactagtttaggaacagctggccaggcaactgtcccaatgtttggaatttggaaaatttggtcattgaagtctggccccagggaaaagaactgagttctgtgagtcctgcaggggaagacagattactttggaaggcctaatgaaggcaaatctcagcccttccttcacctttccattctttttttttgagacagagttcaattctgttgcccaggctggagtacagtggcgtgatcttggcttactgcaacttccacctctcaggttcaagcaattctcctgcctcagactcccgagtagctgggattacaagtgcatgccaccacacccagctaatttgtttattttttagtagagatggcgtttcaacatgttggccaggctggtctcgaactcctgacctcaagtgatcctcctgcctcagcctcccaaagtgctgggattacaggcatgagccaccgtgcctggctaagctttccattctcagtgaagaaagtgatctgttctcttccccattggttgcaataagcagactggacatcatactatgactagaaaaggcaatcctcagctttctctaatcctctgaatggaattgggttaggtttggagaggagaggtgggttcatggaaaggaattaccatcatggtgccaagactactgagtgtcaaaccacttcagaatatggatacggagggagaatattattctcctttaagaagtagtgcctgtgtctgtcttttttgcgggcttatgtggattacatctgcattccacacatcacagctacctctgtcctgatggctattcctctaggaaaagctaaggagcaatctacgaagacaatgaatacataagggagattgtttacaaaagaaaagtgttccagtgggtatagaggaaaaaatggtcagaggtgaggtagaaattttttactttccccaattaatgaacaccttttcccttcaaccttctacaggctgtttattcttgctcctgtaggaaggcgtggcaaggtatcagctttctctttgctacccactgctacttttagaccactgtgcttccatcctcttgcaaaaattcttctccctttgaagcttatgccatctggctttactgccctttaacaccttttttttttctttttctttttgtagtgcagtggcaataatcatagctcactgcagcctcaaactcctgggctcaagtgatcctccaaacccagccttcagcacctattaacctctttttgtgccaactcttactatcatcctgggaggttttacaaaaacccatgaaaaatacagttagttcctgacctccaactccaacgaatactcccactttcaattccttaatttcaccatttctagaaaaacaggtttttgttgatggcagcttcagggccatagtaaggactgggagagggtagcattcttcttctttttttttgaaacagggtctcgctatgtcactcaggttggagtgcaatggtgccatcaggactcactgcaacctcaaactcctcagtctcaggtgatcctcccacctcagcctcccaaatagctgggactacaggcaagtgcacacccacctaattaaaaaaaaattttgtagaaatggggtctctcactatgttgcccaggctgatcttgaactcctggccaaagtattgggattacaggtgtgagccaccacacccagccagggtatcattattaagtgtagtaagattgatggtgccagcactggctggtgttgacttgaagactcactgaaagactgggactggcagccatgatgcataagggcagaatagcctgggggttgtactgcccagtgatacttggggaaaggttcaagatctggatttgactcttgtgccaagcttccaagaaacctaggttcagaggtaagagcacctttcctatcagctgcctctgtggggacatctgacactttcaacatccacccccttgaaatactcttccctttgattctgtgacaattatctcccaggttttcttcttcttcactcgctgttccttttcaaagattctccaagagctctttttctacttgtgccttaaatgttggaatttccgagagcactcttcttagccctctgctcttttctggggagcttatccaaatctatggcttcaactaccaccgaaatgttgatgtttcagaatttctggcctatatatcacagggctttctaaaaagtagttttctggccaggtaccatggctcacgcctgtaatcccagcactttaggaggccgaggagagtggatcacgaggtcaagagtttgagaccagcctggccaacataacgaaaccccgtctctactaaaaatacaaaaaattagccaggcatggtggcgtgcacctgtagtcccagctactcaagaggctgaggcaggagaattgcttgaacctgggaatcagaggttgcaatgagctgagatgtgccactgcactccagcctgggtgacagagcgagactgtctcaaaaaagaaaaaaaaaaagtagctttctgtaaaataatatgtgcataataaaataatttcaagcaataaagatagatgtaaaatgaaaagtataagtcttatccctcctaggcccactcttcataattttttaatgcatgtgtaaatgtgtcatatttattctgtgcttgctttttttctccacttatatttttctcttaagttttagatctgtgtattaaacatgccactaggacatatctatctagctatctcacaggtacctaaaacttcttcaccttctttggaattctccctcctgcaacaccctaccactagtctcctttttacatcaacaccatgaaaaaactgtctttatacgttgtgccttctcaattcaatctggtttctatccaccataactacaaaacagctttctccaaatttcctaaatgacctccttgttgcagtatcttttttggggggacagagtctcactggagtgcaattgtgcaatttcggctcactgtacctccgcctcctgggttcaagcgattctcccacctcagcctcccaagtagctgggattacaggtgcccgacaccatgtctggctaatttgtgtatttttagtagagatgggagttccaccatgttgtccaggctggtctcgaactcctgacctcaggtgatcggcccacctcggtccccaaagtgctgggattacaggtgtgagctaccacacctggcctttttatttatttgttttatttacaaaaaaaccaaagtcttgttctgttgccgagagtgcagtggtgcaatcttgactcactgcaacctccgcctcctgggttcaagtgattatcatgtttcagcctctggagtacctgcgatcacaggtgcgcaccaccatgcccagctaatttttgtattttttgtaaagatggggtcttgccatgttgaccacactggtctccagctcctggtcttaagtgattcacctgcctaggcttcccaaagtgctgggattacaggtgtgagccactgtgcctggcccttgttgcaatatctgatagatacattttatttactttattttatttttttggagacagagtctcactctgtcacccaggctggagtgcagtggcacgacctcagctcactgcaacctctgcctcctgggttcaagcgattcttgtgcctcagcctccccagtagctgggactacaggcgcgcactgccatgcctggctgatttttgtatttttagtagagacggggtttcaccatgttgaccaggctggtctccagctcctgacatcaggtgatctgcccgccatggcctcccaaagtgctgggattacaggagtgagccacagcacccggcctatttatttcattttttttgagacagggtcttgctctggtgcccaggctgaaatgcagtggcgcgatctcggctcactgcaacctctgcctcctgggttcaagcaattctcatgcttcagcctcccaagtagctgggattaccggcatgtgcaaccacacccatctaattttttttgtatttttagaagagacagggtttcaccatgttggtcaggctggtctcgaactcctggcctcaagtgatccacccgcctcggcctcccaaagctaggattacaggtgtgagtcaccatgcccggccctgatgtatatattttagttagcattttactatatctctgttacactaaacgctttcaccagtttccttgatagttctctatggttttcttctttcctttcggtttgccccttctcagtgttcttttcggcttccctcatcctatcccgcaaatgcaggtatcctctccagcccacttcatggcttcaacagctatctatatgcacacgcacacacacctcaaacctttcttttgagttcccaacccacattagctaatatcccaggggcacctaaaactcattatctcccccctaaacgagaaagaaactggtatcattattccccagttgtccaagtcacaacattcgtacctcttaaaccaatctgtatctccccatccgcactctcccttccacaggcagaccatcatcatccttgcctggaaaagagcctcacaactgctctccttgattctcctcaattcattcatccttcacactgcacgcagcgatctaaaatgcaaatgaaattgttcacacctctgctgagattcttcaaagacttttcattgccttaaggataaaaatcaattaatttacaaggcttcgcataatctggtcttcccctatctattaccactttcttaagccacaccagaacgtacccgcaccatcctccccacccccaattcccaacagccctacacggatcagctaggcgacacttcctacaggaaaccggcgttcaaaaggtaaatgctgaacaaatgaattccgagacgggatctgggcaccactttcggctccggatccgggtttacggaacgtccgggttatcaggaagctcagaggaaaggtgaaatccagatcttgacccttcactcaagttcgccagacaaaccgatccccgtggtattccgcccttatgagtcatggctgccaatcccagccttccagtgggtcttgaagtcgccaccagccagctgtggcgccaccaatgtttcccattcaagaatgctatcctcttcgatcccttattaccgccctaagcagccgtcaagacaaaccggcgttgccagcttgccccaaagcaagatggctgccaatctctatctctcctcccgaagtgaagctatccactccccgattaatgccgctgccaggctgccctcacttactatggctactccggctcatgtctcactatggcctcgaagccgccactaaccggccgggttccgggaggcgccgttcaggatgcagccacccccgcccgcctgtcccctcccccacggccgcggcggcggcggcggcggcggctgctggagcccggatgcggcgccgtgaggcaggcccgggagagcggcgcggatggatccaacatggcggcgccgagcctgagccgagagtgaggcggaggggcggccggagtggggagagggagtcgagcgggacggggcggggccgggcggggccgcaaagggcttggggaaggaaagtggagggggaggcggtggcgacgtccagcctgagaacctcaagagagggaggtgacgggacgctgagaggtgggggaggggagctgccgaggggggcgtgcaggggagatggcaactgcgggagagggcaggggtcgagacggaggagtgagggcatggggaggggcgtaaacaagggctgagactgggcccagccaggggtattagagaggccgaggtggggagtggggctgcgatccgctcgtattgaagggggtaggagcaggagggagaggctgagggtgtgaaggggaagggggctgtggcatgtggttggagggaggactggactctgatgaggggtgttgcgaggaggtgggkaaaggtcagaattggagttaagacgtttctggggggcttcgaaagtgttaaattggaggtgggagggggaagggcctaggggagaatttgggtggaaaaggagagaacggaggcttggggaatggagagagtgtcggtgggaggaggtaatggaraaagtgagagactgggaggaagaaagtttgggaggaaggggagtggaatgggagataggacagtggagctgcacgggtgatagaggttcgggggtttccctttccccggtggagaggaggagagaacagagttaagcagcatcagttgcagccaattctaattgccaggcccttagcttttaagagggtgggaagggcagaagggaatggtcatgtgggtttgcagaattggggttggatgagaattcaactgggtttgttttccaaaagactccctagcttactgttcccttgtttttcctgcttgggaaaatggggaagccggtgtcgcccaagtgtggaggagcaaaggacttttctagtttttagcattagcaatacaagagtgggggagcagacatggctatattggaaccctatatgctaaggtggaggctctggaagtctgaggagggaaagagaaaagatagagtggcatctagacaggttaattaaatgagtgctgtagtttccagacccttttgctgttttaagtctggaagggagggggtaacatggatactgtatgtagaaaaacttttccctggtgaaacatagacgtatgagtggatgctgcgccattagatattttgttctcattgtgtgctagttaagggaaagggccaaatgtagaatttggaggatagtgctggtctgctgtaaccactttcctcccagttttttctaaaggtgaaagttaacgttaatattgtaacaaaataggaataaggaattgtggaggaagatgagaagctgccagagggtaattggttttcccagaagttcttaaatttgggagctgtcttgccgcaagccattgagactggaaattcttggagttggtattgtttttgtaaattgactaatagagagttagggaagcctggagacttgttgggggtgagttctctaaatggttttaggcttgtctgtgtacttttgcaacgagattgtctaattctatgggcctctgaggtttcaaagtaaaacttgaaaattaattattttcccctccttatttgtttttgttttgctgctggctgtgaaacttgtgctaggaagagacctgggaaattaagtttcttgcggaggtaagtctggaacttttttattgttttcaaacaatggaagggaatggaaatagcatgggagttattttgaggttgggtccattaatgaggaggagaatgccagggaaaatgagttatcattcatccatctgagtgcatgagatctgttgtaatcactgtctttagttaattggagataggaggtgaaagagaaggagatttagatgtcttgggacaatcccccagctttggtttgttattgtctagtcttcttggtcagctctgaaacwttttttttttttaacatatggaaggctgtattctagtacattgtctactaaatgttgcccttggagggttgctgggacaccttccttccgtgggaaacttttcctctaactttctctttcagctgttggggggttcctggcatccttcttttgaaaacatactatgtaattctgacttccagatatttgattacatttcctatcccaccagcaagaatgtactcttaaccatctttaagattttctatgtagttttaatttaagtttcaagataccacttttttttgtagttcttctgcatgacttttcctctgaggacttctgagagagtcagatatctcttaattctatgaaattacaaatatcatccctgttcagaaaagatgactgtcattttcatttcaagacagcactcttttttatttctttcatgtcgctttcccctaagggcttctgagagagccaagtacctcaaaaactacagatattcctggttgggatgagaccagactttgcttggaagtagaaacatagtagagaaggaccaatcaggaggaaatcctgaagatacctatagactgttggcccttggctgacttggacttctctaaagaaaaaagcaaaactccaggaaatacaacaattcctcagaatcaattattcttgggaaactgtaggggagaattcatgtgttactatctcaaatacagccagaccagtcagtgggatcaggactttctgtgtgctggagtttcgtctcttggtatttggcagtgtttcagataccaagacttgagttagttctaattttctgttcagagggttacattctcctcaccattctgatacctgtcatctagaatctctgtatgttttaagttgagctcccttgcttcactgtcacagaaatacgagtatattttggttttagaggaaattggtcatgttttcttttctaattttactaatcagctgaactttcatcactttttttttttttttttttgaggcaaggtctcactctgtaccccaggctggagtgcagtggtgcgatcagagtagctgggaccacaggtatgtcccactatgcccagctaatttttgtttattgtttgtagagatggagttgtgtcatgttgctcaggctggtctcgaactcctgggctcaagcagtcctcctgccttggtctcccaaagtgttgagattacaagtgtgagccaccatgcgaggcctcatcacattcttttaatgttaaagttagatagattcttggaacccttatctgggttgcattaagtggagagggctgcctcttaacctgcatgacagtatcctcatatttctcccaagcacatggccttgaggaacttacatatttctatgtttgcttcattgaataagcaatataagtctgattagtgacctcacaaggagaatttgctgctcatccagttccaagactttaaagatgaccctgaggcttacgagcaggatcctttgtgtctgtcttgcagaggattacatttctaatatccccatagaactccagattgaactaggtcaaagtagacctcctgggatggggcagaagtggatgtagaactaccacctgttcctcagctgaatggcaacagcaggtgacagaggacccaaggttggagtggcatgaaacaccttagtgcagttggacttgggagttaaatgaacatgtatgtccgacaggcttttcttttcttctggaatgttgtttgatgggtttggatggagggaccagatggctttttctagatctagtgtggaaagtgacatgcattcttttgaccctttaccatgctccacctagaatagggtttctcatccttggcattattgacattttgtgctgcatgattctttgttgtggcagactgttctgtgcattacaggatgtttcttttttcttttgagacagggtttcactctgtcacctgggctggactgcagtggcgctatcacatcccactgcagcttcgacctcccaggctcaagcgattcttctaccttagcctcccaagtagctgggatcacaggtgcatgccaccacgccaggctaatttttatattttgcatagagatggggtttcaccatgttgtccaagctgatctcaaactcctgggctcaagtgttcctcccaccttggcctctcaaagtgcagggattacagacrggagccactgcacctgtcctataggatgtttctaaatatccctggcttctactcattacatgctgatggcagtccccttccccaccaggcataataatcagaaatgtctccagacattgccacatattccccaggggtcaaatttgcccctggttcagaaccactgacctaaaagctattataattcctagtacattgatgatctagcctgggatctaggacttaaaggtggctagtgtgtttgtttcctctcaaatgtagggagttaacttcaaaggattgaagcttatagaattacatccattgatacataattaggaccacagtgctttcctgtattttgccttattttccattgcgagggtatgtggggacagtgtttcttcatttcctggggtttaagcacactttaaattagggaactgtggagcaaccagctcttctggttggtttaatgtgaaacctacccaatctgctttatctgagagcctcacaatcaacagctggcccaagggaacaggtgggatagggaacaaagagaagttgcaggggctctgaggaggctcagttttctcatgttgcctgctatgagcaataacttattttcctttagcaccttcatttgtacccagtaacagcaacaggtgaatcgagaggaagaggcaaggaataccagtctatagttgaatagctatttcccatgctttgggtggggcatctgggctctcaaaactatatatggattacatttcctgtctacatatcagaacccatggtatagggttaagtgatcccagagtgtacctccccttttcttaagggaatgagtttctctgtgctttcattttagtttttcatctgaggaagaaaggaccagttcctacttactcttcagctttctctatcagctttgtttttccaaagaagcttattattttattgtttcctagtctagcctcagttcctttttgtataaaatggacagagcaacctgtttaattgttgagtagggtagagtggtgtggtatggtgtgggtagttctggacattgcagaggaggctatggctagttagaatatatgcatggtaactgaattacctgtatctgtttttaatggggtcctctcttggacttttgtgaatttgtttcttaattggaattgcttgaggtgatctcttggagattaagttcagttcaacagtgggttgctcccactatatttgaggctctgtccattactaggcactagggatataaagatgaatatatctctccatgagttgagtaggatctaatgggataataaatacacaaataattttagtacatggtgataaatggtgtaaaggagatatgcatagtgttccataagcgcacagaagaggactacttatctctgcatgggggtgtagaaaatgcattttgaagatggcatctgagctgactcttaaagaatgagtaggagttagccatctgaaaaagagtgatgatgggggtgtggaatagagaagggagaggggcattcaggcaaagagaagagcctgaagaaggtatagagaaattgcatgatgtatgtgaactataaacaaactgataatgttagagaataaaaagcggatgtgatgggaaatgaggttgggaaggtaggcctgatcttagaaggcttgatgtgtgtgtaaagaatttggagtgttcggccaggcgtggtggctcacacctgtaatctcagcactttcggaggccgaggcaggcggatcacaaggtcaggagttcgagaccagtctggccaatatggtgaaaccccgtctctactaaaaatacaaaaagtagctgggcgtggtggtgggtgcctgtagtcccagctactcgggaagctgaggcaggagaatcgcttgaacctgggaggcggaggttgcagtgagccaagatcgcgccactgcactgcagcctgggcgacagagtgactctgtctcaaaaaaaaaaaaaaaaaaaagagtttggagtgttcttatagataacgatggggcaatcaatgggtctgaagcaggaaagtgacttggtcagttgtggacttcagacagctaactgaactagatgtggcagtggatggatttaggtaggttaagattggtgttgcagagaacttttaaagttacagtagtccaggtgagagattattgtaatctgaaccatggcagtggaggtggaaaggtaggatagatttaagaaatatctagaagtagcattaacaggaatttaggattgattgtgtgattggagagtgtgaccagagagtgcacagtataggatggtactgtctggtggagcagtaagtatgagtgacttgagtcaaagttgttgaatttgggaattgattaatggctgcgtcattggtattacctgtagcccataacgatggaggaactttgtgaatcaagagccaaactatataacgaatgtggagctgtgattggtcattgataggggattggtaaatgacatccatgaggaaagcttagaaggtggtattgccaaggccaggtacggtggctcacgcctgtaatcccagcactttgggaggccgaggtgggtggatcacctgaggtcaggagttcaagaccagcctgaccatcatggtaaaaacccatctctactaaaaatacaaaaattagcaagacgtggtggtgcgtgcctgtaatcccagctacttgggaggctgaggcacgagaattgcttgaacctgggaggcggaggttgcagtgagccgagattgcaccactgcactccagcctgggtgacaaagtgagactccatctcaaaaaaaaaaagttgatattgccaaatagggtgaagatcaagggagtacaaatggcatagaattacaagaatgcttattgtagaaacttaatgtttattttaaatccatgagttttggtaaatattgataaactttctgagcagttatcatttcttgatgtggttggattgtaggaaaaatgtggagggatgattctgggctgcaaaggccaaggatgcttgtatctttgaaatgtttcacaaccatttatataagggttacccgtgattttctcattggattcttaacaactctgaggtgtatattcattcatccctgtttatagatgacagcactgagaatctggagttaagtgacttgcttacggtcacacagctacacagcctttcagtgatacagtcagaatttaaactagttcttttttttccgagatgggggactcactctgtcacccaggctacagtgcaggattatggctcactgcagccttgaactcctgggctcaagtgatcctcctgcctcagcctcctgagtagcagggactacaggcacatgccaccatgccttgctaatttttttcttttttgtagagatggggtcttgctatgttgaccaggctgatcttgaactcctggcctcaagccttcctcccacctcagcctcctgtgcagctgggactacaggcgtgtaccaccaagcccagctaattttttctttttttgtagaaacgggtctccctatgttgcccaggctggtcttaaacgcctgggctcaagtgatcctcctgccttggcctcccaaaatgctgggattacaggtgtgagcccctgtgcctggccagtgtttatttttaaacaaacacttcaaaaatttaataaacatgtataaagcactatactgtgccaggcattgttagcaactgggaatatgggaatgcatgagactagttcctgcccttgagtgtctcatcggttctttccctgccctttcagtacggtggggattgcagctgctgagcagggattctggaaagcattgcgtacctgagcccccagcatggcgggcctaaagcggcgggcaagccaggtgtggccagaagagcatggtgagcaggaacaygggctgtacagcctgcaccgcatgtttgacatcgtgggcactcatctgacacacagagatgtgcgcgtgctttctttcctctttgttgatgtcattgatgaccacgagcgtggactcatccgaaatggacgtgacttcttattggcactggagcgccagggccgctgtgatgaaagtaactttcgccaggtgctgcagctgctgcgcatcatcactcgccacgacctgctgccctacgtcaccctcaagaggagacgggctggtgaggaagtattaggggctggaatcagggaagagttgtgggaggccaggaaggagcagcataggcgtccaaaggggaggacacattgatcctggggagtacttagagtaagttgtgaggcccactgggggtttggactgacagaagggaagggtgtatattttcctgaatgattacttctcctcctacagtgtgccctgatcttgtagacaagtatctggaggagacatcaattcgctatgtgacccccagagccctcagtgatccagaaccaaggcctccccagccctctaaaacaggtgagaagacattaactccccctgctttccatcatcaagtaaaaggacactgatcccatcacattctgggctttgccagcttaaatgaaaggatgctgtgcgcccacatcttgccccataaaaaaaaaaaatcaggcgaggtgacatttctcctaggtcctgtatttgctctcacatgtcttgtcttttttttttttttttttgagacagagtctccctctgtcgcccaggctggagtgcagtggcgcaatctcggttcactgcaagccccacttcccaggtgcacgccattctcctgcctcagcctcctgagtagctgggactacaggcgcccgccagcacgcccagctaattttttgtatttttagagacggggtttcaccgtgttagccaggatggtctcgatctcctgacctcatgatccacccgccttggcctcccaaagtgctgggattacaggcgtgagccactgcacctggtctcacatgtcttttcaagtcacatttttccactgcttttagtgctaagtctaaatgattccttcctcattccaacagaagtgtttgaatttctgcctttaccctactgtgttttcttcccttttactttctggtcagtgcctccccactatcctgtggtgtgttgccccacttcgggtcctcagatgtgtagcaagcggccagcccgagggagagccacacttgggagccagcgaaaacgccggaagtcagtgacaccagatcccaaggagaagcagacatgtggtgaggaagttcaagggttccagagatggagcagacttgaaggagaatataaagaactgctgggacactgggcagtttatgctattcagtgtgagattcactttgattgccattgcaaagtgaggctgaatggtttggtgtctggtggaagaactgctctttatgattgtggcagggtacatttcaactcttgttagttaatactacatcacagggatgttgttatgacatccttattgtaggatgagccaagtcgagtattaaaatgaacttctatgcctggtaattaggaaaatatctcctataaacaagttgctacctgtgagtaatgggaacagtgctgacctcggcatgtcccgtttaagggaacctcctgcattcaggcaaggatttcagagatacatagaaatagtcctggggaagaggtagagaagctgtcaggtgatattccctacttttttattctgttgtgcttttcagttttcaagcttggcttgtaaactcatcccttactgtaacctcttctgctctgtatcttctgtttccaacagacatcagactgcgggttcgggctgaatactgccagcatgagactgctctgcagggcaatgtcttctctaacaagcaggacccacttgagcgccagtttgagcgctttaaccaggccaacaccatcctcaagtcccgggacctgggctccatcatctgtgacatcaagttctctgagctcacctacctcgatgcattctggcgtgactacatcaatggctctttattagaggcacttaaaggtgtcttcatcacagactccctcaagcaagctgtgggccatgaagccatcaagctgctggtaaatgtagacgaggaggactatgagctgggccgacagaaactcctgaggaacttgatgctgcaagcwttgccctgacctattccctcttctcactttggggactgttcccatcacccacctctggagcttacactgttctggggtttgttctctacccttccaaccaatcacacccctgcctttttttttttttttttaaagaaaaagacaaaagaaagtggaagtggtattccccacccctccctgcacccatgtgcctgggcttcccctttatttcccttttccatttaccccgtaatgtgtctctacagctaccttaccactgagccgtaagacaaatgtataggaagaagcaaagtctacagcacatagtctttgtaagggattgatgtgaacacttttttttggatgcactaaggagttatcaatacttctggctttatgagagctcttaaattttgtctaaaaaaccaaagggctgtgagtaagggagctatgtggaaagtgggactctgaagtgtattttgaaaattaatcgccaccctcttccaaattatagaattttttaaaaacaagctgtggccctttccactctctcctggcctctggtgctgctcctctctgccgcctttcctccattccatggcttgaaacctctgcctgatgtggctccttcctttttcccatttgtcaaaccctcttcaaaggaggaacagataagactgggtcagcctagtcatgcctcccaactgtggtggtatatgtgtacacacatacacagggtggatggagaagaggttgctgattaaaatacactccccctataaaggggaagggggagtgtgacactttctttccatgttcaagtgaaaataaataatgtaccctgcagcccttttcccctttgctttcttctggcttgggcaaagggcatcataggtgtaagtgaagtaattcctttttccttccccctcctccactcctacgcccactcccatgcttgggagaatggggctgggacatgcactgagtgttgcacttttatttaggtagggaggcatgttgaatgagccaggaggtctagaactggagcttagtccagctggtacaataccaactccccttctagttcccaaaggcgatgtccagacacagactttatgattattatatttttcaatgccagtgctgctcagccctcagcagaacttcagtttccatgaaataaacaatgactatataaaattccacctttctgaaactgcagtctgacctcaggtgaagctcaggtgaaagtttctttcccaagcagcccatctgtgttccatcaagagagtcaaggttctccaagtgaggggagctgtgcctggatcctgcctccaagtcacatgagcactagctcatagtggcagggtgggggtgggaggggcaggtctaaactcacagaagtcaagtcttaagacagtgggtgacccagattgccatagagstcaggcctgcggtgctggaacacaggcaggtgtcggcgcaactgtcgcagatagytgaggtctattcgggcaaggcagaggcctggcccctcagagcagcgggccaccactgttccccaggggtctaccaccatgctgtggccataacttgctctcttctcatggtggcgtcca[450 bp omitted]tctggaatgaaaaacagcctacttagtagtcttcctgctctgtttgtcacagcatctagtcatatttccattaccccctctcttagggctttctatcctctactgccagttcaaagtattcctgttcccctccctcatcctttcacaactcctaccttgcctgctggtgtgctgacaggtgactcaagactgggcccaggcatggtagagttgctttcacacataggcccctgccctggaatctctacgtcacacagatgtgtcttcctgtaagtggccactactgcccctacagtaagaaagaaggaatatcagtgctggtgttctagaagccttgcttactcctcccaaggaggagatagtttataggctaggaactgaagtaggaccacccctaaatccttgggtcaaggaaataagagttgagaaacaattctggagaatctaggtagaagagcatgggaagaggcaggctaaagggttataaagtctcacctttgctgttcagcagcacgtgacaattgtagattttctgagtctgctcccagtcttggccacgctcatggaaaccacccaaggacagccagagtccacattccctggggggaagggacactgacaactcttcactgacttctcaaggctctaccctcatatctggcaacccagggacactgtccaacaaagattctacctctccctcgctatttccctgatacctggcaagctgggtgtattcttccaaaagtttcccacccagtggttcagacaggtgtagcgtctctgcagggtcccgtgcaatgaagtcaaatgcctcaggcaggaaagccaggcaggcacccagtctggcagcctctcgaaccagctcagcacatgttttaaagttctgttgcttgtctggcgtcgatgttacctggcacacagccaccaggggcagttcgcaggaggaagaggagatagccatggctctgggcctgtgaacagcataggcaggattctcagatttcatagcacagggaagcaaatttaatgctaaggggtgcaagtggagaggcaggaaagctggacttccttttgatcatgctcttacagggcacgttgacccagggctagtagggctcaccaatcaaatgtgtggatagttgacactcctgtgtctcccactatccatttaacaaactgagcatctaagtgccaggcactgaggacacaacaaaacgtgttacctgggctgagcacaaagtactgagagttgaggtatccggagtccaggacacagaagggacaggaatctgtgaggaggcctggtgatgaagcccagcctgaggaaggtgagatatgaggacaccaaccccttcttcaagcaataaatttctaggattctctgacttctctctttatactgtgagcctgaatcagggccctgccagtaaaaacctagtcttcaaaacgctctttataagaaattataggctaagggacaagaccatacagtgggaagatggagaaaggggctctgctcgccgcctgaatagttcaacttccaatgatctcacattaaactgaagcctctttcctctgacaaacgtttccgcagtccaaaagtcatctccgggaactatccttggttttcccaagactctctccttgactgtgcacttgcgcagctttactgactcgaagcatatttcccctttcaccagaatctcgcaggggaaagttcaccctctctcgtctcccacccctccctggtgggcaaggggcaaaggaacccaggccccaagccgcgccccgccctccaccctcccgccgcccgctccagttggcccgtccctccccgcctctcccagaggcagcatctctgttacacaagttaaagcaccgcaggtgggattcaccgcggccgacgggatagggagtaggtcctacatgaagatatagccaaaaccattcgcagggtccgatccggagggcggtctggagccagaagcgccgcagcgagtgggcggtaactcgcaggccggacgtgacgcaaggcgggggctgagctgcgccggccggaaacccagcaggcggcgaagatggcggagaacagcggtcgcgccggcaagagcagcgggagcggcgcggggaagggggcggtgtccgcagagcaggtgaggagtggctaacgcgaagcagggtacccacctgggtctggaatactagcgagaagggggagcctgtggcttgtgcaggcctttactccagcaccacatgtgcgtggcacctagagagggaagggtccccggaaaagctagccgaaccccttcggagaggtagacgggtgggtaggtgagagccacgcctccgtgaggtggtgggtgagcctgagcaaggggaaagccctgacatgtagggtctgggaagatgcacaggtctgaggggagatggtttgctgctttctctatctctcctcagcctctccaaacaggttatggctgggcaagacagctcgaaactaaccctagagaattagttaacgggctggctgtgtagtctgttacgtgatcctgaacccacgttgacaatcgccgtcacgctgcagagccacgtgactctcatactcgaacagcctagtgttctatatactattttaattcgggagttcattactagatcgaatttctttagagaccagaaacccctttctaatccgagtttgcattttccccagtgcctagcatcgggaagcgtttgataagttaattagaaaaccctttgtggcttgggaaccgtgttttgctaagtggaaaaataggagtgggaggaaagctacacaatagaaatgaaaacagttaacagctactttattattatcgtttttttttgagacggagtctcgctctgtcgcccaggctggagtgcatgcagtggcgcgatctcgccttactgcaatccgcctcgtggttcattcaagctattcttctgcctcagcctcccgagtagctgggactacaggcgcgcgccgccacacctggctaatttttgtatttttagtagagacggggtttcaccatattggccaggctggtctccaactcctgacctaatgatccgcacgcctcggcctcccaaagtactgggattacaggcgtgagccaccgctcccggcctacagctgtcttaattataggttcagtttttgttgaacaattaatacaagcagatgtatcagcataaagatttttatttttattgttttttgagacagagtttcgctctgtcatccaggctggagtacagttgcgggatgtcggctcaccacagcctccacctcccgggttcaagcatttctgccttagcctcccgagtagctgggattacatgcccgcaccaccacgcccagttaatttttgtagaggcaggatttcaccatgttgcccatgctggtctcgaagagcatagtctagtggggtaaataagagaagcaaaatgctcatatgaggcagaagataagtgtcctaagagaagtataaagtgctatggaatatggtttctgacttggggtgggggaagggaaaaggaacctaatgctttttaatacttttttgttgttgagacggagtctctgttgccgaggctggagtgcagtggcgtgatctcggctgactgcaacctctgcctcccaggttcaagagattctggtgcctcagcctcccgagtagctgggattacaggtgcaccaccatacctggctaattgttgtctttttggtagagacggggtttcaccatgttggccaagctggtctcgaactcctgacctcaagtgatccgcctgccttggcctcccagagtggtgggattacaggcatgagccacagtacttttttttttagagacagagtttcacttcgttgctcaggctgagtgcaatggcgtgatgatagcccgctgcagccttgaaatccctgggtgatcaagccatcctcctgactcagcctcctgagtagctgggactataggcataagccatttgaatggctaattaaaaattgtttttttggtagagatgggagtctcactttcttgctctggctggtcttgaactcctggcctcaggtgatccacctgccttggtctcccaaagtgttgggattgcaggtgtgagccaccttgcctggctccccctaataatttttaaggctaccatgggccaagcactctgctgggtacagcgatacagatactgtagctcccccttatctgagggggacatattccaagaccccagtagatgcctgaaacctgggatagtattgaactctatgttttttctcatacctatgataaagtctaatttatataataggtgcagtaactaatagaacagttatgacaatgtaataaaggttacatgaatgtggtctctctttttcaaaatatctgattgtactgtactcacccttcttgtgatgatgtgagatgataaactgccttcctgatgaggtaaggtgaatgacagcattgtgatatagccttaggccactattgatgataagtcagaaggagaatcatctgctttaggtgatctcagatcattgagccacgacaatgttgagcagatgttgatgactaaagggcaggtagcatatacagcatggataggctgggcaaaaggatgattcacatcctgagcgggatggctagagatttcatcacgctattcacaacagtgtgaaacttaaaacttatgaattgttggccaggtgccgtggctcacgcctgtaatcccagcactttgggataccgaggtgggtggatcatctgaggtcaggagttcgagaccagcttggccaacatggcgaaaccccatcgctactaaaaataaaaaaattagccaggtgtggtggcgggcacctgtaatcctagctacccaagaggctgaggcagggagaatcgcttgaatccgggaggcagaggttgcagtgagccaagattacgccattgcactccagcctgggcaaagagcgagactcttgtctcaaaaaacaaacacacaaaaagtatgaattgtttatttctggaattttccatttattttcagacattggataactctggataatgagagactattgtacatgaaacagactttgtcttcaaattgctttactcagactcatttgagaaaagacaaaccaaacaataaagatttatagtgtgctgcacaatcccttcattatggcagcagaggagagacccctaactaatcacgaggttgtaggattgtgggggtaggggctggataagggaagctgtggtatagtagggtggctaagagcattcttatgcactagggtcagacctaagtttgaatttcatttctactatttactatttatatatgacctcccatgagttacatcttggcctcccccatctgtagaaacataacaatacctacctcatcactgaatttagagtattaggcaagacaatgcatgcgaagtgttttgcacagtgattagaatatagtgtgtgtttag

SEQ ID NO: 94902 - DNA, 61874 bp, Homo sapiens
  misc_feature (1)...(61874): n = A,T,C or G
actttatttctattattattacattgtaatatataatgaaataattgtacaactcactgtaatgtagaatcagtgggagccctgagcttgatttcctgcaactagaaggttccatctgggggtgcggagagacagtgacagatcatcaggcattagattctcataaggagcacacaaactagatctcttgcatgcacagttctcaatagagttcatactcctatgagaacctaatgccactgctgatctgacatgaagtagatctcaggcattaatgtgagtgatggggagcagctgtaaatacagatgaagcttccctcgctggcctgctgctcacctcctgctgtacagccctgttcctaacaggctagggacctgtactgtgacctgttagatcaggggactcctgatctaaaacacaaaatttgcatcattcattcttaatgaaccaatgctggctcttggtgattacctccatcttttggtttgtaatgtttatgagggtatttatgcacagaaatagtctcttagtctacaatatagggttttcttttctttcttattctgtttttttttttctttttttttgtaattgtgctgtcttgacccagtttgaggccctggctaaaggctgataaattccctttctccagcagttgagtaattccacaccttgaagactttccttatcatgctctcacactcacatctgccctaatctgccctgggacctagcaccaaacaactagggacagtccctaaaccccagggcccaccaaaattatttaaatcatccaatccacagagagcctatgaaaccaagctagccccaccctgtgtgccatacgtaagctgccccctgtagcttgcagttactcactcagtccccgacacaactcctgtaagtgtccaccatcaaaaatcttcaaatcttataaacaattggtgctgtgagcaggaaggtgtggccatgattgtggactcttgggtagctccttgtggggcagggtgcagggtgtgagggtctgctcttggcttactcattggctccagacccacaccagcacaactagggatgtaactgctgcctgttggtgagctgcaatttagctggtgctgctgtgcctgccggtggttgccaagtctctccgtatccacattcctgtgttggaacattaaaaatgatcattgctgactggctaaactccaaagctatacactagtacagctggggcccaccttagaccattaggagtgatgagccacttgagctgcactttgcagggtctgcattccccatgcttctgctcatagcctgtgtttggcagaagcctattccaggagtctgtaacttctttggcagcagtgtttctttattattatggagggcagaatcctgtttgtctgagtgtttcaggtaaactcttgtggaggaaagtgttggttgggctctcccacaatacagaaatggcacccgggtctcattgtcaactggaccaatttaaccaattactataaaggaactataaaggaacatagaaattggttaaattggagggcttcctacagactaatactggagttagagcctcagccatagatatattaattggcaaacaacctgacaccctattaaccatatgcactcaaatcaggccatatgatttaaaacctgtgtacagcagaacccctcttatcacacgtctagaaaaaccagggactgttgagagcttttatattcagctgcctttatttttattaatttaattttattttaagttctgggacacaggcgcaggacatgcaggtttgttacttaggtaaacctgtgccatggtggtttgctgcacctatcaacccatcacctaggtattaagccccacattcattagctatttatcctgatgctctccctccccctgccatcaccccccagaaaggccccagtgtgtgctgttcccctccctgtgtccacgtgttctcatttttcagctcccacttataagtgagaacacgaggtgtttggttttctgttcctgtattagtttgctgaggataatggctttgagctccaggatacaaaatcaatgtgcaaaaatcacaagcattcctatacactaacagtagacaagcagagagtcaaatcatgaatgaactctcattcacaactgctgcaaagagaataaaatatctaggaatacagctaacaaggaaagtgaaggatctcttcaaagagaactaaaaaccactgctcaatgaaatctgagaggacacaaacaaatggaaaaacatgccatgctcatggataggaagaatcaatatcatgaaaatggccaaaatgtccaaagtgatttatagatttaatgctattcccatcaagctaccgttgactttcttcacagaactagaaaaaaactactttaaaagtaatgtggaaccgaaaaagagcccatatagccaagacaatcctaagcaaaaacaacaaagatggaggcatcacgttaccctacttcaaactatactacaagtttacagtaaccaaagcagcatggtactggtacaaaaacagacacatagaccaatggaatagaatagagatctcagaaataagactgcacatctacaaccatctgatctttgacaaatctggcaaaaacaagtaatggggaaaggattccttatttagtaagtggtgctgggagaactggctagccatatgcagaaaattgaaacttaaccccttcctcacatcttacacaaaattaactcaagatgaattaaagacttaaatgaaaacccaaaagtaaaaaaaaaaacaaaaaaccctagaagaaaatccaggcaataccattcataacataggcataggcaaagatttcatgacaaaaatgtcaaaagcaaaaattgacaaatgggatctaattaaactaaagagcttctgcactgcaaaaggagctatcattagagcaaacaggtgacctacagagtgggagaaaatttttgcaatctatctatctgacaaaggtctaatatccagaatcttcaaggaacttaaacaaatttataagaaaaaaaatgaacaaccccattaaaaagtgggcaaagcccattaacaaacacttctcaaaagaagacaaatatgtggtcaagaaacataaaaaaagctcaacctcactgatcattacaggaatgcacatcaaaaccacaatgagatatgatctcacacctgtcagaatggtgattattaaaaagtcaagaaacaacagatgctggcgaggctatggagaaataggagtgcttttccactgttggtgagaatgtaaattagttccaccattgtggaagacattgtagcaattccttaaagacctagaaccagaaacagcatttgacacagcaatctcattactgggtatatacacccaaaagaatataaatcattctattataaagatacatgcttatgtatgttaattgcagcactattcacaataacaaagatgtggaatcaacccaaatgcccatcaatgatagactggataaagaaaatgtggtacatatacaccatggaatactacgccaccataaaaaggaacaagatcctgtcctttgtagggacatttagctgcctttaattgagactttgattgtaccattcagattctggcactttggtccaattataggagtattctggatgccagcatctttgctagctgtgcacccacaaagcctttgacttaaaagacatttgtgaatcaagctcccaggacccaacattgtattcaaattctacaaatgactcagccccattataacaccacagagtcacaaaaatacagcccacatcaaccctagtgggtatccatgtgggaaggataccctagtccgacactgccctagctcaagaccatgccattaaagatgacatgccccctgcctcccaaccaactatgggcagtgccaactacactagcacatggaatgtcttgccattcataggagaccagaggctcttggttttccagtagctggttacactgctgacttctgttttaaaaaagcaagacccacaacactggagtaactttccagactttacagacacctataaaactcgaagttctgctctctgtgattgtaattccactctatacctggcttagcccttatgagaccaagtccaatacctccctaatgcttctaagattcaggttcctgctaatcccacccacttctcctgcctaaagggtaacctgactgaagtattccaccctgtgtgctctcctaggagtaaaaggagcatctgctggtctccgactgtcaaaccatttattcccttccatcctcctcgccttccctttctcattgtcagtatccctactcccacccctatcttttccgtcctaacagcatcttctcctcttgccctctaaaagactacgtaagtaaaattcaaacccactgccccagcttctctgatatttatacagacatccaaaatacaaacacatttgactgaagtaggctcttctgcactgactatccataactcatcaccctgcttccacatatcccacatcacacatttacccaactgataattgccccagagatgaaaaatactgagaaatgaaaaccacttccaaacggccttttcttctgtattggggtgccccctcatggcaagtggcaactgcactcgtatttcctcaatacataccacagatgggctacccaatgaacaactgcatattctcaccatatgcccaacaaaagccactgtcttcctccagtcccattctttagtaatttccctttacctaaatcaaggtacaattttccagtctaatggtaatgccacaaaactatattgtgtcccaaccaacaagggtgtttatcccctctcctttgcccttccattactctgaaactggaagccacgagatgcattctggcctctcttggcattcctatttatataaatgttaattattctttccctacccagccaaatgtcattgatgtgccacatttgtacctataatactgggactcaccactgctctgggacttgctgcgatggccacaaggaccattgctttagcccaacagtcaaaaataattgatgctaccctacaaatgtccaaaactctagtatatcatatttctaagttacagcaaatattagtcctgctaaaccagggagctttggcaaaaatgttttttgacagtaaatttgtccttgattatatattaactagtcaaagaggtgtttgtaacattattagagcttcttgttgtaggtgggttaacaccaccaatcaagaggtcattctaacagaaagcctggatcagaaaaccatcaccctaaaaaaacatgccttacatatttaacacactctgaaatccagtcaaaatatgactaaaggcccttgccatgactgatgtattctcctggccaacgccaaacaaatgggagcctggttacgagtcagccttcagggacttgtcacatttctacttggtttcttccttgttattgtcataataaaatgttttctatgctgtttagtgcaacttaggccctattctgtagaagtctcctctactattcaggccactcaaacaccccaaataattgagttcaaaatcgacatcaagatataaaggaatcagtgactaaatatatttcatatatggtatttttattgattattgtgctgtcttgacctagtatggaggccttggctagaggctggtcagtttcctctcttgagcagctgattaaatccacaccccaaccacttcccttatcaggttctcacactctggggccactatgtacccactctaatcaccacagggccagacatcagacaattaaggacagcgcccatgccccaaagcccgccaaaattatgcaaattattcaaaattattcaacctagctaaccccaccctttttgctgtacataagctgcccattccccctccagcctgtggtacccagtcctcaggtgcaaccccctgcgtggtcctctgtggcagccttctctcattcagagctgtaagtaacaaagacttctgcctttcatctagctgagcattgaagtgttttatccgactgccaaaagaatctttaaatcttgtaaaatacagtcctacctacatcttaattactattcaatgaatgaaagctgcaaagcttaaaaaacctttatagtttttctaaaccttttatatttatcaagcagatctctgtaaatctgtaaatctgaaaaggataatataaattaccttttttttttttgagacagagtctcacttggcagcctaggctggagtgcagtggcaccatctctgctaactgcaacctctgcctcccaggttcaagtgattctcctgcctcagcctcccgagtagctgggattacaggcacatgccaccacacctggctaattactgtatttttagtagaggggatttcaccatgtttgcaaggctggtctcgaactactgacctcaggtgatctgccctcctcagcctcccaaagtgctgggactagaggcgtgagccactgtgcccagccaatataaattaccatttaaaattattccatgactaatgttcaatttgacgttaattcccctaaacaaataatgcaattgatagacttggttaattaagttcctttaaatattatatattatatcaattacaaatttagtctacctgaatctctcaagcatttcaaatgcctgacacattagtatcttttatacatcttgcaagtttataaaaggagggagggggctctaataattaaagcaattccagtaaaagtaataaaccaaatttatgcagtagtaagttatgttctcttaaacattcaaacactgtgtatagactgaagaaaatgctcttgtactttaaaattgaaattatatggttcatatatctgattttctaatatatcaggttatattaaatgcttcaagtaacttaacaaacaatctttcataggttatctcaaggattaaataattaaatttctaaagttaatacaaatgtgttaatattgtggatttgactaacttcaacattcttatagttatttctctcttctcccagtattgtaaatccacttatgcaaataaagagaatagatagatgtatgatctgattgggctgaggatactgtatcagagaatcaaggccagggttgaagtgtcagttaaagaatttgagagagggtcagggacctaattaggtaccamacatgcccagggtgcctctacacgacccgaaagtcaatctgctgggcatctccttgaggtaacagagctttccaaattcacactgtttcatgcagtctagtatatcatgtgtacccttacctagttttatttatttatttatttatttatttatttatttatttatttatttatttttgagacaatttctctgtcaccaggctggagtgcagtggtgtgatctcagctcactgtaacctctgcctcctgggttcaagcaattctcttgcctcagtctccggagtacctgggactacaggcatgtgccaccacgcccgtctaatttttgtatttttagtagagacagggtttcaccatgttggccaggattgtctcaatctcttgacctctgatgatccgcctacctcggcctcccaaagtgctgggattataggtgtgaggcaccgtgcccggcccccttacccaatttttaaagttacctcttttataacttttttgtttttttgagacagaatctcactctgtcacccaggctggagtgtagtggcatgatctctgctcactgcaacctctgcctcccggttcaagcaattctcgtgtctcagcctcccgagtagctgggattacaagtatgcgctaccacacccggccaatttttgtatttttagtagagatggggtttcgccatgttggccaggctggtcctgaactcctaacctcaagcgatccaccagcttggaccttccaaagtactgggattaaaggcatgagccaccatgcccagcttcttttataacttataactgtgtaatttgatagttgaaattccctctataggatattattcactactcgactgaattcaatctctttattgcctgattggagtcaacttgctttttacatgttttatatccagttcaatatcaagaatccttttgtcattttattgaccattccctacgtgattaacactatctactgaatactgtatctcagaatattacctacatttgcatcaagctcatgatctatagctcacctacatccaccattctatttttgaaatttgggatagcatgtgccaggatacagttgttctgcctgagtcttcactgcacctcgagttattttgaggttcatccatcttatctgaactttctccgtgctctggattttattcctctccaagagacacaaactcatttagagcatgtagatcttcccttgggatgtttctgcctattttattccttgtttctatcatgccaacatttgttctaatctttctatttgttctaatcttttttttttttcaaaagaaaaggaaaaaaacaggtattttatggcaccactggtcagtgtagggcgggtgggtggcacatggcattagatgtgctagttgggcagagctgtgctgttaattttctgaaagtggtaacaaaatacataaaataaaacagtgcaatgccaggacaggccagcatgcgataggtgagttcttccctccgaagccttctttccaggctgtttcatgtgtctttctttagtgtgtccttcctgtctaattaggtttctctcattgcccttgtcctaatgttttacaattatctaaggtggaatagcacagtggagagaagcaaaaatgttggagtgagacagacttaggcagaggtggcaatattgtaaaaataatgatgcttaagctgtaagaccattcattgcttgatttacttccaagatcccagaagggcacaagaaatgtgttcacacaatcatatgttttatataaaatttgcaaaagatatttaaccacaatcagtcaaccccattatcattttactctgactgtacggcatcatatttcctgtatcaggtggtattggaggggctgtgggcatttttgagacccaaatggggaaagttgagttgagaataattttagtttggctttagtgggtcatatttatgtgggtatcagtcatttctgtatattgataatttattgctagccattcagggtagcatccactrtgccaaaacaaatatgcagggccagaagtcatattgaaaagtgaaagtgtgcttcctaatggctcccaggttcagaaatttgtaggttattgaagagaaacagatggtgaaatgcacagagacagagctaatcgagggaaaataatttcaatcatccagtgtgtaaagctgcaggcagagaatttggttttagaatttgaccagaaaacctagttaagacaggttctctcaggaatgtatctgataatgtcttacgtacgattaaaaccacatcatatgttacaaaatttttttgatgaaaatagtacaaaattaaagaatcctgtgtattaagacacaaacctatagcagtacttcaaatgtgtgtgaagttttatgaatcccagtattaataagaacaaacaaaaattttaatcaaccatgcttgaaataagactgaaatatctttctattctctctacagaaaataatacaaaatttttgytatatgaagagataatccagaattatgaaattaaaatatagataaaagctcttagaggattgtgtctggcagtggctgaatatgaaatattgttttttagattttgtgatatttttgatatttaactttgtaaaatatttgatttattataaatcattttcttgttctaaatagatattcacttttgtcactaattttattattaattttgtattctttttgtggtaaaattaaatttactactttaaacattttaaggtatacaggtctgtggcattaagtacattgacgttgctgtgcaacccccatcgcgcatcatctccagaactttttcatctttccaaactgaaactccatattcattaaacaataactccccactccttcctcccccgagctctggcagcaattactctattttctagctctataaatttgactattctagttatcccatataagtggaatcacacagtatttgtccctttgtatatggcttatttcacttagcatagtgtcttcaatcttcctccatattgtagcatgtatcatttctttttaaggctgaataatattcccttgtatatacagtagtcccccttatctgtgaggatacgttacaagacaatacctgaaaccatggctagtaccgaaccctataaacactatgtttttttccttatacaaacacatctatgataaagtttaaattataaattaggaataggaagagattaacaacaataactaataataaaatagaacaactataacaatatatcataataaaagttatgtgaatgtagtctctctctctctctcaaaatattgcattgtactgtactcacctttcttgtcatgggagatgctgtgatgcctctgtgatgagatgacaagaggtgaatgatgtaagcattgtgatgtagccataggctgctactgaccttctgtatttctgaatcagtgtaaccagccctttgcggcgtggtgtcaactcatttcttgcttgctgaagtcttcgcagatgctcagtgctttctggtgcaactggtggttatcaaaacatgttttctattcatgtcttccacccacccatttaatgtcttttccgtcttaacgaaacacccatcttgcactgtagctgtaacttttacagtttragttgcaacaccaacactagcacgaatttctttttcctccttcacaattacctggatagaagatttgttcttaccgtagatcttagcaacctcagtatatgacttttttcctctccttattaagccaagagctttcaaattttcacttaaaggaaggactgatggcttctctttggcatatccaaattaccagcatcacaagtcttgggctttggggccattatgaagtaaaataagggttacttgaacacaagcactgcaacatggcaacagaaaatctgataactgagaagactactaagtgactaaggggagggcagcatgtacagaggcgatatgatggacaaagggaagattcacggccccatcaggatggagtgggatgctgtgagatgtcatcacactactcagaatggcatgcaattgaaaacgtattgtttatttctagaagtttccatttaataattttggactgtggtggatcatacataactgaaacagaggaaagcaaagctttggttaagggggaaactactgtatatatagtaccacattttgtttattcattcatctgacaataaacactgggtttgtttccacctttggaatattgtgaataacactgctatgaatacaggtgtacaaatatctgtagaatcccctgttctcacttctttcagatatatactcagaagtggaatgctggaccataaggtagttctgtgtttaattctttgaggaatcaccatactgctttccacaatggtgacagctctttacattcccaccagaaatgcacaagggttctcatttctccacatcatcgccaacacttgttttctgctgtatttttgtctggttggttttctttttgtttcatagtagccgtctgatgagtacaaagtgcattcttttttaaagagggcctcccaaaaacctgggtcttctctgtgctcgcgtctgaactttagttctaccatggcatatggtccatcgtccatgattttgtttcctcgcttgtaaaatgaggataaaaataaacatgactctaggattgttttaaagatttggtgaaataatatatgtgaaaccattagcacgtagtctgcacttaaaaagtggcaatccctttcattattatttacttatatgtctttctcctgtacaacattatgagctcctcactcatcttctgtcctcaacacccagcataggacctgacatatacttggtgtttaatggatgtttgatggttgagcttaaaatcatccatagaagacaggccacaattcttttagccacaatgcatgtagaagttcaaaagttcctcagtgaagaggaactgaaagtaaatatcagaaccttgctgctctgtaattcactgagtgcaatccagtctttatcaacacagtaaaatctttactgttctcattctctaaagtagcttcactcacgctcagcaaattattttatttttctcattaagttgtaaatcatattacctctccaggtattgctttagacaaatatttgtattgggtggaccctacctgactactgctgacaagattctggtgcaccaaagggcaaggatgctgccccagctgggctgatttctgcttgggtgtactacacatggcattaaagcctgcaatattcagagaccccgttctttgggggttgccttaggattcatgaaagcccagaaactgtattcaaaattgtgagtatgtgtgtatacgcacacacacctgagaatatgtgcactttcaaaggaaacaaacctaacttttatcataatttcaaaggaatgcatgaccaaaagaattaagattaacagacctagaaagcctagggcgccagaatcattatcaagccagaggcttacctttaggaaaagaaacagatcttgaaacaatttgtggtatgagttcagatctttaggggagctagaacccccagttactaggaccaaggcacagaatcagctaaccaaactccaaggatgaagagtcattggagttggcagggtaatttaaatctcctttaaactccctctaactgcacataagttagatccagaatctgtggatccatcctaaagatggcagtagtcactatagctgggagctattcagagaggcattcagatatcacactgtgtcatatgttaaatgcagacaaccaaaggtgatagaagaattatgacatcaaatttaaaattcctagaagtatccagaatagtatgcaaatgtaaatttaacacttctaagatccatttaaacacaataatggcaaattatattttaacctattttgtgtcttaatctgataagaagaaatttgaaattgtgcatcttttaatacaggactgattaaaataatttctgagaaaagtcaataaaaataaatattagcgagaaaagaaaatctaagacataaatttaaagtagtgtatctgtacatacttatactacaggttgtcatacattttgacagcacttgtcatttttagaaaattgaaattactttctatttactctctgtaaataaaaagcatctctactgagacatggttactgagttccatatttacagaaatgagctagaatgttttaatctctaactacaataaaatcatccaaggtgatcataaagttcccatatctctttctaaaaaataaaaataaaatagaacaaagccagaagattttaaaagttttttttaaaaaactscaaggttttagtactattaaaaaatgcctaagtttagagggttttgattcaatttcctctgaatttcactcttcccatgataaccagtcactaccatttgtatccycagaggtttgaatgaagtctgaacaaagtttacttcaattgatttcctgccaatctgagataggctgagactgtcaaagtgaaggaaaaacagtacaaataaacatataaaatacaagaagcataaatctttatgggcttataaattacaggtattaatatacaacaaacactagttctctagaacagtcctaacctattctatggctgtgccatctagcccttaatgacggggttcagcttcaaagacagctggttcaacttcccccccatttcagttcctggcctgattctgaaaggtttggtgtcatgttatttctcactacagaggaaatagtttgctagacacattaaaccctargtagccaaattccagggatcttagttggtcatatattacttggctacttgttgaactgtaatcctatcctctacatacaagtccaggactataacagtttcttaatcataagtaaaagtaatttccaattagtaagaaacagactaacatgggtaacaggcgtaagggatgagtggagaacatcaagattaacccaccatagtgccagggttcccattcatttccccttaargtagctatttggagtatgcttttaaaagagaaccctgttcccatgctttctcttaagtacaacttttgcatcaaccaaagatggactagctattatgatgcaaaggaccacgggaagctgctctggctaaacatctccttcttgttggccctaccagtccacggcatttcattgttcaaaatgcatgtctttacttaagatctttggagtttcaaatcactatgtaaagcaaagatgtgactagaagttaccacattaagctattttctgtcattaatgctttgatatgaatgtgtttcaagatggttaactagccaaggttaggcattgaaagttggagagatgcatcctaggcaagccggggtaatctccaaagtggggtaaccaagagcattaggaaactgaatttggaaaagagagggtagcatgaaagatgaaatctgatataaataagggggtagcagggcaaagccatttcacagatctgtaaacaaactgcaatgctgacctctggtttccctaactaagagctttcacaaagtaaacatgttatttaaaaataatatctcaaatagccatgcagttatgatgcgcagtttaactgaggtgggggagattctcagagggaagaacccagagatcagggttcaaggctgggagagaaatggctacttccttggaaatgttcctaggtgtcctgatctgccactgagctacagccttcaaactcaaactgcaagggaagcttttttcgagcctccctggaaaaaacccatgaccccaaaatccttccctcgaagctctatccagaggcttggtactgcttcaagtagaaaatctgatttggtttctgggaaggaggacmtgttggaaagttacaagattgacgtgacagtgacaagtctggaacctcctggctctgatgcacagtgcttgaactcccttagaaatgaagcattgcccccaagatagtataaagttacagttatctaaagttttctctcttttttttacctgtttctctttctccaaaaaaaagtttaattttaagaacaatgaaaaatcaatcttgaacaattatagggaaactcaaaagagcacactgtgcatttcagctacttcagtcacaatgaaacaatcattaaaaagatattatgtttgtttcacacaaagaaaatgtgaaaaaaaaaacacctccatattgttaaagcaacatgtaccacaactaaacacaggtagaatttttaaattttaaatttggccaggtgtggtggctcacacctgtaatctcagcactttgggaggcagagaagggcagatcatgaggtcaggagttcaagaccagcctagccaacatggtgaaacctcatctctactaaaaatacaaaaaaattacccgggcatggtggcacactcctctagtcccatctactcaggagactgaggcaagagaatcacttgaacctgggagacagagtttgtggtgagccaagattgcgccactgcactccagcctggcaacagagtgagactctgcctcaaaataataataattattattattactattttaaatttaatttaattttttaattttaaaattacaagcgattcataaacattctgtcctctcttctttcaatattttgtttttatttattgtctaatatgtataagtagctggaaaattgtacagctcatattcttttataagcaatgaaaagaaaataagtgagatttaatacatataaataattttctattattctttaatactttcaatttatttaatgcttttgttttatacaacatacaaaatactaccgcagcacatgtaatgtaatagcttagtcgtagtcttacttttcaaaaaattgtatataatacataatctcaaccccagtatcagatatcacttgtgtacatcttgcctttattcctattcttgcttctggaaaccttagctatttctgacaaagggtatacaaggaatatttctaaagcagtggctctctaagtgtggtcctcagagcagcagtatcagcatcacctgggacttgctagaaatgcaaattctcagcttccatcccagacctactgaatcagaaactctgaaggtgaggctgggcaatctgtattttaacaaagccctctgatgcacagaaatgtttgagaaccactcgcttaaaggaaccacaaagcaaagattttttacatgcttcagaacttatccctagctttgcttttctctttccaatcatttaatttaaatgttttctcttatgccacagagttgagtgaaattcccctgactcccttggtttttttcaaacaagtacatttcttttcctcttaggagtataatcatcatgtagattgtacaaaataaaataacttctccatgtgttcatctggttaggagatttccaattttataaggcaataaaatagtattcaaaagggggcacaatagctatattgacatgccagtagacatgtagaaactatagaaatcgttcttttcctcttataaactttttttattggttaaaacaagattttattaaaatattggcttattcttaaggcaagaataattttaatttttaaaaaattttaatttttaaattctataatctgtctctgaaattcttcagattaatatctcaaaatcttataaacttttaaatatgaggttaagaaaaaatttaaataattttattataaaaatgatatatgttctttgcagctatcaaacaatacagatgtaaatcaagtaaaaattaacaatctgtcatcttttagagtcatattctctttaaggcaacaaatgttaccagattggtatttctttctaatctctcttcactgactacataagtgtgcagatgcaaaaaaattttatatgcaaaatcaggatcatattatgccattgctcttcaattcactttttacacttaaagtatcacaaatgcacttgtctagtatcactatttaattccattcccgtttaggttattttgaaatgcctgctcttataaacattgattcagttagcatccttgcacatttatttccaattactcttgttaatttttcaatttcacagactcctaaaagtggaatatttgaatctaactctatgtccatttataatttaattaagggctgcaaatgaattattggagtacttcgtgcttccgcaggaatattatcagtcttttgaattttgcctcccattcccatggtctctcattgttttgatctatgtttttctmaacagtggtcacatagatgatcttttctcacactgttggccattggctattttgtgagcaaaagatcaaaagtcttccttggaggctaagggagaaaagtgaccttttgaagctcaaggtgagaaacagcatgatgggtagcacacagtaactcacacctgtaatcctaacactttgggaggccgaagagggaggatcacttgagctcaggagttcaaaaccagcctgggcaacatagtgggacctcatctctacaaaaacttaaaaaaaaaaaaaaaaaaaaaggggaagaaagagcatgctggggcttctcccctccttaactgtgtggattaacaatagttctgctcaaagttgcagttcctctccagggctgctagagttggcctgcagaagcaagctgtacataggacattggcaaaggcaacttttctccaaagactgagagacatctactgggtttcattgattgcacccactcagggagccaagggttctgagttccttatcccagggcaaaacatcaaccctgtacctagaggagccactgccctctgcctgggtctataaaagccttcattattttggaggtccctaggccttccttattctactgattgactctcacctgcagggcactagcaagaaggagggtgatggatatgcaatgaaattgtcatctgtcccaatattttgtattttcttcatgtgtatggccacagttgttctccccgaacttaaaaataaattaacaagcccaggctatattgaaggtgaagagaagatgattttaaaataagatttaaaaggaatcaaccatttataaatttatttagaatataacacaagcaaagtgcataaaatgatttaccagttcttccaaatgctcattttaaagcaaaagctctgtgacgaacgggtgcagaacactgtggcacaaagtccatatttggcttccccagcctgcaatgtgagaaattccttttaccataataatattagggaggctctgtccagccaagcagtgctcactttcttaagtcatagaggtttatcatgtcaggcaaagttcagaatcatttaatctcacctttcatcatccattatggtagagacggagctacctacttctagatttatgtgcctgtaattttttcatgttgttctgaaatgaagcgcctgttaagtttactccccagataatcctttgtttctggaagttcatagaagtcaccctttgtcatcattaatgtaatatcgtctcacaagcaggtattataactcaattctgagattccctcacccttttatataccggtgatgccataactaattgctctgcttcatacagctcagctgtatctccaaccagggcctgaggcctcctcttaagcccctgccccatctgaccacccacctccccatctcatcctggacctcttgcccacagagggagagcagagggctgcctccagagccaagcggcagctgttgctgccagtaccgtctagaagctgagcacccacacccaccctcagcacctttctctccacgtgcccctcagctggcactgcagggtggataatgctcaagttaatttgatactcccagccctgtcagagttatgagctattaaaaattgaaacttatttattctccagttaggtttcacatttctggtactaagacgaggtcatatcttagggaaagaaatggtatctctttcctgaaaatagtgtactaagattctggcaccttttccagcataagatttttcatagctcagtgtgtattatagcagtgtagctgattaaaaattctgttactttagttccagatggtttttattttggatgtgctcaaagtgtttgttcaccacatcactaatgttctgtagaaataaatcgacaaaataagtcacttgcttattcattccaatatttaacaaaagtgtttgattatctactgaagagaatggaagactcctaggactgataaaattcggactctgattttaagagtcttactacccatctggtggagagacaagtatacacataaatataactacggtttgaatgtgagtgctgtcataagaaagatgtaaaacaaactctatggcaatgcaaagatgaaagactttattcaagaaatacctatcatctgagatgtacttttgatgataggttagattttcacaagtggatatgtgtgtttgggacaagagttgggcatttcacattaaagagcagcacatcgcaaagtctgaaggtaaagagagaaagacacagaataaatttggggttaatagccaggtgcagtggctcacgcctgtaactccagcattttgggaggccaaggtgggcagatcgcttgagcccaggagctcaagaccagcctgggcaacatggtgagaccctgtctctatttaaaaaaaaataaaataaaaaagaaaagaaaggaaaggaaagaaaagaaatttggggacaacatatagtcctgctttacaaaataaacagtataaaggaaactattgaaataaaaatctggaaaagtagatctgaggcccttgcctgctaggtggtggtgtttgccttttatgcaaagcaatgggaagctgttgaaaattccctgaccatgaatgagctgactggaacagggcttcagggctatcattcttgcagtagatctttagctggatatgagggagcaaaggcttaggcaatgaggtcagttaggatgtgatttgatgtcagcaggtaagaggcaatggtgatgaaaggagaagaaaggaaagaacaccagaggggttgtgaagatagaattggcagcatttaccacaagagcctaaggaaagggaaggagacacagataactccaagctggtgggcctggacccttacctttgataaggatggcaacagtaaccaacacactggaggcaggaagggaacaatcaccaattcatttggaggcaagaagagctcagagtgtgggcaagtcactcaggtggtgctcactttagcagaaaggctgtgtagatgagtgtttagttaaagaactgacattttcacggatatgccttgaaagtatgtaaatctgtatttcttaaatggttagcaagcggagccctcaacagcatttatcacctgcatgaacagaattatttattgtgctgtgctcctgtgaatggtattccaggaattggaaagatgcgggcaaagttttgttttaaaattaactcttaaagaactggaatttctctcattagtagtaaaagcaacaagaggttgccaaaagcaaaagtgttgagaaagaaacatgttccctttactttttctttaaattataagtgaatgggcatgacacaaaacagcgaccatgatgactaagcaaacctatgtagacttaacagcccttataaaataaaactcacattaccctgactttctttcgtgctattgtgccacaagggaactgaaggtaagcagttcacacagatgactatattgataatcattctgccaaactacacatctttagtttttttaattgcttcttctcaggtatctattgctaatatcagcattgatattttcatcaaaataatataagttatctgcctaaaaatttcaatagaatcaatagaatcaatggatgactcttttctgctacatcaactacagccaattgaatgatatccatcaatatccagagaatgatatgctttagtaatgaaactattcgtacattgtattatttcaaccatcactaactccccttgctcttcccctacgcaccacaattatactcccaattttgctttttagaaagcaaaatccctgaatctttttcagctctcagtgaagctaatttccttgaatcccatcccctcaaaatatgccaattcaattacacccagggccaaaaatcatcttttatttccagtttggcctgtttcctcctcaataccccagccaccaccaccttcaaacgccaccatcactaaatgagtccttgagaagttttcccttgcttcctacctgtagtaggctaaataattggccccaacaatgtccatatcttaatccccagaatctttgaaaatgtcttacacaacacaagggacttcacagatgtgattaaatgaaggatcctgagatgggagattattctgattcatccagatgggcctgatataatcacaaagattcttataagaaggaggaagaaaagaggagggagagaagattttatactgctcgctttgaggatggagaagggatcataagccaaggaatgtaggaggcacatagaaactggaaaagacaacaaaacaaattcttcccagagactgagaaggaatgcaaccctgccaaccccttgattttagccccaaaaacgtattttggatttgtgactgccagaagtgtcaggagaataaatttgtattgtaagaggctaaacttttgatgatttgtttcagcagcagtagaaaactactatattacctctctgtatggtctgccataaactcaataccataaagatgtggattgcctgcccagagaaggtaacttgcatgatcaatgggtaccttcagatgatagtagctggtgaattggtgctaatagcgctggtccagtgamgaaaggatgaggtgcaatccacatggagtttccacatagtaagccccactgagtgttagacatcaagctcaatacttcatgtctgttattttattttattttattttttgacagagtcttgctctgtcacytagagggcatctcacattgcacccagggaatgcagtggtgtgatggctcactgcaacctccaccccctgggttcaagtgattctcctgtctcggcctcccaagtaggtgggattacaggtggctgccaccatgcccggctaacttgtgtatttttagtagacagagggtttcgacatgttggccaggctggtctcaaacttcyggcatcaagcaatcatcccgcttcggcttcccaaagtgctgagattacaggtgtgagccatggtgcctggccacatctgatatctctttaacattttcttctttattatctttttaaacgtatttgacacatacagtgcttaccttcttgggtatctggtggtcttcatgaactcattatttgatgatttggaggagtcctaaatccctaaactggacaatctttccttaaagagatcgatagccaggggtcatcagcaaccatgaaccagttcagctcccttgagagtgtctgagcagaagagtcacagattcagatttcccctcccagtggcctgagcctcagagttattactggcatccactctcaggatgggacaacatgtgcctctaaggtccagttctcagttttggggagttttgctttgtgtttagagggaaaaggtgcatttcctgaagggatcagttacttcttgcagaacccacattccctacaggagcgtggtctccccagggcctggtggttctgcaagagagaaatggtgatggcagatggtggtgcacaagtagatgatttaaattatgtttaggaggaagaagctattaaacttgctgctgatttgataaatagattttgtgaaaggaaatattcaaagaggactcctagatttcttccttaagaaacagggatggtgtaatgccatttacagttaccggagatgagaaacaagagttatgcttgtatcatttttaattgtttatttatatatttatttatttagagacagggggtgtcgcccaggctggagtgcagtgctgcaaacacagcttactgcagctttgacctcccaggctcaagcaatccttctgcctcggtcccccaagtagctgggactacaggcacatgccaccacgcctggctaatttttgtgttttttagtagagatggggttttgccatgttgcccgggctggtctggaattcctgagctcaagtgatactcctgccttgaccacccaaagtgctgggattatgggcctgagccactacacccagccaacgcttgtattgttttctaaaaaggctttactgttgagtgcccaggccattttaaaaattttttaccttttagattgacaggraaaggtcagcagtgcctttaattttacatttaggcctactttcagggaaaattggtatttcatcttcttataaataaaatctggctggcttgatttttctatttaaggtatgaaaaattactagatatttcaagcaagttagggttagaggaggtaaaaggctacaaaatctcatattttatctttctagaaggatttatggaagaagggctatggaatttgttcccaaagactggctaacaaagattcaatgggacttgaaccgttctttctatatgtccatagcttgctttttcagtgtctgctttttaaccaaatgctacaaccagaaaacgtaatttgtctagaacataagcacatgttttccatggttttagtctccttattggtaaggaatttagtctccttattggtaaatcatacacaataccagtaagtgggttttaagccctgggactcaggtttcagggtatctggatgtcccagggtatatcaaagaggccagtgcacagagataagatacatgcccacatttttaggggcattagtggaataagcctttgttataatacctaccaagttatcaacaatatgtgaaagactgttgtgagcagcttcttctgtgctcttgcacaaacaaagataaacagaaaataaccgtttatgaaattggtcttttgtttctccagctgccctgtcctgtctcacgtcatttccatgcagggcttccttttcattcgaggttcagtgtctcttcttccaaaccctctccaccaattaatacaagaagggtcctgatatcatcatttacaagtggttgaatcttatttttcattcgttagcaattccacgtctttctatttttaagagttacttgaatttccctaggactcatccaccgaatgaagtcactgactcatagatctggcctgcaggaatagattctccccatactccactccaatcaaaacccaccatgttaattcttggatgtttcatgtgctcagaaacaagtctgctcatgttcttccatctggccttccagttacggcctttcttgcctcaaaagctatttttaaaaggcacttcctctctaccttggcttctgaaaaccattaagagaatatggctttgctgagtagggtacagtgagtagggtacagtaataagtcttcccttccttcaaacctgttaatttccattgtgtttaacatacagtaacttgacttgtgtaaggttctgaatgattgttttcctttctaaaccatctcacactaccttcacctgctcactatgcctcggctctgtttcaggttttttgcacatagaagaccacccaaaaactcagtggcttagagtgacaacttttttttcttctcactgttatggggttgatgggtggatatttctgttggttttacctggacttactcactgagtgaatttcagctgggtggctgaatttcagctgggacagctggaatgccagcaccttgctctccaagcagtatttcctcttgagggagaccagaccaggcaggactttctcacatggctcatctgtgttctaaacaagcacttatcaagccttcgctcgtgttgttcgctgatgtcccattggccaaataagtcatgtggccatgccctgagtcagtaagggaggagactacaaaagggtatggataccagaaggcaggattcattggaggccattagcatcaacaagacccaaatgccttgttttatttactagaatgcatcgggctcttttttgctttaaggtctttgcatagtcttccttttaatcattcaacaaatatttaggcaccctcagacactggacaaaatcctcagagatctcaagaatctttccttctaaagaggggaagcatayaataaatacatgcaaaactagaaaagataatttcagacggttataaaagctccgaaaaaataaacygggataatgggtagaaagtgattggccaaagtggagagtgaaatgaagtttagcgaggtcaagaaggccttctgaggggatggcactccatctaaaagctggtgatgagaaagcacagcagcgaggtgtcacagaggaggagtgttctggccatacctcaaccttggtcatggctgtcctgtctcctcttgccttcctccttgtaagtagcccattcctgcccttaccactgcccacctagtttatccctttagaaaattcaccacaattttgggtgatttgctgttgatccttgtttaagtccctcataaactataatgctaatgaagatagagttgtttctgtatgtttcttggatattttcatagatctatgcttagttgacattcaaaaacaattgctaaatgaataaataaatgaattcacacagtcactcgtgcaggttgaaagcatgaccacagatgctcagagtgagacaagttcctatgtccaattcctcatgggcccagactacatttgcctgtctctcagttgggaccaacccactatgcaagttctttctaccctcctgggggtttcatttcaggggttctttggactctttggaacttccctgactctgagctgagaatagttgctatcccgtccagcctaataggtttcaataaatgttaagtcccagagacaaagctttggggccttgccccttttccctttaggaagtctgctggaattcatatacaaaatttctaccccttttccctgctaccttcaaatttgaaataataaaaaaagagattttattctatttcattagataccacctctcatgaacaatgatagcagctatcaatcatactgtaagtaccaggtaactagacacctggcctatattatcattaaccctcgccacaatcctgcaaggtaggattcttttccccattttcagataaggaaacagaggcttatagaggtgaaataatttccacaataaatccgaggattaaaaggtagatcaggtgttcaggcctacttgagtctggatctgatgatcttcctaccagacacgttgcctttgtgttgacccgctccacattggggataaaaatacagctccactgtctcttatctccagctctgaaatccaaaaatttctgaaaaccaaaactgttcctgaaaacacatgacctgatgtgacctgaactcacctgtgggcctaacctgacctgacacgaagctatttatagtctttatttattccatgtactatgactattcatacatttgctccaaaaatagtaatgtgttcarttacaaggtactcccccagaccctgataagggcattcatatataatatttgtgttgtattgctttccaaaaatctgagaaattctgaattctgaaacacatgtggccccagggttttcaggtgtgcaactgggattctgtaataataaattatgtttgtcaatggttttagagctcacaaagtttttaagggttgaggaaattttattttgttttcctctagtacacaaagaataatttaggagattcatctgcaccttattttcttactcttccataaagcagctttatttctgatttcaggctattaatcatacttgatcccaacagaagtctcgagttatctcttcttgcagaaagacatttagttttaagattaagtaaaatgaaaaaaaaggaaagcacttttcagaagcgttggtattcacttcagttaaactaattttaaatttttaatttcctaaaataatggcttagaatagcactaaagtgaatatactaaatggatccaaccattaaaacgtattctaaaattagtgaataaatatttttaaatgtaagaaaataattataataagagtaccttgcatttatcaatttgcaatttataaaacattttcacctacctgatctcctatataataataattattatcattataggaaagttgccattcactgagtgctatcttttcatgagacactttatatatactatttactcatcctcacaactgtgtaaggttgttattgttatttctgcctcacaaacaaaaaaactgaagctcaatgaggctgatatatttgcttccaattgtgcaaatagaaggttagagtgagtacatgagaaaagctgtgtgtagaaggcattttctttttggtattttattcttaccaacatatgacaacattcaatgtgtttttaatctcaaggttcctgattgtcatagaaaaaactcttgggctggaggyacaaaaagtaggatcaaatatcaacactgccaccctgacatgggacttctggcaagtgacaaaatatttcaatttcaatctcctcatttgtgaaatgaaggacgttatattcagtccacamgttgtcatgggaattatgtcaaatactagaaggattaaatgctagtaaaggaagccaagaaagtcatggcaggctgaggttcttgatctttcaataagaagaagaaaaaaaaaactagacctgccatttatcactgatcaaaatggcttggttcacataataagtttagcttcaagttacattaaaacaaaataaataaaatgcacttaatcacttttttaaaataaaaaatatatacttttaaaagtaaaaatttaaatctgggccaggcacggtggctcatgcctataatgcccctactttgagaggccaagacaagaggatccctggagcccaggagttcaagaccagcctgagcaaaatagcaagactctgtctctaytgaaagtaaaaaaaaaaaaaaaaaaaaaaaaggaactagacatagtggcgtgcacctgtagtcccagctgcttgggaggctgaggtgggaggatcgctaragcccaggacctggatgctgcagtgatctgcacccagcctgggtgacagagaaagaccctgtcttttaaaaatttgtttttaatttttaaataaaaaataagtgcataggtacatttggttgctttctcactaagctttaaagtttctttctttgtatattcaccttcatacttcagttagagaaaaacaattttggggtgatgtttctcagtgttcgtgtataccagttcttcctttgcagctacagtttttctcgcacagcagtcagtgatctcagtgccctgactggctgcatttctctcaacctctggttcaagcagtcacttgaccctgaactcaactagtggtcagtatcaggccatgaaacagggtgagataagagggtactggagtagaagctgggctgagctggcaggaaggggatgggcagagcagggacatacatcctgacacaggcagcagtcattggctgttacataagaccaaccacaggtcaaaggcaacgtcacagtctagattggaagactggggctaaggtccagaaagctgagttgctccagatggcacaagacagaatggaaagcaggcatacaggtataggttggacattcaagctaacctaaatctagcttccagaaaagacaggttcatacatgtctattccaggatgtaactaaggtatgctcccttggttttaagactgtgctcacaaacttgttttctctctttatatcaaacacaaaagttgtcctggagagctatttataaagacaatgagactgctcctgcctcgccaccaccacacacacccttcagtcagaarctggttccccgccttgaaagatctctcttctctgttgtctcagtgacttccactggtgactccaccttgaatctgctatcaatcatgtaaaagtcgtccttgttctataagctatttgctttcctttactttgtatatgtgtgaggaaacagatattttttagagaactctaaaaacagatcatcccaacaagattttgtcttagcactttttctggaaggaagaatggacttctctgctaaaaggtggtactctggggtgtatctaagagattaatttccttccattcaactttccctttaaagaaagctgtcacctttgcctctctctagatatgtttttccttatgttaaaaaaaaaaagaaaaaaaagaaagaaaaatgggccaggcacagtagctcacacctataatcccagcactgtgggaggccaaggtgggtggatcacttgaggtcaggagtttgagaccagcctggccaacatggtgaaaccgcattcctactaaaaatacaaaaaaaaaaaaaaaattagctgggtgtggtggcacgggcctgtaatcccagctactcgggaggctgagctgggaggatctcttgaacccaggaggcagaggttgcagtgagccgagatccacatcactgcactccagcatgggtgacagtgagactctgtctcaaaaaaagaaaagaaaaaaaaaagtatgtattacctttccctccctgtcaggatagttattagaatctaagcagtgagaagtcattgagaagaacaaaaatctatgtatttatttacaaggtattcatattactagaccccttttcctgtatccagtagcagtcctctccatatacaaggaaatgtaccattcatttcaactttgtttataacaatgagaaataacctaaatgcccattgattgaggaatggctaaataaacaatggcaagccataaaaaagaacgttgcaaagccaaaaaaaaaatactctttgtataatggccaaattccaagaaaatgaattaaggaaaaaaagtaaaacaaaacatgtaaaacaaaaagaaaaaaattactctttgtatagtaatagggccaaattctaatgtattaaggggaaaaagtaagggacaaaaaaagcgtatacagtatgtattatttgtatttttttcgaaagagcaaaataatacgtgcagttatacccatgtatatgcatcaaatatctctttaaatatatgaaataaattgataactttggttttctctgggacagaaaatgggagaagattgttttttactttgtacccttttatacctttgaatttgaaaccacatgaacatagtacccgtccaacaaaattaaattaagatcataaataaaaatatccctgggtgatttttcacaatgtgtgagaaactcaagatgcaaatgctacccaagtgagctgaattgcaagtctatagcgtcatgttagttattagtgtggcacaagattaatggctcatgttcttcttgctttcacttttctcccgcttaagccagatatttctcctcaaatttttgaccactggagagcacacagtgccctttggttctggctcaaagcagcctgtactctcccctctgggacttgggtccttcagcaatattcttcccaggcctaaactctcagcctctggtctaagcagtcacttgagcctgaactcaactagtggtcagcatcagatcatggaataggatggtgtaagaggtcctggattagaagctaggctgagtttgtgaccagtctgtccaacttggcaaaaccccatctctattaaaaatacaaaaattagccaagcatggtggcacatgtctgtagtcccagctacttgcaggctgaggcacgagaatcacttgaatctgggaggcagaggttgcagtgagctgagatcacaccactgcactccagcctgggcaacagagtgagactatgtctcaaaaaaaaaaaaaaaaaatggagctgagggctgagctggcaggaaggggctgggcagagcaggggcatgcatcctgacataggcagcagtcagtggctgtgaaataagaccaaccacaggtcaaaggcaaggtcacagtctagattggaaaactggggctaaggtccagagagctgagttgctccagatggcacaggacagaatggaaagcaggcataccggtattggttggacattcaagctaacctaaatctagcttccagaaaagacaggttcacacatgtctattcaggatgttactaaggtatgccccctcaaatggttttaagcacttttcctgctgaggaagtagagagagggagccaggattctgcaagtgccacttgtaacatgtagcggggccaaatgtgattctctcccctcccacactcagtgctgtctagcccaaattttacaccctaagaagccatggatcattgagttcaaaacatactttctccatccaccccttgaggttaggttgaatgatttggatgcagacctggtgtttcaggagacaggttggtgacattaatggtaatatgcaactatgagttacaaaatcaacccatagctaatttcaacaaccagaagttgtggtgcctgagacagtgcccaactgccatggtaccgtttgttttgttccttgttcatattatgatgaagggattaagttgtgttggaattagcttcatctagacactgcagttcaagtctttcatcagtagctgcattttaatcctactgggtttaataacagtactaaaaatctttatggtatgtcatttaatcatcgacctttgcattacttcaacagcagccttacaagtaacaaagaataaatcctgtgcttgcctctaggttttccacagaggtagtgaaaagaactggattttcaagttcactttgcaagaggcaagtaggaaggagactgaaagctgctcgtaaatcagtaaatcagttgctttaggccggacacctgccctgtcagtctcagctacatccaaatggaaaaatgggtgatctaggattaccctcaggcgatgccaatggccaaggcactaaaaggtcacatctattattgctggcatttctttccccactgggctgttttttgagtggatgtcatactcatctcatacagaaggcatgtccatcatgctagagcagtgctgtcaatattagatctaatgaaatacaccctatttttcttttctgcaaacttcattatacctagctgccgctaaaagatgattccttttttccttactactccaacattacattttagggacatgaatccttaagcaaagtttcattcgccacctctgattttaaagttaaaatgagtcttttaaaaacattaaccaaaataaatggcacagtgagtgccatacccagaagtggctacataaagccactacataaacagtcaatgctcccttggaagaagtcactggcctttactaataatatcatgttcatcagcaaacaatttggcaagtgtgtagtatcagaagttgggggaggactagaaacacaatcttaacacacaaaaataaatgtggataaaaaagtgtagcaacagctgttgccagctgcaagcaaccacgcagtaaaatcctgtccaactctgcaggggactgtatgaggactcttggagcctgagacaggagtgacaaaagatcgcattgtaagaacatcgaacgtgaaccctggctagcaagcacccctaggaattaccaataggaggaattgagaacattgccaagaattcatcttccccagatcgaatcactgcataaaatcagccctatttgttctaagaagtccacattcataagcttcattctaactgagcttggttcttagcctataaggcccataagaactcctttggactctgtggatctccattttaaaagcgttattgactcgaacctggggaggtgtttttcctggagttctttctcaccagactagttctggctgcctcctgggtgatgatggaaaactgaggcacttgccaacatgtcatcccctcattttgcaaccctcaggcagttgcacaaaggctatgtggaactttaccaactagttaaaggcagagtccgggacagtcttaaaggaattaggactattacaatgtccaagtgttgcatattaaggaactccatcacagggccagataaactaggtgcaaggcgatgcaattaagagcctttcattcaacacctcttcactcataaccctggggttttgaaatgcagcgcctttcaagtcacacttgaaaactgttgcctaagcagcctctccagaattttctgattccagaagctaaaagagccctaagaaaccacaggagaagctgccctgcactccttctgtgggagtcactgaggacagaagagttacgtgatatcaaacatctttaagaggcctgaaaattcttcacttacttagagctaaacccatcttagaaatctgcttattgtatatgtttaggtaactctcatttgcctggagcaacttgaaaaaaaattttttagaaagtaaaacaggaaattcagaataagacatggccttgaccagctaaattaattgcccaagtaaccttttgcataaaggaaacaggatcaggaaggatttccattcaaaccttgctattttgccttcaggtaagaggacaggattcttttctaaaattttgctgtgaagaccctaataaataattttgcttttttctcctccctattctagaaatagaagggaggaggacctattttgttccatcctgtaggctgatcctttacacctaggactggaagaaataaggtagatttttgtggaaatgtagaatatgcattcaccagctacactggaatcaggaagcataaatcacaagtagcttggtctctccacagaaatgtggaaatggtaggccctgaaagagcctcagtagggatgcatgtgatagcttcatgagctgggcaggctagctgtggagatgcaaaaaccacagcatgcagcatgcattctctccaaagataatggtggtccataccccatctccagcacccatggacaaaatcaagccaaagttatagggtctgttttagggaaactacaatgactgttgtgaggtaatagtttcccacacgactaaactcttttgtgataataaagtaaaaagtaatgaaaaaaagttactgttagtttgattttataatttatcatagtgggaagaattcttgacccagagtttaaagacttgacattccacttttaacactttcatctgactttggacaagtggcttaattttctcatctgtgaaagcctctttcttccttttgaaatggaaatactgatatttgtttttctcagcctccgaacttcttaaaagttacaaattaagatcatgtgagtaaaaaaagtacaggagtaaaatggtctcattctattgggctattctaaaagaaactatttctatttctttctttaaaagcacctgttgtgtccttagtgtagaggctaaaaataaaaagattttttaaaaatcagaaagcacttgtaatcattccatttattccttccccatttattagaaaaaccccggggtgagggggtcagattatgtcccttgatttcaaggctgatcagctaatgtacatcatcaaatccttagaagctcagacatagccttgtgtcctccttaacacctggctgcattaaagtttcaaccatagcccacaaagttttctattagtagtagcacactcagtaaaaaataaaagccatcttttactgtgcatctgctatgtgtattaatcgttaatcctcatttagaaaatatttttaggtattttatacttattaacccagttttatcataaagaaacagcattactcaaagaaattgggttagacagatttaaaaaattttactgttaatgctaattcttaaaaataactgtgaaacaaaagacagtctagagactaaaggaacgttgtagatactacttcatcctcgttacatgtctttgtttactcttttaagatcagtaaagaggacctctataatgtactttttctgtgaaacctgcccttgagtaatgagtcgttctgcaaatcattaattcaaatagtgctcttgccacttttctttgatagatctactaagacaaagatcagagtaaattaaaatgacaatctcctgcaggcaacaactggtattgccagtactagaaggcatttagttattgtacctgtctttacttaatcatggctctgacttgagcatttgatttaaaaactactgcagagcaagtcaccaccctgtatttagcatactgacttaataattaaaagggtatcacaaaaaatgaatgaaaaaaaatttattcactggagttaggtactagtaaaagcattaaaaattcaagaaatcttatgggggaaatctaatttagaaaaacagtgagtagtttttgaagtggctgttgaagtgaatattaattcagtattcttcctaaaggagaaagcatgtcaagaaaatagcatttaggatttttaaaaawgtttgtaaaagtctacaaatatgtttttaatatattacctggaaatgtttgttaaaaacatagattcccaggtcttgcatgcagagattttgattcagtagtgttataattatacatcacttcagtataaataacttttgttcatataatccaatgcctaataggaatgcttgatagtgtcctaatcaggaccygccctcttcagaggtggctacttagctatttgtagtgaaatcaacacctaaagttttgttatttactataaaagatgtcagaaagaattttgtacaattagtggtatcaagagtagtaactgagaaggaaaaattttctggacccagaaaatgtcttgtatgaacaagacataggagtggagaagcccagcactcaaatgtcattgatggagtatgtgaggtctaagccccactgaactcagctgcctgacccaaaagaggtcttgatgtcattgatgtctgtttggagtgaacttttcatgcaaggtgctggttggtgagcctcacttgcggccagcccacctgaaattacaggcaaggcatatgactattttctggctgtttgtttataacacatgtacacttgggaaatttgattgttgaagacttgctttcactgaaatacacctcttggtaattagattgtgagggtggagtcatctaactcccagatacctctaacaaagctaccaatacttactaaaagagcttatttgttgatcatctaaactggccaagaccattcacaaaaataaaggattggttgagacacacacattgtattttaatatcacttcaggtgacrctgaagcaggtgatttacaaaccatacattgggaaccactggattaagaaaagacatgtcattacaaatgtattttagaaatctaatctttgataaaaggatttaagagctaaaaaagctgatttcaggagtaagaagacatgtttttttaaccttaaaatgattttaggtagctagaacccccaaacagatgaatgaaggatgttactacaaggtaattaatagaactgaccttcacctcccttaatatttacacttgagaacttatctcttttcatatttacatataggatttagtttaatctacagcaaacatgtatctatgaagcaagtgtttgaatttcaggccacatgcaatattttcactgttttgttttatatcatcatctatttgcctgagagttaaaatcaaactcttttttttttgaggcttatgttgatcatttatatttgtgcagaattttattatttatttatttattttgagacggagtttcactcttgttgcccaggctggcgtgcagcagtgcagtctcagctcactgcaacctctggctcccgggttcaagcgattctcctgcctcagcctcccgagtagctaggattacaggtgcctaccatcacgcctggctaattttttctattttagtagagacggggtttcatgatgttggccaggctggtctcaaattcctgaactcaggtgatccaccggtctcagcttcccaaggtgctgggattacaggcatgagccaccatgcctagcagaattttatgctttataaatcattaatgcatgttattttctttttaggtgaaaaatgttacttaatagtgtcattatctgttctataagactcattaatttcccaaacagttatagaagataagatacaaatagtatgttctcaattttaaaaataaatacggggatagtactattaacttgcccaagttatccattcatgcagtagaagagattcctaattattagcataaaagttcactagatattctctgaatatcagtgtgtctttctagccagtaatttcaattagcatgacagtcaatgagatatacttaaaatttaatattttcaaaagcctgaaattgtaagacactgcgaatgtctttatgctgtgtattaaaatgattacatataaagagttgacttggttgttaataaaaaacacccattagcagatttaacaactgtgttaaaaataaaatgttccaagacaggaaataaaaggttgaaacttttctttagttacagcaataaaagccataaaagtgatggatttttgaaatttatatgtcaaaagttcaaactatatttgaagagttagattttgacacttacaaagtgtcaaaaatttgacacttacaaagatcagtgttctcattctcccagtaatgactgacagacacagacgggtcacttcattcctcccattaatagaactgagaggggaaaggctttttccttaatccaaaaacaaacatgagtatagcaaagctcattcacatgcccaaatatcaatgtaccacacaacctgagttcagatcagtgcacttgggtaagcatagtccctgataacattctgctcttctacatctttaaaaatatacaatagtttaaatttaaaatgaccatttaattattctctctataagtgtctattgagcaccactgttttccaggcatattatagatgaagagaacatggtggtgaaaaaaatgatcaaggttttatyatatcatagagatgccattttagagatggttatagacattaagcaagtaaattaatttcacaatacaagcaagatgtgacaaatgctatgaaagaaataagacagaatgatataatggagtgactgggaaaaggaggacatgtgaatttggagttcaggaaagtcatttctaagcaggagatatttgaggctatacaaaggtctgggtacagagcaatctggacagcaggacagcaagcacaaaggtcctaaaatgggaacaagctcggtatggatggagacaaatacaaacattggaaggaataaagttaccaacacagctttgttacaggtgatgagaaagcccaactgagagaaaatgatagctgtgaaatccagataacccatcctgccacttcagttgattaatcagaatttctagttgtctcaatgcagaaatgtccaggctaatatcaccattttccatgacccacttctccactggaaataagatttatcttgccaccccaaatgataccatctctagaggggcagggaatttaggaggcaatgtgagagtcaggccaaatttaatagtcaacaatgacattattttcacaatatatatttcctcattttagggaaaatatgaatcccaggaaagccacttattgttgtggaactctaagcattgtagagcagctctggctttttggaatttggtcctgccaaggtgtggatttttcctttcagtggcatttagcagatctcgtccataactaggcacggatggcactctttttcactttttgttccttttatagcagagagttattttctaagtacaaatttaaatttgaaactcaccataatttatttgcttccagaagagttcatgtttttgattttaaaatattaaaataaaaattagatgaaaagtatcaaaggaactagaagaacaaaagttaaaataagaaatactaaggctcttaaatataatttaaaactgatttaaatagatacttaaaaacactgaagaaatgcttttttgaaaaacattttagggtactaaaaaatatttagtaccctaaatttagtaccatttaatttagaaattaattggtgttaataaataaatgtaataatctaatatacataatatatgtataaattcaaattatattatatattatatactgtataatatataattatattatatactgtatataatatataattatatattatatacagtatataatataattatattatatactgtataatatataattatatattatatacagtatataatatacaatatataatatataatatatatataatatacagtatataatatataattatatatataaattaaattttatatatataaaatttaaaagtatatatatatatatatacttttagtttagaagagcagagtctgtgtagattaaactccttcttggtaggcaaaagtaacccaaagatcatcctggaaaagtatactgggaggaaactkytggtgaaagtgaagtgaatacaaaactaaacatcttgaatttggcatagattcagctgagagaagcaaaatttgtaagcagaaaaagaaggataaaggtaaatgggaagggtgtttggacttataaaggctcattaaactttatatcctttctctatataattttctgccagtacaataacacaccctgggtacataatgaaataaaaggtgataatagttagggtccagtgtcattctgtgcctaaaactttaaataaattgccattccatatggatgttaaagcattcatgtgacaaatcatcacatartcgtgtaatgaaagggggytgctgtttttcaaatttgttgattaatagagtagttcaagctaaagttgctttttacaaagtatacaatattaggaggcaaattacctggcagggggtagcctgctcctgtcactccatgagcttccggagtgaagtaagcccaaggatgaagcctgactcttggtcatcttgagccaaaccaagctacatcacctaatccaatcctccagaaaatagaatcaactggaggtcagtggacaattgttgacagtggaaggctaagcaaatgtattagctttggaattacacagatctaggtttaaaccctaggcttatgggatataagcagccacttgcaagttttgtaactctgaggaggtgtcttcacctctgtaagcctcaatatttttttaatgtaaaacacaatttttttctttttccagaaacagagtatcactatgtggcccaagctggtctggacctcctaggtgcaagagatcctcccacctcagcctaaaacacagattttaatgcccaattttgttataataagaattaaataagttaatgtacgtaaagtttttagcacagcagttgatccctgttgggccttcaataaacagtactttggaaaaaaaaaaagaattctcttttaagcaatatcttcttatgcttactaaagccatagaatgggagcttgggcctcttcccactctgtgaatgttcatgaccacagcccactctgcatatgagacaacgaaccatcactaactgcaaaggagcaaacaacgtgtctccagtcagccttagtgaaaattsctcctgatccctctcttctttcaggggttgcagcagctcagacaatccttaccatgtgaaaggaggaatgactgtcatggcatgaaaaaagcatcactatggtagcttatttttccggttttcttttctttgagcatgtttagagctttgaacatgtagaactggccagagtctggcacatcctaatcagttttctttgccatcctgaaaagtcctgtgtaccttctcatcattcagttggcatcagttctcatcttggtccaggcttaacttgcacttaagagtattgtgagcataggaggggaattagtgtggcatttggtggaggtacagtgaagaagggaactggattaggaggctgaagtcttggcttcttggcttgttgccagttgtggcaaagtacctcaacatctctcaattacaaatgctaattcttactatatagcatttgtatgtatgtgtgatggtgaaataaaataataagaaactggtttataaattatatagagctattaaaaaataagacctttattcttgtagacctatttgatgtataaaataaatattgtgttatatttaactttaatattaataaaatcttctccatttatgaattccaatattgctccaaaatggactttattcttaccctgtatatctataaaatgtatcattataaataacatatattacaaatgattagtaatttaattatctgattttaaattaacattaagatactagttcagatcagcctgtaaacacacaaattattttcctgataaattacttttgcatatattgcttaggtaactaacaaaggtagagttggaaatcttgagtgtacaaagtatttttcatttagaaaatctaaagaattacatattataatattaagccatatcttctactaacatgagtgaaacaggacttggctttataaaatctaggatctgataattctcttttacaatataagaaaattaagcaattgaaactaacatagcccttgtagawttttttacaacaccttttttttagatatgtgtacttcctgataagcagagatgatgaaataatggcctattaaaagcaartaagtttctataaaaacgcccaagcagggatttaaggcatctcctgcatgcacagttgcagttagttattccaggtattatttttgttttcagaaaaagaaaactcagtagaagataatggcaagtccagactggggatatgatgacaaaaatggtaagagttctcctgtttatatagatcaaaatgataacttgttcccatttccaacagaaaagatattaagtatttaaaataattgtacagctataggttaattgttgaactgtctgctttaaataattatactatctttgcatgtattcttagcattgtcttttggggcatggctgactacaaaatatgtttgatatatatatatacaggcatacctcagagatactgaaggttcagtttcagacccctatcattaagcaaatatcacaagaaagcaagtcacataaaatttggagttttccatggcatttacaagttatgtttacactatgctgttgtctattaagtgtgcaatagcatgtttaaaaaatctacataccttaattaaaaatactttattgctaaagtatgctagtgatcacctgagccttcagaagtattaattttttttttctttgacacagagtcctctctgtcgcccaggctagagtgcaatggcatgatctaggctcactgcaatctctgcctcccagattcaagtgattctcctgcctcagcctcccgagtagctgggactacaggtgcccaccaccacgcctagctaatttttttgtatttttagtagagatggggttccaccgtgttagccaggatggtcttgatctcccaacctcatgatctgccctccttggcctcccaacgtgctgggattacaggcatgagccaccacgcccagccaagtattaatctttttgatggtggagggtcttgcctcagtgtggatgactgctgactgatcaggatagtggttgctgaaggttgggaaggctcaaagttatccatgactttggaattaacttctttcaaactcctgttaatgttgataacttgaccttctcccatgaattacaaatgttcatgcagaatggtgaatcctttccagacaacttccatttcctttactcagatccatcataaaaaaaattattatctatgggaactacagccttacaaagtgtattcttaaataagatttgaaagttgaaattactccttgatccatagactgcagaatagatgctgtgttagcaggcataagcataacatcaatctccttgtamatctccatcagagctcctgggtgaccaggtgcactgtcaatgagcagtgatattttgaaaggaatcttcttttactgaggagtagagctcaacagtgggcttgaaaatagtcagtaaaccaggctgtaaatagatgtgctgtcattcaggctttgttgttccttttacagagcacaggcagagtagattgagtataattcttaagggtcctaggattttcagaatgttaaatgagtgttggcttcaacttaaagtcaacagttgcatttgaccctaacaaaagagtcaggctgtttttaaaactttgaaaccatgcattgacttctcctctctagctatgaaagtcctagatgctatctccttccaaaagaaggctgttttgtctgctctgaaaatctgttgtttagtgtagtcaccttcattggttatcttagctagatcttctgtataactgtctgcggcttctgtatcagcacttgccacatcacctcacactttcatgttatggagatggcatctttctttaaatctcataaaccaacctcgactagcttctaacttttcttctgcagcttctttgcctttctcaggcttcacagaattaaaaagagctatagccttgctctcattaggattyggcttaagggaatgtggttgttggtttttgatcttctatccagactatgcaaactttctccatatcagcaataatgctgctttgctttcttatcatttgtgtgtgcactggtgtagcacctttaattttctccaagaacttttcttttgcattcacggcttgactaactggcacaagaggtctagtttttggcctgtctcaactcttgacatgccttcttcactgagcttaatcatttctagcttttgatttaaagtgagaaacatgtgactcttcctctcactggagtacttacaggtcattgtagggttattaaacagattaatttcaatattcttgtctcagggaataggsagacttacagagagggagatagatggggaatagccagtcagtaaagtagttaaaacacacacaacatttacagattaagttcatcatcttacttggacatggtttatggtgccacaacactattataatagtaacatcaaagatctccatgatagatatatgaacaattaaaaagtttaaaatattgtgagaattaccaaaatgtgacacagagacgtgaaataaacacatgctgttgaaaatatgcccctaataagcttgcttgatgcaaggttgctacaaatcttcagtttgtaaaaaatgcaatatctgcaaagaacaataaagtgaagcgcaataaaatgagttaagcttgtattagaaatctattgctaataataaaatatgtatggtctgattctatagactatgagtatagatctatattagtagtattgacaaatacactattttatagtacaatatagaaaaggggccgggtgcagtggctcatgcttgtaatcccagcactttgggagaccaaggcaggtggatcacttgaagtcaggagttcgagacaagcctggacaacatgatgaaaccccatctctactaaaaatacaaaaaaattggccaggcatggtggcatgctcctgtaatcccagctacttgggaagctcacgcatgagaatcgcttgagcttgggaggcagaggttgcagtgagccaagagcgcatcactgcactccagcctgggtgacagagcaagactctgtcaaaaaaaaaaaaaaaragagagagaaagaaagagagagagagaaagaaggaaagaaagaaagaaagaaagaaaaagaaggaaagaaagaaagaaaagggacatcttcaaacacagaatttctattaatcttaagagaatatcatttaatacactgaaataaaccctaatctaataagcaaacaggtaactatactcctaaaacttggaatcaagcatttgataagrcattgattttacacgtgtttgtcctggtaggtcctgaacaatggagcaagctgtatcccattgccaatggaaataaccartcccctgttgatattaaaaccagtgaaaccaaacatgacacctctctgaaacctattagtgtctcctacaacccagccacagccaaagaaattatcaatgtggggcattccttccatgtaaattttgaggacaacgataaccgatcaggtgagctgaaagacccttctgatatttttttcttacagtctactgggaaaatttaaaaaatagtgctcgagaaatatgacacccattctaagtcttttgtgcttgtgtgcagcattgctgtaatctagtgaggcatcttggacttctggaaaacgcccaggtggtaaagacaatttttggaactcccagctctctattttcagtcttgcttctcaaagtcaccatcacgtctcttctcgtcattccagtatctgtatgctcacttcactgtctctgaataaacagcatttatccagaaaggtctagtgaaccagtcattacaaatataacaactaaaaagaaaaatattttctaattgggatgagtatgaatgagcacagtagaaaagaaaaacaaagcagtgactgaattatccttatactccagaatctagaacaaattttgctacagagttagcttttcatgaaggtttattgaatattttattaaatgacaattccataaaacagttctactgatttaaaatgctaaatttgtttatgagtttctgaggcctaaattttaggcaccttgggactatgtccattattaatattagattaggtctggtattatatgcatttaactaatattatcattggataggctctccaaacaaagttttataagtgccccactgccccactggtactctctcttggtccctggccagggattctcaacaaagctgtcaagatatacttttgtgtcttcatcagttacacagtaggtgatgaatggttcattactcaaaataaactactaaagatttttgatgcatactgtctttgttgaaagaatgaaggaataaacttgcaaattaaaggagattcaaggacagccctgtaatgatataattcactcacattgcaatatgctttctaggagttagaaataggtaaaattgtagctcgtgtggctgggaaatgtgtataattcatggaatagctcatcaatgccacagtcaggggtgcaccatacatatgactgtcatcctcatggatgtgggggaaaacaagatgaaagtttaggcactaatgtttgttttcacttctactcaatacaatttagtgttggtttatattaaatgcaaagataagctagagtttgtggagcatcaggctaacaatcggttcccttttcttccagtgctgaaaggtggtcctttctctgacagctacaggctctttcagttycattttcactggggcagtacaaatgagcatggttcagaacatacagtggatggagtcaaatattctgccgaggtaatgtaatttagtaagtgagagataattaccctgagagtactcccagaagcagcttctcccttcttttctaagacaacatcataatgactccaaaggaatgggtattccagtaaggaactcccagtttccattaaaatcaagcacagacacataatgtttggcaagagagagaaaattttcatgtggaaagaggcagctaaactcctgagcccaagattcacctttccctgagaatgcctcaaaagctgttaccttgatatcaaagctagcttcaaaggatgacactgctcctcctttaaagctgtaaccccaaatggaacacaccatcatttcctctttatttaaacgttcaagtttggatacaccagcagtatcgttgtggccaagccaggacaattcaatgagactctactaagagctcgaatttaaccacagcaatggtcacagaacagcatacacctagatgagggtctaaccttccctggctcttaacctgctctcacatggaagtttgtgacttatttcaggacattattatctgtatatccaaagaaaaatggagacatgtacaccaaactctcagcagagggtctgggagattaaaatgtgagaaattttgctctttattttaggtgtatgaattatataatacatgtgtacccatatatgcaggttgactttttaattttactttcatcaaatgaattctataatatayataattttgcaacctgctttttttctatttacccacttatcatgacaatttttaaaaatcagaagattgaattccaccttttttactgtcrgcatagtatttcatttgggtgaatgcatcagaatttatttaactgccttctattgaygaacaatcacaacatatgatttttgttatattggtttcttttgcttttattaaaaaatgcttcagtgaatatatctgtacatatatcttgtgcactagtgaaagtaattatgtacgatagatttttccagggcagactgctacgttacaaagtatatgtatcttctattctgatagaacatcagcagattgtatacaaataaaacttgctttaccttgtgttgtaaagcatgactaacacctttcaatgctgcagaaatctgttaattgggttttcccctccataaaattgaaggtagattaaaattaaatggactaagagcctaaattagtattatctttttggaaggatagttggtagtatccaagaaaactaaattagtgactctctcatctaaattgagaaaaatcaatataatccatgctagatattgagagacacttagccacaaagtttagcatatgattaaattcagttcaataaaccttcttgagatacctataagacaataggtttgagaggcaatgcagcctgttgcttaagaatgcaagtacccagctgactgccagggtttgaatcaaagctcgaccacttactagctgtacaaattcaaacaaatcactctacgctccagtattcctatatagagaatctagataatatagcattagtatctatcttaataattgttgacagcatgaaaagagttaacccatacagagcacacttagaccagcacctttcatgttgcatgtgctgaataatgttacttaacatttccgtagagacacaagcaaacatttttcaagcagggaagtataggcataaattattgtgattaaataaatatagtagcaaatggcagtatgactattcacaaagaagcataggaatacagatgtaagaataattaattacaagtagggacagaatctacactggcatggtcagaggaaattgcaataagtgatccctcttaatatactgtcttaatcattcttttttcattcaacaaatattcactggacacctacaatatgccagatactgtctttattttttgtcgttatttatttatttatttttgagaaagagtcttgctctgttgcccaggctggagtccagaggcacgatctcggcttactgcaacctcctcctctcaggttcaagtgattctcctgccccggcctcctgagtagctgggattacaggcatgtgccaccacacccggctaattttgtatttttagtagagatggagttttaccacgttggtcaggctgatctygaactcctgacctcgtgatccgcccgcctcggcctcccaaagtgctggaattacaggcgtgagatactgtttttaaaaagtacttgctatcagaacttgcatttgatagggaaaataaaaatttcagaggaaggaaggcaggaaagaagggagggaggraggaaggaagggagggaggaaggaagggagggagggaggaagggagggaggagaataggaagaagagagattaaataagtgatatggatagaactgttttgatttgtggtggttactttatattggatgatcaggaaagaattatttaaggagtggcatttgagttcaaccctaattcaagacaaaagtctgccatttgaagatcatggggaaggaaattccagagaaaattagaagctaatgcaaaggctcaaagttgtgaacatgtgacgaagtataacctgtaagatgtgaatgttgataggtggggaaagcaagaaatgaatgatagttgttgtacttattgattgagcatttaaaaaccttatcctaagaaggtaaaattaagcaggtttggcaagaaggaaatctagagttctattttggccagattaagtctgaaacatctattagacatccatgtagagatatcaagaatatatcaagaatacatatatacatacttggatgtacaaatctagagtttgcagagacgttaagctggagatatttatttgagagatgtttggaaagggcacgaacgtgcctgaaagaatctgttcttggccaagactcccaggaactccaggaaccctttctcataaatttactataaagtacctcatgtgagagaaaattacttcaattattttcccaaaaactagttagtcatatttcctgatcttttcaaaacaaagagagatacatttaaaggagtaatattaaataacaatatcgtaggaaaggacattttgcttactggttccaggttttgtaatctctacctggcacacagataacccttcctacgagtgagaatgtaactcttctaatccactggataaaggttcacataagttttatgtatctaagccaagatacatcatcatatggtaacaagttaacttataacttatcttttttcatcacactggtataaataattaattaaccatagtatcatttttagcttcacgtagctcactggaattctgcaaagtactccagccttgctgaagctgcctcaaaggctgatggtttggyagttattggtgttttgatgaaggtgagttacagataattacacagctctgcttccactgtcttaccaattagacctcaaaatagaaggaaataaggcaacatatattttagaatttcttattttaaagtttccatttaaccgatgactacaggtgaacaaatagttccctagtattttattgcttggttttatctctgcttttccctcttaaagagagaaatgagtttcaggtggaggtgagatagaaatgtgttcacagggaaaaaggaatttctattttccagctcttccaaattccctttcctctaaatttcctacatcatagattctgaaatttattaatttaatgtctcatcaggaaagaaatattattaaatattaataaggaaacctgaaatcatagattcagaaatttatcaatttaatatctcattaggaaagaaatagtaagagaattttttcttacaaagaatattcaattgattttttaaatgggagatgttgctcaaatcctctatagaagaatccctgaaaagttctaygaaaaagttattattaaattgggtatgcccgggtaaccaagtaactcttgaaattatagcacttctacttaacctttactgagcacttacaatatgccaaatactgtagtaatgaaaactaatataacagaccaaaataagagatttgtttttgtgtcagttttgataaattactagattttgccctgtataactttgaacatattgccaataattaagtttaaatcaaactttttgtttgctacttttatctgtaggtacatattataaacaatttatagagtacaaaggccctcaaagacatacagcttgaaaaatntccccttctaaagcagagagaaaataccttacctcttgtcagttgttaattgaaaaaaaattcraaatttagctaagcagtgttcgattgataataatctttatctcatactttattttcttaaatctccaggttggtgaggccaacccaaagctgcagaaagtacttgatgccctccaagyaattaaaaccaaggtaaacacactaaataagtagtttaaatcagagaacaagaatttacagatctatggaaatcatttaatgaagtattaaaactggggagtaggaaggccatagtaaaagctaccaactgaaaatcaaggtgctacttcaatactgcctacctctgagaaagtctctaatgcagggaattgttttggttttctgtttttcatagttatggtttatttatttcagcagaatatggcctgtagaaaaccagattacatagccatttaaatttgcttgaaaaactatatctaacaaaattgtgattttccatttgataaataaagatatctctagttttttagcagtagaaaaattcagaagtaaagggcattcttttgagatatggttgatatacaatctttgataaccataactcttgtcaactcaaaaaaaatggattttttgatatatacaaacttagctttattgttttaaaggtaagcagttaaaccataaatcagagatttgtcatgttttgcagcatggagaactgtcatatatttgtgtaaaatraatctgatttatgctgattctagaaaagattaaacttaaatgattgtcttataaagtataaatgacagagataaaaaataagccctcaactcaagagttatcaaaaaaatatgaaaagaaaatataaggaaataattagtgaagataaaagcagaaaagaataaaataagaaagaaaaatgatggccgggtgtggtggctcatgcctgtaatcactgcactttgggaggccgaggcgggtagattgcttgaggtcaggagttcaagaccagcctggccaacatagtgaaatcccatctctactaaaaatacaaaaaattagctgggcgtggtggcgcacacatgtagtcctagctaatcaggagattgagccaggagaatcgcttgaacccaggaggtggaggttgcagtgagccgagattgtgccactgcactccagcctgggtaaaagagtgagactccatcttaaataaataaataaataaataaattttgaaaagaaaaatgatggctaagtaaggggtaaaattttatcaataaattgaaaagttgattctttggaagaacaacaaaaaagtcagactttggggaagctggataaagagaaaaaaagccgtacatataaaacattattagaaataaataggttgtgactaaagatatagaagaaaattttaagagacaaaattttttataacattatgccagtaaatttgaaaatttagataaaatggataattttccaagaaaatgtgaaataagggaattgactcaaaaggagttagaatacctaaatagactgagaacctaaaagtaaatttaaacaatagtcaaaatgtatctattaaacaaaaagactaggcccagaccacttcatggaaaagggttactcaacttttaagaaacaatcatgccagtgttaactaaagtgcccagatgaaggaacagacagaaaacttcccatcaatttaatggaatctgataccaaaaccaggtatgaaaactacaaaacagacaaacaaaacaaaaaacataggataaactttcttaggaatatagctaaaggaaatcctaaaatttattataacaaatcaaattcaacagtgttttaaaagagtagtttctgaactagtagagtttatcccaaaaatacaagaatgactcaatattagaaaatcttaaattaattcattatattaactagttaaaggtgaagaaaacctcatgatcaacttgttaaatgcttaaaatcatttgataaaagttaatgccctttctttaggatgaaacaaaatgaaagaaaactgtctgaaaacttattgaatttgataaagaatttacctagaaacttgtatcaacatttaacttcatagtgaaacacttgaagcatttacatttcagtcagggacaagacaaaagtgccactgtgaccatcacaattgaaaattataataagggtcctagtcagtgcaacaaaataatgaaagagtacatattatgatagatatcgaaagagcaaaaacaaaactatcattatgtgcagttgatatcatcactaacatccacctgaaaactccagaagaatcatctaaaatacagaatgcataaaagattagcatacaaatatcagtatatttcctacacaccagtaacaatcagaaaagacgataggaataaatagaataaaactraaacaaccaatatgcatgtcaataaagatttttgccattgaaatagaatctggcatcattcctagagaaaaaaataaaagctttatactagaaattaaatatgttttaaagatatagattgtaaaaaagatttttgaatctttgcttatctgcaaccaaatgaagaaggaagacgtcttggtcaaaaacttacatataacacatttttcatctttttttcttctgttgatattattgtttatatccacaaacacgccagtcatgaaatactaaatagtagaaaaatcaatgactcttagctaaaatctctaaataatgtataacaagataatatagcatatatatgtcacatatattcatataagtattttatatcatgctgtaatgatgtattcttttcttccagggcaaacgagccccattcacaaattttgacccctctactctccttccttcatccctggatttctggacctaccytggctctctgactcatcctcctctttatgagagtgtaacttggatcatctgtaaggagagcatcagtgtcagctcagagcaggtagagttgtgaatgaatgggaactgggaatgcgtagcaggaatattactttaattgatagtatcagtgagagagattattatttcagtcagctttgtgagaagttcatttttcctcccaacttaaaaatrttaatttggggacataggtttattaaactatccaaaaatgcattataatactttattttgcctttaygcagaaaaaaaatgactcccgccactctttcctccttaataaggaaaagtccaaccttgttaaatatcttcttaagcatttcagaaataaaggaaaaactgtgactggacatttcaataagactttggggaattgtggctcccagctggcataccttgatagttggcaaaatatttttgttccttttgtggagcttaaacttttaaatattcaacaaaatatctcattaactgttgttaataatggtgattatagtaagtatcattcattgctctaccatgtttattacgtgccttacatatgttttattagccaattctcataacaaacctacaggacaagcattgtagcctgttgctaactgacatttattgagcacatgctatgtgtcaagtatcattctaagggctttgcatgtattaacccatttaatcttcacaacaacacagtgaagtaagtacttatggaaactaaggtaccaagctaataagtcgctcgcccaacgtaccccagctgaaattaaaaagttgatactttaacccagtcatcaataattaaatcaataaaataaagcaaataattaaatttgctttatttaattgatttaattaaataattaaatcaataattaaagcaaaatgcctggttcaaagaaatgaatgtaaaggatttggggctttctctcttcctattagtgatattactgcaatttctaactcagttttctaaatatcagtgcgttagtaatcctgtaaataaaacgctttatgtaactttaaaaactttttatttttaaaatattttatccttctagctggcacaattccgcagccttctatcaaatgttgaaggtgataacgctgtccccatgcagcacaacaaccgcccaacccaacctctgaagggcagaacagtgagagcttcattttgatgattctgagaagaaacttgtccttcctcaagaacacagccctgcttctgacataatccagtaaaataataatttttaagaaataaatttatttcaatattagcaagacagcatgccttcaaatcaatctgtaaaactaagaaacttaaattttagttcttactgcttaattcaaataataattagtaagctagcaaatagtaatctgtaagcataagcttatgcttaaattcaagtttagtttgaggaattctttaaaattacaactaagtgatttgtatgtctatttttttcagtttatttgaaccaataaaataattttatctctttctttctgttgtgcattcagtttctaaaaccattaagtttctactccatttacattcaaaaatcttaaatactttacttgcaagagtattttgcttcaaatacaacaacctaagagcagctggagatgaaatattgggaaattcatttgcttactcctgaagacaaaaatatagctgagatgaccactggatttaatatcgttatgctggcccaacattgctaccatttgtgttgtctgtgatcaaaatgattatcttttatataggaagatgatgcttctggatattgctttcacttcttctccccacgttagcaaggacaatgcttctctgccattattacaactagttagtttgcatggagaatctttactttaaaattggaagaaaagtcacaagtgaatggtttataaaaatgctaaagaagtcattcttgcttagaatcatatagaaacatcatgcaatcttttagtcagatgtgcgcttcaccttatgctatttttatctttaattgacacacaataattgtacatgtttatggagtatagtgtggtgttttctgtttgtttgtttgttttttgagacaaggtctcactctgccagtcagggtggagtgcgatggtgtgatcatagctcactgcagcctcaaaccccttggctcaagggatcctcccacctcagcctcttgagtaactgggactatagatgcctgtcaccatgccagcctaatttttaaatttttttttgtagagacatggtctctctatgttgcccaggctagcagtgtgatattttgattcatgtatacaatgtgtaatgatcaaatcagggtaattagcatatccattaccttaaacatttatcatttttttgtgctgagaatattcaaaatcctttcctctagctatttaaaaatatacaataaattattgttcattatagtcaccctattatgctgtaaaacactagaacttattcctcctattttgccgaagccatatctacatccagaattctacaaatcctgtgtccagtgtttaatcttgtgatttactttagttatctcatttgaagtagtaaagaccaagcccaattgttcatttctgtaagttttagtaaaattacttaaaaaacattaagcagattcttcactgctctaataagcctttctgcaaaggctgtgtttgttttacacctaaaaaccatactaagagacttcttttgaaatatttgacttggggcctagaatttaggtgaatcctctttattaaaatgtaatttgtttttattttatttttaatcaaaattaatttgtttttctacacaaagttgggaaatttataatttattaattgaaaaaataaatacaaatataatggagtcaagtaacacattagctctgcccccacgtgtaatctctaaatataaaatattttatttgcaaaggaatccaactgtgtatgatactctatatttgccaaatattgagaaagcctgcaacacttatacctggcctaggatcctattacttcacatgagttgtattgataggattttaattataaagttatcaaaggctctcaaaaggtgggagccaaagaaagagggatatgagcttaagttgagaaatacatttgcaaaagatgttcatttgaaaacattttctgaaaagaaattaaacaatttagaaataagtttcacaggaaggatctgaaaaacacttgacctgatggtccatatattttttaagaaggttaaaatggattccagcatttagatataagtctgtaagtcttattatggacagggcaaagatgtgacaaaaaaatacatgatgaccatcaaacattatccctaaggcaaatgccaaatgggtagcatgtttccccttactgcctctgccagaatttcatatatttggcagaactcatgagattcattatgaatttctctgaagtagccaataaaaacagctgttgagaggaggtatgtaaactaggcattggatcatctgagagtgtaactcatatgtgtcactgactcaccctcctcttgtatgtcctcatcctttgtcaacttacataaagaatttaaacatcctgcaaggattctctggcttttccatgatgtttggcagctgaccttctttatgccacatctattggcatctagaatgataagccagctggtgaggcccagcgtgggctctaggataaagagtgctcttactgcatgctgttttctgccttttcacttgcccttcagaaataccctgctgtaccgttatcactatggcacccttctgctgaactgtgagtccaggtagaccaaaatattttctatattgttcatttatgtaaggtttagcaaaatgactcaaaatacattaaattcatcataacaggaattagggcaaaggaaagaaagaaaaagaaatatcttcattaaatttaatttccttacatgactcaaaagagcagatatctatttactataactctaggaactccctatccgtggtccttctctgttctgtggtggcagattcctaccaatatgtgattaaagctatgaaacttctctcccttaccaaaaatgttacataatcaaatatagccaaaattttgcactgagtcttagaatgtttagaaactcagccttttgcttccttccccatcacaaagtcattcctggacctcaggaaaagatccctgctctaaactatttaaaaagttaaaaatggactccaagtctctcttgatcttgcatcctagtataatatttatttttgcttttcttcctcatcctttgtaacacatacctacaaatggtatgacagtatatttctggtatcattcatgaattatctttttttcctttctcctctaaaaatattactttgggttgatataaggtttcattgcagaagagatataaaaagattttttttaaaaagagaactcaaaccttagtgaattgtttattagtgggtaataaaagattacaaatgagaataaaagggcatagaagagaaagtttgtttgaggaagatatcattggataaataaagggccaaaatcattttaaaagccatcaatattctctgcatccaagaccatgaaagcataaggaaatacttattttataagcattatcttcttgattatctgtaaaccccaaatgtttatttactcactgatcttctgagacactgcacagattttcttattactcttaatagatttaccagtttttaatttcagtagatacacatagagataggcagacagacagatatagctactgtataaatgagtatatctactttggcaaaatggaactatggatgtaggtatttaaccaattaaaaaatggtagctgattttgtgttcctagactaaaagctaaggaaaataatgaatagaataaaaagtattttaacagaagtataacatgcttgaaataaatgtggagaagtagccataggattcttgtacaaaaaatcttgctttcaataaagaagtaagttataaggagtaaacttagagtcttaaaaatatgcacacactctcaccatgtaccaaaacagtgaactggtgaacaaaggggttgtgtttgaagactttagaatgctcagatcacaagtgcacttactagatgttgcgggaagtcagggaccccaaatggagggaccagctggagccatggcagaggaacataaattgtgaggatttcattttaatatggacatttatcagttcccaaataatttcataatttcttatacctgtcttactttaatctcttaatcctgttatcttcataagctgaggatgtacatcacctcaggaccactgtgataattgtgttaactgtacaaattgattgtaaaacatgtgtgtttgaacaatatgaaatcagtgtaccttgaaaaagaacagaataacagcaatttttagggaacaagggaaggcaaccataaggtctgactgcctgtgggatcaggcaaaaagagccatatttttcttcttgcagacagcctataaaaggatgtgcaagtagagaaggtatcactaaattcttttcctagcaaggaatattaatattaacaccctgggaaaggaatgcattcctggggagaggtctataaatggccgttctgggaatgactgtcttgtgtagttgagataaggactgagatacgccctggtctcctgcagtaccaggcttactagggtggggaaaaactccgccttggtaaatttgtggtcagaccggttctctgctctcaaaccctgttttctgttgtttaagatgtttatcaagacaatacatgcactgctgaacttagatgtttatcagtagttctgcttttgccctttgccttgtgatctttgttggacccttatcaatagttctgcttttgccctttgtcctgttccctcagaagcatgtgatctttgttagacctttattagtagttccgccttttgcagtttgaagcatgtgatctttgtacctactccctgttcttacatcccctccccttttttattttatttattaacccttaataaaaaacttgctggtttgaggctcaggtgggcatcacggtcctaccgatatgtgatgtcacccccgacagcccagctgtaaaattcctctctttgtactctttctctttgtttctcagccagctgacacttatggaaaatagaaagaacctatgttgaaatactgggggtgggttcccccaataactagagttttctcacaatggcatcttggatgctaatcccctaactatgagaagacagaaatagcatttatgttatagaggaacaaactttaaatggctttatttttctctcaaaactagagtatatctttcccaagtcattaataaacattttaataccccttacaggtagaagcatgttatgctatttaggtatgttaccttctactatgttattagatgatctaaattgccagcagaagcaaacattcacaacagaatcacactgtgctaaaataacatttagctacttaaaaaaatagttagaacctgatctcactcatatatcaaaatatatccaagataggttaaatttttcaatgaaatcattaatatgctagaaaatacataaatatttaaataatatctggtaggagaattttattcaaagacaccaaaggcaaacccaggaaatggcagaataatggattgaactgtgaaaaattaaatatgttggtaaaagcagcaacaataaaaaaatttaataaaaaggaaaatgacaaccgggaataatgtttcaatataaatggcatccacaggaacaatgtcctcgctatgtaaaaagctttcacaagttttaacataaaaattgaatttccaagagaaaatgtcaagaagacataaagaggcaatttagtaaagaagaaatacaaatcataaataaatacatttttaaatgacccaacttaataatcaaagaagtacagattaaaataatgttctatcaatctttacattctttaaatcagtaaagatttttaaataatacacagtgctatcaatgatgcaaagaaataagaactgtcatacgttgttgagaagagcataaattggtaccatctgttcactattaatacaaagggtgtgttccagaagaagtcttattataaaaaatcatgtaacaaaaaacgataggttcaatgtaagaaaaaaagagttaagtggcaaaattttaaacttgctataataaggttcgcttatccataactttggcttcaaaggctatgtaaacttttattaggtttatgatcttaaatttacatttttatccaagactgtttcaaatgcccacatccaatgcctatttgatatttccatctagatgtcacaagaacatctcaaactattcaaaacatggttcatgatgccctctcaaagctagttcccaccagccccactgtgcacagagatgatgaggcagcagga

SEQ ID NO: 94903 - DNA, 50510 bp, Homo sapiens
  misc_feature (1)...(50510): n = A,T,C or G
gtctgtctgctgtcatgctgtaatgataatgctgagtacttgcgacagaaaccgcatagcctggaaagcctaaaacatttattacctaggccttgaccaatttaattttttttttttttgaggcagaattttgctcttattgcccaggctggagtgcagtggctcaatcttggctcaccacaacctctgcctcccgggttcaagcgattctcctgcctcagcctcctgagtagctgggattacaggcatgcgtcaccatgcccagctaattttgtatttttagtagagatggggtttctccatgttggtcaggctggtctcgaactcccgacctcaagtgatctacctgccccagccccccaaagtgctgggattacaggcatgagccactgcgcccggccctaattttttttttaaacagggtctcactctgtcgcctatgctggagtgcaatggcgcgaacactgctcactgcagcctccacctcccggactcaagcgatcctcccacctcctcaaccccccaagtagctgagactacaggtgcacaccaccatgcttggctaatttttgtattttttgcagagacatggtttcaccatgttgcccaggctggccttgcattcctgagctcatgtgatccaccctccttggcatcccagattctggggttacaggtgtaagccaccacacccagccaccaatttaaaactttaaaacattgccaatccctatattagagttgagcagcatggtggtattattcagaatattgctattttatactcaaatacacaggcagcttaaatgaatttttcctcccagcatttcaagaaggtagaaaaaccttaatgtcatgagtttgggttccctttcatctgatgattatcaataattttcattcttccaggctaaaaatggaagctcccagttatgtagaagatatttccatctggatccgtcttagaaagtgaaacaggaaatggcttaatcctagaggagaagataagactggagaaattactggggaaagggcggttaagggctttctgcaagtgcttgagactatccctgtggcaccccctaccacagccctaggaacaatagcataagatccttgcaccaataaatgtcacagaaaggatggagttttctgcctttaaatgtaatgtggactttggcattgagcatctcagcagccactgtgatgaattgaagaccagagaaattttcctattttctgggcactaggtaagccacccacttccatatacttgagactgagatcacatttttatgccaaattaagaagggaaagtcagagtcagatttaattttatctaaaattttaagttttatgatgattctagcacacttatactcaagtattgaagtgttatgatgatcctctttttggagacacaaaggcttactgcaacctccgcctcctgggctcaggcgatcctcccacccctcctcctgagtagctcagattataggcacgtgccaccatgcccagctaattttaatttttgtagagatgaggtcttactatgttgctcaggctgtcctggaactcctgggctcaagcaatcctcctgccttgatctcccaaagtgctaagattacaagcgcgagtcatcatgccccacagtgatgtttcttaaactcaaacattttaactggcaaaaatggagctgcaaggccttgtagatatacatacatatggccgtgcgtggtggctcacgcctgtaatcccagcatcttgggaggccgaggccgaggcagtcggatcacctgaggtcaggagtttaagaccagcctgaccaacatggagaaaccccatctctactaaaaacacgaaattagccgggcttggcggcgcatgcctgtaatcccagctactcaggaggctgaggcaggagaattgcttgaacccgggaggcagaggctgcggtgagctgagatcatgccattgcactccaacctgggcaacaagagcaaaactctatctcaataaataaataaaaataaaaaagatatatacatatatctgtgtacatacacatatacatacagcataacatgagcaagccctagacccagagatggacatgttatgattgtgggaaaggtctattatgggcggaggatggggttgtggagatgctattgaagatgagactgtaagataaactaatgaagggccttaaccaagaagggttcatttcactttagtattttaaaatactttagtatttccaaaaaataaggatattctccctcataaccacaatgcagccatcaaaactcaaaaaatggatactgacacattactgctatctaatccataattgtcattcggattccattaattatcccaataacatcttttataacaaaagaatcctattcaggataaagtgttgcatcaggttgtcatgtctctttaggtacctcttacctgaatagaacctcaatctttccttggctttcccggcttgacgcttttgaaaataaccgttcaatcattttttgaaatgttttagaatgtttctttttctattgtttcctcatgattagatttagtatatactgttttgggtgatggggagaaagacagacaaaaataccagaaaagtagtgctgtgatctttcattgcatcctattacttagtacatgattttatttgtccctttacagggaaatatgaattttgatcactgcattaagacaacatctatcaggtttctctcccatgaagttgtcccttctcaggccgggcacagtggctcacacatgtaatactagcactttggaaggccgaggcaggtgggtcacctgaggtcgggagttcgaggccagcctggctaacatggggaaaccccatctctactaaaaacaatacaaaaattagccaggcatggtggtacgtaccttagtcctggatactcgggaggctgaggcaggagaatcacttgaacccagaaggcggaggttgcagtgagctgagattgcaccactgcactctagcctgggcaacaagagcgagactccatttccaaaaaaaaaaaaaagaaaaagaaaaccagaaagttactcctcttttaatcagtatttttttaggagccagtttaaactatgtaaatatcccattattcatcaaactttcatgtactagttttggtacacatattgatgtttcttggctgaattgttactatgatgattgccaaattttaatttttgtatttccatcttcttttctgcagtcatcagttgacattttattgctagtaaaagctttctcctccacctatgtatttattgagatcagtatgagctcataggttgctatcttattcaacagattatagtctttttttttttttttttttgagacagagtctacctctgtcacccaggctggaatgcagtggctcagtctctgctcactgcaatctctgcctcccaggctcaaatgattctcctgcctcagcctcccaagtagctgggactacaggcatgtgccaccatgcctgctaatttttgtatttttagcagagacagggtttcacatattggccaggttggtctcgaactcctgacctcaagtgatctgcccacctcagcctcccaatgtgctgggattacagagctgagccaccacgcctggcttcacactatagtcttttattatcataatttattttgatgttcatattacccagatttgtacagtgagtgctccttcacctgccccactattttgatccatccctaccattctttgaccacttccttactttctgggacaacaaagcattccaggctcattttggacctgtgctttgccaatcttagaatcagtcatttctccacagagccctggttcctttaggtgacaaatgatacttagaaaccaagatctggggccaggcatggtggctcacgcctgtaatcccagcactttttgggaggccaaggcaggtggatcacttgaggccaggagttcaagaccagcctggccaacatggcaaaaccctaaaaacattaaagttaaccaggtgtggcggcacacacttgtaatcccagctacttgggaggctgaggcatgagaatcacttgaacccaggagacggaggttgcagtaagcagaaatcacgccactgcactctagcctgagtgagagagtgagactctgtctaaaaaaaaaaaaaaaaaagacaagaaaagaaaaagaaaagaaaccaagatctgggctgggtgtagtggctcacgtctgtaatcccagcactttgggaggccgaggtgggcgggttacctgaggtttggagttcaagaccagcctggccaacatggtgaaactctgtctctactaaaatacaaaaaaaattagccaggcatggtggcaggcgcctgtaatcccagctcttcgggaggctgaggcaggagaataacttaaacccaggaggcagaggttgcagtgagccgagatcgcgccattgcactccagcctgggtgacaagagtgaaacttcatctaaaaaaaaaaaaaaaaaaagcaaagaaaccacgatctgggaagttgatgcttccatgtctttgcagtgaccatagctaggaaatacatgcatgtgtgtacatactatttgtctatctacctatctatcagtattcacacggcacatcaactgtatttatttctatatgtacacaccatgagttcatgctgatatctctaatttcatttgaataccaaaggttttagttttctaccattccattgttgtcattttttcctggctcccttatttgaaatatatgtactcatttggttcatcttcctgtatgtaaccagtcttctttcactgttgccacctacttcccctacctccatgacatgcaggtgtcctccttacccccatggactctcatccacctgggctgcggccatcttcatgtgctgccacctgaataggtggtttccccaccctgttcactctcttgctttctgtgggctgatgccgtctctctcctccttataagacctaatgtcttttagacttaagaaggaaggaaggaaaaaggaatagagaaagggagggaggcagagaagcagatagcagagtttgagattttattctataggcaacgaaggacttgtcctcctctccacaccccacccgccaaaacacacatgagattgcttattgtagggaataattttgttagctgcatgaaagtagcttagaagaaggaatggttgcaggcagggaagtagtggttcaggaaataagtgatgaagccgaacgaggagatagatatccttagatgactgtgcacccactatggctcctctgagcagccaatgcatgacaaacagtcaataaaaattatatgcagtctgcatttccgtgtagtttcttcatgggtcaaataaatattagagctactttccaatgaaatttttatttcttggccaggcacagtggctcatgcctgtaatcccagcacttttggaggccaaggcaggaggatcacttgagcccaggagtttgagaccagactgggcaacatatcaacaccttatttctaccaaaaatacaaaattagttagacacggtagtgtgcacctgtagtctcagctcctcaggaagctgaggtgggaggaagctgagcttgggaggttgaggcagcagcaagccatgattgtgtcactgcactccaacctgggtgacagagcaagaccctgcctcaaaataatgaaagaaaaaagaggaagggagggagggaggaaaggaaggaaggaaggtaggaagaatggaaggaaggaaggaaggaaaggaaaagaaatctacatttcttatgaggaaccgatcagatgaacattttcatgattgattgtggaaatggggaatctttttttaaccccctaatgacaggagcatttatttctagactataaatgaaaatttatgacacagcctatataagaaaatgcagcagaataaacaggatccaccacctttctctctaggtcaaattcctggaaatatctggagggtaagaaccagtgaatgaaaagagatggttaatgctttgcagtgaaggaaaagtgactcgcatcagtagattactatgaagctgcaagaggtgagtcacaggctttagcttttcatggtatggtttctgtattcaaataccatgttacttttatgcatgcttttctctcgtgctcttttcagggcccagaaaaaaaagtcaccttggatttccattcatgaatacatacttctgtgacataggaggtgtgaaagaagcatttgctgaatgaaataaaacttcctgaaatgtaaaaataggcaagggtttgtagccatacactaaaaattattgtaaagcactgtcactgttagcatggccaagatatacctagaagaacacttttygtcttcttgtagcactgcttcttggatgtgataggtgctccacaaatatactattaatttaattaagcaaatttgatttagaataatctcctggccaaatgcctagggatcttgaacctgaactaattatagtcacaaagaagggcttgcatttgaaatcttcgagggttaagaatggtcaaatacatgtcacaaagacaataaaaatattccaagggcatgcgtcgtactttttcactctttatgatacttggttaaaatgcaagtaatggttaaaatagaggaactgtgaaatatttagcaggtgcatatttaaaactcagaaagttggcaaaggcaaagaaggcagtgtgctattaaatttaaaaaaatgaaaggatgcagtgctttgtaattatcaagtttaattgataatgtaaactctcaactatctaagtctcaactatgattttgtgtttcagttgaaagtgttattttcagagtttacacagaccaaagcagacagtcaaaaactgagagaatgcttgaaagaggtgaaggagtgggtcttgcagatatttagggggaaggtgctccaggcagaaaggccaagagcagaagacagcgtggcatgattaatgaacagaaagcagcacggctgaagggggtcacatagggttctgcaggtcattgcaagtactttgcttttgttagtttattctgtcttttgttttgttttgtttttgtttttgtttttgtttttgagatggagtcttgctctgtcgcccaggctggagtgcagtggtgcaatctaggctcactgcaagctctgcctcctgggttcacgccattctcctgcctcagcctcccgagtagctgggactacagacacctgccaccacgcccagctaatttttttgtattttagtagagacacgtttcaccatgttagccaggatggtctcgatctcctgatctcgtgatccacactccttggcctcccaaagtgctgcgattacaggcatgagctgcacctggcccattctttctttctttaattattattgktattaatttttgaggcagtgtygcactctgttgcccaggctggagtgcagtggtgcgatctcgactcactgcaacctccgcctccaggttcaagcgattctcctgcctcagcctcctgtgtagctgggactacaggcatgcaccaccatgtccactaacttgtatttttagtagagatggaatttcttcatgttggccaggttggtctcgaactccagacctcaggtgatccgcctgccttggcctcccaaagtgctgagattacaggtgtgagccactgcccccagcttttttgatatatttctttacaatctttttttctaggcatatatactatattgcttattaaaatttctgtgtagatactattttataatctatatatatatacactttaataagtagtttggaaatatggcatttaatgtctttcaaaaattatatcattttgatatacataagttgttttaacccttttcttatcattatcacttctgttgtttctagagcttttttctgttataaatacactgtaattaacatccgtttgaataatctttgacagaatctcttaatattttctcaggcagcgtgtctatcaataagatctaaagttatgaatacgcttaaaattcttgatttaaattaccaatttttttccagaagatcatatattctacatttctaccaatagtgtatggacatggctgtttcgccatattcttattacacaaattgtttatacatttttggtgggtttttttgtttgtttttttgttttgttttttttgagacagagtcttgttctgtcatccagtctggagtgcagtggtgcaatctcagcttactgcaacctccgcctcctgggttcaaactattctcctgcctcagcctcccgagtaactgggactacaggcatgtaccagcacgcccagctaatttttgtatttttagtagagatggggtttcaccttgttggccaggctggtctcgaatgcctgaccttgggtaatccacttgcctgggcatcccaaagtgctgagattacagatgtgagccaccacgcctggccactcttttttttttttgagacaggatcttgctcgctttgttgcccaggctggagtgcactggtgagatcactgcttactgaagcctccatctcctgggctcaagcgatccttgcacctcattgagtagctggggccacaggattgtgccatcacacccaactaatttttgtatttttttttttttttttggagacagggtttcaccatgttgcctaggctgttctcaaatgcccaggctcaagtgattcacccacctcagcctcccaaagtgctgggattacaggcatgagccaccgtgcccagcctgatacgtttttagaagcagaaaaaatttgattaggaagaaagggcatacagattgttttaaaattatacatcttttgaattttgttttaggcttatagtatagtggagtatttttttgtgtctgtgaaattaactgattgcttaggagttaaaactgacaaaacttagaggtgaagagaaaaagagaaaatcagaaattaatgtgactatgaagtttctggtttgtgcatctggtggatggtggtaccattggatgagatagaaatgtgacagggaagttgggacagggaaaaactgtataattccatgtgaacaatttaagttgaagtcattggatctaattcagtagatctagagctgtgccgccagcataatagccactagcctcatatggctattgagctcttgtaatgtggctaccctgaattgagatgtgctgtcagaataaaatgtacaccagatttggaactctttgtaagaacaaagaaggtaaaagataaatgatagtatcagttaagatccaatcaggagacaaatcacacagtaatttgaacagggaaagtttactgtaaagaattattaagtataatggggcaactataaagatgtaaaagataactctaaacaatatcccgaggctaaggaagtttctaatgagggacaaacttggatgccagcctccgttccaaagggattcagatcactggagaagatacggttgcaacccagtggatgacagagaagtttgctgggttgtccaggtctgagctggtccacagttactagacaagcgagaaacagggtacaggtgggctaagactggtgtgcaagactacaggtatgcagagggactcaaagcattgggaacaactctggctgacagatgcatagcctagagtggacagtgtccatgtcaggaggccatgggaaacactctttggggtgcaggcagactagggctggtgggcaggtatgcagagggagttggggcatctgcttgccaatagggtggcatgaggcctggagtatgtggggtttgttttgggaggggcagtgaggtggtcactgggttagggctagggttgtcagcttactgagagactgcatactcttgagtgtgctgctgggccggagtgcctggatgtctctatacacggccacatgtggctgctgaaagcagcccagcaggaacaagaataaaacaaaaaacacagcattcaggaaccaggaagagaagttcctttctccagcaatgaccttctactgaagaaagcttaacattatgcttgctgcaaaaaagaaatgcttaaagcttcattatcacagagctggtaatgcagggtaaaattagacgtgaaagacaataaattgataactgaaacactcattaatttttatttattttattttttttgagacagagtctcactctgtcacccaggctggagtgcagtggcatgatctcagctcactgcaaccttcatctcccgggttcaagcgattctcctgcctcagcctcccgcgtagctgggattacaggcacccaccaccatgcccagctaactttttgtatttttaatagagacggggtttcgccatgttgcccaggctggtttcgaactcctgagctcaggcaatccgcctgcctcggcctcccaaagtgctgggatttcaagcatgagtgcattaatttttttttttttattgactaatgttgaaatgatatttttgatgtattaggttaaataatatatatcattaagaataatttcactttcctttttagtttttaaagtgtacctagtcaaaaatttaagtaacatatatgcttagcacttggacagttctggaatggatgtctaagctaggtagattacttccataagaactgatggaagggcctaggaggagagtgtagagagaggagagattataggccccaaacccccaaatttaaaggttggtgtgatgattaattgtatgtgtcaatttgggccatgaggtgctcggatatttggtagaacagtattctggatgtttacatgagggtgtttttggaggacattaacatttcaaccagtagatggactaaggcggactgcctccctaaggagctgggccttatctaatcagtgaaagcctgaatagaaaaaaaaaaaaagctgaccctcttccaagtaagggaaacttccttctgcctgattgtctttgggatagggcatcggctttttcctactctaggattcaaactgaaacaatggctttacctggggtcttgagcctgctgggctctggactgaaactacaccatcagctctcctgggtctccagcctccagcttgcctactcactctgaatatcttgggacttgtcaggcttcataatgaagtgagccatttttaataataaatctcattttctccctcaatacgtatacatggttttggagaaccctaactaatacataatacagttgagtatagaaagaagaacccaaggaattccagagagcatgggtgggtagcaaatggaaaatgtaaattcaggaagaaagtttcctgctaatgagaagaaattccagaacatgttagtatgctgatggcaataataaagaagagtgaatggagttggcaatggaggctgtaagggataaaatattatatgtttggcaagagtgcaaggttttgctaggcacatagggctagtgcagcaagctttcagtagtgaaatggtggcaaccaggtcagaatttcttggaatgagggtaaatcacaccttcctcggtggtgagatggggatatgggtactgcttttcatagaacaaactgtccggccagggggatggtggctcacacctgtaaccacagcacgtttagaggccaaggcaggtggatcacctgaggtcaggagttcaaagccaacgtggtgaaactccgtctctactaaaaatacaaaaattagccaggtgtggtggtccatgcctgtagtcccagctactcaggaggctgaagcaggagaatcacttgaacccgggaggcgggggttgtggtgagctgagattgtgccactatactccagattgggcaacagagtgagactctgtctcaaaaaaaaaaaaaaaaaaaaaaggaacaaatcttccttttctagaggacagaaaggaatagataaaccttacaagagctgatgacagaatgccgtcatgcccctaatatcgctctgtggttatatttcaaagagttgacagcaatagaatgacaytgacttattcattctaggccaaggaactactaaattctttaacagccgaattactttggcatgaattatctggacttttcaacactgatctgatgtttatacaagtgtatttcctttcaaatagtcttgatgcttcctttttctctttcacactttacctacttttgtaatatgcacaaataagatatgaaacactacaaaatagggtgtagataaatttcgattagaaaactgtataaaattaaacaaaagaacaaaaatgtagaaattgggttttagcaatgtgttcttatctgacaatataggacaaagaaatgtttggctctagtttccgaaagctatcattggagaggtgactggggaagagatttattgaagttatcctttcaattttggtctgagagtcctcatcttggtgtgaaaccttggtcacctgagaaagtcctttaacccttttgagtctcaaattcctctttgggagattgcattatgtaagactaaccttaggataaccttaggaataagaaaataaagaaatcgaaaccccatatagtatcagctccataaagtcaacaatctccacaagctatcaagtgataagacattcttgtgggtagtacatcctggttgtacaaatcacaggactcaatgaataaaggaagctgggcacaaattggagagcatcttggacttgggactctgcagactggtgctatgtccctgactgtgtggcttgcctctctaggggactggggaaccttgctcatctaagtttcgtgcttggtaaaaatcagatgataatagctactttggttcacatttagagtttttaaaaataatacctgggggctgggtgcggtggctcatgcctgtaatcccagcactttgggaggcagacgcaggcagattgcctgaggtcaggagtttgagaccagcctggccaacatggtgaaaccccatctctgctaaaaatacaaaaattagccgggcatggtggcacatgcctgtaattccagctattcgggaggctgaggcaggagaattgcttgagcccaggagacggaggttgcagtgagccaagagggtacactccagcactccagcctggccaacagagcaagactctgtctcaataaataaataaataaataaataaaaagaatacctggaaaaatgtgcatctcagggagagtctgtatacatgccctaataaaacaacatgaacttatactctgatatttccttaatatgttactgtgttaattaaatatttttatggctagatttgtaatttacaagtgctgctttattatgacacacagtgtcattgaagaggagagcggacttcagcacattttgttccttaagggagcttaaattggatctaaccagttcaaaagtgaagtgaaaaaaaaacacacatctccactgaccaaaaaaagagtgaggtggagatgatgaccatatcgtgggtcagcatttctgggttatttggttagtgttagtctttttgtttttgttttttgtttgagacagggtctcactctgtcacccgggctgaagtgcagtggcatgatcacagctcactgcaacctccgtctcctgggctcaagcaattcactgcaacctccacctcccagactcaagtgattcttctacctcagcctcccaagtagctgggaccacaggtgggtgccaccatacttggctaatatatatatatatttttttggcagagacagggtctcactgtgttgcccaggctggtcttggactcttgggttcaagcaatcctcctgccttagcctctcaaagtgctgggattacaggttgtgcccaaccagtgttagtcttcttttacttgattacacttaatggttgtaagcctggagacagaggctccttgttaaagagaaaccacacaaatagttatgaaagttatttagtaagttaatggattcattgatttgaagaagtaaaaagatgtttgtttcctcagttgtttttttttttttgaaaaaatttcaaacctacggaaaaaaagtaagaatattatcatgagctcccaaatatcctccagctagattaatcaattatttactgagacatttggaagtcagtttcagacatcaagatattcagccctagcactttaggaggccgaagcaggtggatcacctaaggtcaggtgttcaagaccatcctgaccaatatggtgaaacctgtctctactaaaaatagaaaaattagcggggcgtggtggtgtgtgcctgtagtccagctactcaggaggctgagacaggagaattgcttgaaccagggaggaggaggttgcagtgagccgagattgcgccactgcattccagcctgggcaacagagcaagactcagtctcaaaaaaaaaaaaaaaaaaaaaaaaagtacttcagccctgtagctttagtgttgaactcttaaatcattctcagtaccattatcactcctgagagaattagtatcaattaataatatcacatagatgctgtccatatttaaatttctccaaatgtctcccaaatatttattacagcttttatgtaacctagaatctaattaagtatcatacattgcatttagctgttacatatcttttgtctcttttaatcctagactgtgtgaatatcctattccccaatatcctttcatccagaagttttagtacccattactgatccttgcctgaatcagagattatacagagattatataggccttgcaaaaatggtggttttaaaattttatcatttcatctgtatttgctagtggacataaagaagatctctcattctctctcagcatcactatgcactgatggatatttggtgggtggggagttataatctattactatcattatttcttttgatggtcaaattatcccaaatttgtcagcagttcctccttcaagctaccttatttgtgcgtatctgtgtatgtgtgtgtgtgtgaatgtgtctgtktgtgtgaatgtgtctgtgtgtgtgtgtgtgtttgaatgctttctagctttctggcataagaaatatgttctaggctcatcttagtctttctctgctctagacctgaaactgttatgtaggtagtcaagcagacctaagcagggcaggagagcccctactgccccccaaccaagaatgtcagacaaccatcaggtgatggtcaggcggttatcaaactgcttctctaaaataataattggttgcagctggcatcaggaaaaggcagtctcccaagagatagaaacacttaaagttggtgatcagcagcttcccagtaggatctcaggagttggttgagtggtctcaagcatgcacactaagaggcaaatggcagagtttaactggtatatgaccttcctttaggaacactcaactggtaaggaaaaaacccctcaagtgagcatgtgcacaattttggtaaacacactgtgcatacagcccctttcaagtgttggcagtccactatgcctgcggacagcccaccccaaagaagaatcagggaagaaggattgcaagaccccagaagcatgccaatgtataagaccccaagtcaaaggtcaaacagtgcacttcaatctctcaagttgctggcttggccctcttccaggtgtactttacttccttttgttccctctaaacttgttagtgaactttcattcctgctctaaaacttgcctaggtctttcactctgccctatgccccttggtcaaattctttcttctgaggaggcaagaattgaggttgttgtagacctgtacaggttcgcagctgctaacaaaactagtcacttctccaaatagctctggttccttcgaagggggaatggtgtttaggaaacaagatctgggtgctagtgtttaaatcacctttgcaaaaatcataatagtgagaaaattgtaacagtgaaagaggtcttacctaaccaacttcatcttgcctttcacctccaaactgcccttgatcatttctgggtgtgaaccaagctaactttgggagaaatttagtttataatttcaatggtaataacccttcccaaagccatttatttgttctgtagctcacgacattttcaacttccccaattactctcataaataacatcactattgtagaacctgagattgaccttttgagatgttttttcaggcttttgcatgtatgatgaccagatggccccacccagaccagcaactcctctgtggcccccacccaaaagtggactcagctcatgaggaccattttctacaccaccgtaattgcatttccaaccactcagcatcacccattccctagccccctgcctgccaaactattcttgaaaaaccctaaccttggaatgtggtgggaggctgatttgtgtaataataaaactttgagtagggcatggtggctgacacctgtaatttcagcactttgggaggaggctaaggcaagaggattgtttgagcccaggagtttgactgggctcatagtttgcctgggcaacacagtgagaccctgtctctccccactacaaaaaaaaaagttagccaggcatggtggcacatgcctgcaatcccagctacgtgggaggctgcggcaggaggatgcttgagcctgagaggtggaggctgcagtgagctgtgattgcaccactccactccagcctaggtgacagaatgagaccttgtctcaaaaaaccaaccaaacaaaaaagctccagtcactcatttagctggctctatttcaattcccctgtcttcatcaataattagttctgcctaggaaatgggcaagatgaacccattgggcagtttcagtgtctcatagcaaggggtagattcagatttgtagagcctgaagctactacaattttgggactttttttttttaaagaaaaggaatgtaaagttacaaatataaaattagtatatggctttagaagtggtccctcagtgaagggctatatattttaaggtttattagcttcattattattgggatattattgttcttgggatctttcagtgaagagaatgttcaaatgcaacaccacgggtttatttcttagcttctgtcatttcctattttgtataaaccagaatgaaaatcatgcttccagagattatcaatatatttgttcatttgctctatcttactattttcacacaagtggtttccagccaggcacaatggctcatgcctgtaaatcccagcactttgggagaccgaagttggtggatcacttgtcaggagttccagaccagccaggccaacatggttaaaccccgtctccactaaaagcacaaaattgccagggcatgggggtgggcacctataatcccagctacttgggaggctgaggcaggagaatcgcttgaatccgggaggtggaggttgcagtgagccgagattgcaccactgcactccagcctgggtggcagagcaaaacaacatctcaaaacaaacaaacaaaccaataaaaaatggtttcagaagcataacaccaatatcctaccaaaaacaaacctactagtaatgttcaagattttctttcatttcttcttaatatgttatatgtcctactaaggatatatagccaaagtactatagtcgaacgctatttaactttttctttatggttacattatcaattcaatatacaattaattttaattgtttctgtttgaattcaatttcagggtttgcttttttattctctttaatttaaatttattttttaaaaatgcagaacaatgttaaaagaaaaatcttagacaaattaaattgaacagagtttaattgtgcaaagaacaatttgcaaattgggcaatgtctccaatcagaataggttcagagagactctggcccttctgtgtggttagattgatggacagagaaaggaaagtgatggacagaaaatggaagtcaggtacagaaacagctggtttggttacagctcaaagtttacctcagttgaacagggtttgaacagttggctgcctttgattggccaacattcagtgattggcacaagagtgggctacagtctatttacacatctagttaggttagagttcactatatacacagaaaactttaagctggactaaaatatgtaaggaggcagctttaggctaaagttaatttacgacatttatgattaaaagtcaaaaagatacactgagaagtttcacttatccctctccctctgttattggaaagaggtcccagtccagaccccaagagagggttcttgaatctcatgcaagaaagaatttgggttgagtccacagagtaaagtaaaggcaggtttattagagaagtaaagaaaaaaaggggccggtgcggtggctcacgcctgtaatcccagcattttgggaggccgaggtgggcagatcacgaggtcaggagttcgagaccagcctgaccaacatggtgaaatcccgtctcttctaaaaatacaaaaattagccgggcgtggtggtgggcgcctatagtcccggctactcaggaagctgaggcagaaaaatcacttgaacctaggaggtggaggttgcagtgagctgagatcgtgccactgctctccagcctgggcgacrgagactccatctcaaaaaaaaaagaaacaaaagaatggctactccatagacagagttgccctaagggcaactggttgtctactttttatggttatttcttgattacatgctaaacaaggggtggattattcatgagttttctgggaaaagggtgggaatttcctagaactgaggtctcctcccacttttagatcatatagggtaatttccaaatgttgtcatggtatttgtaaactgtcctggggctggtgggagtgtcttttagcatgtgaatgcattataattagcatataataagatttgaatggagttgctgtggttccattgcctctgacacttccaccccattcacactcatcctctataaggaactatttttattaatttatggctttttctctacttttttggtaaaaatctgaaaatatgtgtgcagtttcttatttctatttttttcttaaacatgcagtctattatatacactcttttgctcctttgcttcccccgctcccgcaacctcaatacatcccaggactcactttatatctgctctgctcatggagatcttcattctttttataaatggacaatagtccattgaatggcagctgggcgcagtggctcacatctgtaatcccagcactttgggaggccgaggcgggtggatcacctgaggtcagaagttggagaccagcctggccaacatggtgaaaccccatctctactaaaaatacaaaaattagccactagtaatgcatgcttgtaatcccagctactctggaggctgaggcaggagaattgcttgaacctgggaggtggaggttgcagtgagccgagatcgcaccattgcactccagcgtgggcaacaagagcgaaattccatctgaaaaaaawatatatatatataagtccattgaatgatggatgctctacagatgacctaactagtttcctatgaaaggtaatttgattgttgccaatacttaggttgctgttttagaaaattatatagactgcgctatgaatttaaacaagaaggaacttgaaaccactactgcaaaattataattgaaacagtgaaagagattggacctaaccaactctatcttatttctaacttctaagctgtccttactcattcttaggcataggctgaactaactttgaggaggaacatagtttatagtttagaacaaagacaataacagccctttcccaaaacaaaccttctttcctggggactggaccgcctttgcaggactaacaaattagccaaaagattagaaattatggtttaggagtcatacagctggaggctgtatgattctgaccctccccaaattgctcctgggaataacatcactattgtaaagcctaagaccagtgcttcagatatgttgcagaccctgcactggatggatcagcaggcaccactcagctcgataaactggctcatctgatcccatggcccccacccaggaactgacttaatgcaagacagctttgactccctatgatttcacctctgacccaaacaaccaggtctcccgacttactggctctcctccacccaccaaattgtccttaaaaactttgatccccaatgcttgcggagactgatttgtgtaataataaaactccagtcytctgcacagccggctctacgtgaattwccctttatgaattgcaattcccctgtcttgataaatcagctgtgtcttgacagtgggcaaggtaaacccattgggtggttacaaactgtgtacccaagcaataaaagtaacaatttgggaagtatttgagacccaccaaccaaaatttctttaacaattttggtctattcagtcattcatccattcatgtaaccactattattgggtgtcaagaactgatacttacttagaacgttaagagcattattcatcttgacataccaaatcatccgagttactgaaaattggtttactaggttccttacaaagaggttgcttggatttataaaatatgaggcagttgacccgagacaaggacgtagaaagtggttcatgtacccaatttttatttttcactttgaacccagaacattcacgactccaggccagaaattcaagactctgcagctagttctgactccagtcctagggtaacaagcccaccaagaatccagggcagatgtcctgaaaacccttcttgcggggtcaggagggcagcagaattttgggaccaaatctcaacaactggttttggtttcctcactcaccaagccacaagcctgcagagtgagaagaggtaaggaaaggatgaatgggcaatggagccagcccaggaccgggagctggtcctctctaacagcgaccccgcccgctttagctgagcgacccggggcaggttacatagtgtctctaacttaagccacgtgtttctcgaggaaatgctgagaggatctaatgggaaaacgtgggtacacgtcttagctaagaccctcgcccacgataagcccttaataagtagttatttttcagtggtggtgattaccatcgtcattattgttttgtatttgtaatcatcactgccacgaccatcaccgacctcttttacgcctccaccgggatccccacctcccagcctggcagttccaggctctggtgactcattcacttcctggaagtcctctaggcaacactttcctctcccgagtgacgactcctcagaaggcaggagatcccccccggaaacctttctctctccgtctctccctctaactcaaatctctcattcccgagtccaaactaagagagactcgcgccccaggagtcagccagcggcgcgggcgccttccccgcacgcctctgccgtctggaggacgcaggcgggagcgccccggaccgggttcacggtctcgcactcctgccgccggcgccccgcggtcccgccctagcaggctccttcccgggcccctccccgctccctcctctttctcgctgctcagtcacatctttctcttccttccaccccgagggaccatgtcgaggctcagctggggataccgcgagcacaacggtgagcgccttttcctgatccaaggrggggtttgtgcgggggacgagaggactagcgcgacgccccggcgctcgctgaccacacactgggctcgcacattgagaaactttttcggttcctctttaaactaagcagcactcctgggagcccagtgygagaagcggagagcagtcttgtcagggtagacgggttgttggtggtggatgtgagcgttggtgtgtgttatctctgtcaggattccccaaactcccaagtgttcatacgtgtgagttcaccttcatctgaaaagccaaggactttgcctagtaacagccacgtatcaattacaggcttggagatcagaagtctgatgacacacttcagtgaaataaggacaagttcgctttcagtcttttaagctcactattcacttaggagaaacaaatcatagaaaatctttaaaaatatatttaggaaatcttaacttgcattgtgacactgaagattaagttggcttcgtggcaaacaaaatactgcatgtttcctaatagttgttactgtaaatattcccacagcaatttgcagttggctgactactactggggactttagtaagggttcaggttctcgctgggaaattaagttacattgtgggttacttctccactcttcttctccacgctcatccttgcagggtgagcaaaggattactgaaattataattcattgatagaaatgtattaataggataaataataatgacatacacttttcttcttgtatatcacacattatcaaaagtaaaacattttttcttgttcctacgttaaactgaactgattgtttaaataataattatttgaaataatcgcagtgacaccaaaaagccttatagtgaataactgtcaaaattaaggcttagtttagccattcctcaatgtgcatatatttcaaaacatcatgttgtacacataaatatatacaatttttgtcaatttaagaagtaaatacataataaagaaaaaaattaaggctgtgaataataatgctttccttctattagcatgtacatgattaaacagtatagaatggtcaaattttatagaaagtttaatttcacaaactaacagaaaaattctatttctaattgtagcctgtttaatttctaattgtagcctgtttttaaacatgctagtttaaaaatggcagcaggtgaaatttataactttaataataaaaggtgtatagtcagatttcttcttgattaaggccataattataatcttacattttgctaatttccagtgaatgtttagggggaaaatatgacaaatcttttttcatttccctctctgctgaagtcgtttttattggagttatttaatagtcattgaatcccaactgcgcctttatggtagttaggaagaagaagggtatttcaatcaatcaatcaatggatattgattactctttagtaggttagaaattattcacctgaatgaagcttatttcagcaattttaaaaattcatcttagcaaagccattaataaggagtgattttgtatttctgttaggaattgttctgttaggaattagccattcctttcttttagatgcgatctctctctgaagaccacatccttacttaaaggtgtggtcttcagagaaagattgggaaaatcctattggaaatgtattatatactaactaggcaagttttttgtttgtttgtttgttgtttttgagatgagtcttgctctgttgcccaggctggagtgcagtggcactatcttggctcactgccatctccctctcctgggttcaagcgattctccagcctcagccccaccaagtagctgggattataggcatgagccaccatgcctggctaatttttgtatttttagtagagacaaggtttcgtcatgttggccaggctggtctagaactccagacctcaagtgatctgcctgccttggcctcccaaagtactggaattacaggcatgagccacagctctgggcctaactaggcaagttttttgtttttttttttttttctgtttaaacattggtaaaccagtgactgagcagataaaaggaaacttaagctgggaatagcaacactgataaaataaaacatcaagacttgaagccctgaaagggtactgccttcacaaataacttaggattcttcccctaacctttgactactttattagtttagtttagcgaatgtgacatcactgaaaagtgtatatcactgtaggtatttaaaagttcctaaatcagttgagcaaccaccacatatctctaattaagaattatgctggctgggcacggtggctcatgcctgtaatcccagcactttgggaggccaaggtgggtggatcacctgagatcgggagttcaagaccagactgaccaacatggagaaatctcgtttctactaaaaatacaaaattagctgggcgtggtggtgcgtgcctgtaatcccagctacttgggaggctgaggcaggagaattgcttgaacctgggaggcagaggttgcagtgagcggagatcacgccattgcactccggcctgggcaacaagagtgaaactctgtctcaaaaaaaaaaaaaaaaagaaaaagaattatggtggcttgcacctgtaatcctagctactcaaaagactgagatgggaggattgcctgaggccaggagttccagactagcctgcagggtcatgggggggacaaggagaaggaggagaggaggaaattttttttggraarattgaaaaaggggacctctttaagaggcagggtactgaactgactatggtagttagtagataatattgggaatgtgatacaaacaattattacttttattttattttggtttgacttctttttaaaatagttctgtttataaatgactggaaataggagagcaaagcaattaggagaagaaagcaactctattgattggaagaatgtcacctgcatattgtaacacatgcattgcgcatttgaaattgaattttcgttaggttaactcttacttggtggcagtgaaatagaaggctttttctgaattaagggggaaaaaagtctaggttatatatagaaaaagtactcagaaagatggtgaaagtattgaataaaaaaggctttttctgtaatacattctaagcaaggacttctgatgctcaagtggctttgaagtccagtttgtcagatgacatcttttaagctgagtgtatagttatatatttatgctatgactttttgtgcctgaagcatatatgaaagaatgtatgtatgtgtgagttctcttttgcaaaaatgaggcatagtaagcagtatcagatttagagtttgggccaggcgtggtggctcatgcctgtaatcccaacacttcaggaagctgagacatgcggatcacttgagcccatgagtttgagaccagcctrtagtgagactttcaacaaaaaaaagttttttataaaagtagctgggtgtggtggtgcacacctgtactcttagctacttgggaggctgaggtggaaggattgtttgagtttgggaagttgaggctgcagtgagctgagattacacctctgcattccagcctgggtaacagagcaagaccctgtctcaaaaaaaaaaaaaaaagatttagaattttatgctttaaagtttgttgatgattgtgatatattgcatttctttaaatattactctaaattttatcattttaaaatgtttttggttgtcgttagtaacaggtttaattaattgtcatgctatgatgttttaattagtacttgatttttagtgaaagattggttagcaaagtaggtgggtaaaccttagtcagtagcccagtgtaggtggtgatagctgtataaatttcaggaatagtagagagaataagaacctataacctataaagtgactcacatctgtagaatgacatggaacttacgtgaaactacagctttgctgctgattttgagaggcaagactttatagagtcttccaaagaagtgaagaggattgaaaagggaactgttagctgattggctcgtttcaatttccctaacatgtctgatttgtgaacttgatacgattttgacgtttttgagtagaggaccaggatgatacctttctcttgtgttgaaattcaaatgtaacattggcaaaataaccatagaagaaccttctgaaatgaagaaagagagaaataaattacaatctgactctactgcagataatcaacaatattacgtttcctgacrtggtgcagccattttatttggattatcctaggtgaaaaatttgtgtgtttccttggtatgcctgttgcacatcacaggtaattgagtggaggcctgagtgacactagacgatagcattgagtgatagaaggaagaataaagaagtaagcacagcatctttaagaatgacaccctttctttgcttcatggctttctcagcttttttgactcttccaatctgcaaacttgaactctggagcaatagctcatttttggagctgagactgaatgtcattgttttcaatgatgagttgtattattgtttttagtttggtagaaggttacctttggagagtattttataaaatttacagactcttgtctacaagggttactttaattctgaacatgacttaaggcacaccaagagtttcccacatctataataaaaacaactaatcttgtaaaaaaaaacaattagatgccaaggtcctgaggacgagaatctcattttattaatctttgcgttttcttcaatttcaagcacagtgtgttatactcaatgtatgtttgttgaaagaaagaacttatttaatccttttcttttggtcctatatatttaaggtcctattcactggaaggaatttttccctattgctgatggtgatcagcaatctccaattgagattaaaaccaaagaagtgaaatatgactcttccctccgaccacttagtatcaagtatgacccaagctcagctaaaatcatcagcaacagcggccattccttcaatgttgactttgatgacacagagaacaaatcaggttggcttttctttttttgtgtgtgtggtggtggatgaagggtttgaatgattagactatactctttttttttttttttttttgagacagagtctcgctctgtcgccaggctgaagtgtartggcgcgatcttggcttattgcaacctccgcctcctaagttcaagagattctcctgcctcagcctcccgagtaactgggattacaggcgcacgccactatacccagctactttttttgtatttttagtagagacagggtttcaccatgttggccaggatggtcttgatctcctgacctcgtgatccgcctgcctcggccwcccaaagtgctgggattacaggcgtgagccaccgcacccagaatacactctctaatctttcatgttttgtttttgctagacctggaatttgtcaaattgaagcatatttttcttcgtgtgaattaagatatcttgttatatatttgaaccttcagataatcttaccttaaaataataaagagtatttggaaaaggatatgttgcatgataatttaaaattgaccttagcttgttattataacttcacttagcatttaccattataaaaatattaaagtttaatagtttttatagatatttcatgatttgtttctgcaaagttttagccgtaattattttagcattatttgcaaacctataatgccatttaagtacmtgctttaatagaaaaagtttagtttaaaaaaaacttattctcttattttaattgccaaagtaatatccactcatagtaaatgaaacaatatggaaacatataacaaatattaatgtctctttcttcccacagtctctcctgaagtaactaatgttatttcttccataatatttcggtgcttagttatgtatacatacatgtgtatcatccttgttttgcattttcttattaaaaatacatttggaataatgctatataactctgaatttttttcttgtttaaaaatattttatagacatctttccagattaaaatatatcttgtttaaaaagctaaactgcagccgggtgtggtggctcacatgtataatcccagcactttgggaggctgaggtgggaggattgcttatgtcyaggagttcaagaccagcttgggcaacatagtgagaacttatctctacaaaaaataaaaaattaatcaggcatggtggggtgtgcctttactcccagctactctggaggctgaggcaggaggattgcttgacttcaggaggtcaaggctgcaatgagccatgatagtgccactgtactcagcctgggtgacagagcaagatcctgtctcaaaagataaaaataaaagtaaaataattttaaaagttgaattgtattagctatgcttgtatcgtaatttatgtaccattctcctaacaatggacattgaagggagggaaagtagaagtttaatttttttaaaaaaataaatatatgaaacttttttactgtatattccctattagtacttttttctagaacacgtaatcatttcgtttaatgattagttcttgggatagtgtctttcacaccatgaataaataatggacttatagattatttgttaatttattaaataagtgatgaaaaaacattttcttgaagtgaatgtttaatccttcttcagactatctactgcccaagcagagattctgcccaaggtatcaagtttaaatgtaagatgagataaaatattagagagaatcatatttggaaacactttttagggcctctgacagattgtttttatttttaatctaagatcaggatgatgctgtatttgctctattaatgaaaaaatatagttaatttttaaaaatccttaattgaaagaaagtttttacttattaattgagcccagatttagattagtagtaatatcttgtatttatgtaaagccttattgttagcaaaaattataagcccaaccacatttcttcttcatatttgtcaaattcataaaagtagtaagtttttttttcttttctttttttttttgagacagagtttcactcttgttgcccaggctggagtgcaatggcacagtctcggctcaccgcaacctctgccttccgggttcaagcgattctcctgcctccgcctcccaagtagctgggattacaggcatgtgccaccatgcctggctaattttgtatttttagtagagacagggtttctccatgttaatcaggctggtttcgaactcccgacctcaggtgatccgcccgcctcggcctcccaaagtgctgggattacaggcgtgagccactgcgcccagcctttttttcttatttatttatttatttatttatttttttgagacaaggtctcgctccattgcctaggctggagtgcagtggtgcaatcatggctcactgcagccttgacctcctgggctcaagcaatcctcctgcctcagcctcctgagtagctgggaccacaggcatgtgctcccatgcccagctaatttttgtatttttcatagagaaaaggttttgccatattgcccaggctgatcttgaactactgggctcaagggatctgcccgcctcggtctcccaaagtgctgggagccaccacactggcctaagtagtacattttcatcaaagcattgtaaaaaatgcataaagacaaataaatacatggtattttcaacttttcggaggaaatgccaagtaaggagggacctggccttttatatacatgttcaactatatttctttcaacccctcagttttgtgaatctatgttaataaaagtggttaagccaggcatgctgacacacactggtagaccccgctactggggaaggaggatgattagttaggcccaggagtttgagggcagctgggcaacatagggagaccccatctcttgcggttaatgtaatagatatattgtaaaagtgtccaagtcttctaaatacaaagtttataccacataagtgtagtttgttactgtttacaatatgtcaaacatttaaaaagtaagctgtctcagaaaataaaaagataaataaataaaaaaataaggccgggtgtggtggctcacatctgtaatcccagcactttgggaggccgaggtgggcagatcacctgaggtcaagattttgagaccagcctggccaacatgctgaaaccctgtctctattaaaatacaaaaattagccaggagtggtgacacacacctgtaatcccagctactcaggaggctgaggtaggagaatggcttgaacccaggaggcgcaggttgcagtgagccaagatcatgccactgcactccagcctgggcaacagagcaagattccatctcaaaaaaaaaaaaaagtaaagctacccattcctcattttagaatgagaaatgattatattttacttcatctaaaactttaagtatattttttataaatgtagacattcatagtgtaaaaattttctrctctaatttgctctatgagaacccaggtttctctctctctctcttctgtttttctcttcctttcattttccttctacttcgggttaatcagtgaaatcaatttatgtttccagatttgacacttagtcatcagtagtgtgtgctctttcttttaaatgaagatccttttcctatctagttcacaataaaattaccaggattaattgaaaatatccataaagtactttgtagtcctctgaaacagtagctatgtaaatatgggtcatgattcttattctttttttctcaagataaaccaaaagagattgtttcatggtgatttgggagattaaatcaattaaaaagaagaaaccaccatagttaaacaagttttttttttttttttggttttgttttttttttatttttggtaaactataaaaaacacaaagatactttctgtagcaaaccacattaatttgaataaaacagtttccattttgtaaagaagccatttttgaccaggattaaccctgaatcccacctcaggcatgtcaataaaccacaggcatgaaatcttcctcatagttcttggagggcgtgtttggctggacacatccatgctccatagttaaacctttagagaactacccaaaaatcctttcaaaagggagtaaaagggaggaggtggatgtgaaatttttcccttccttcctcctccttcttcttctctctctctctcattctttctttcttttcttgactttctttgttctcaggctggaatgcagctgcccagccataactcattgaagcccggaactcctgggctcaagtgcttctccccacttggttgcacactaccatgcctagctcatgaatttttttttttttttttaagacaagatctcactctgtcacccaggctagagtgcagtggtgcaatctcagctcactacaacctctgcctcctgggttcaagtgattcttccacctcagcctcctgagtagctgggattacaggcgcacgtcaccatgcccaactaattttttgtatttttagtagagacagggtttcgccatgttggtcaagctggtctggaactcctggcatttttagtagagacagggttttgccatgttggtcaagctggtctcgaactcctggcgtttttagtagagacagggtttcgccatgttggtcaagctgatctcgaactcctggcctcaagtaatccacccgccttggcctcccaaagtgctgggattataggcatgagtcactgtgccatgcctggctcatgaaattctttaggaagacttccaattggctgtaatatacaggggaaatagtagtttgaagaagaaagacaaggctgttctcacctgagctcctggtctttctggactcaaacagtatctcgctgctttgggaacctcacctgaggccctaccacccttgctgtggctcccagggcattctggaattttcctaacacagaactctccacattatgttgtaactgctagttggcttctctgtctttccatttagctaaagctctctatgagcaacaactatgtcttacttacctacctagcatggtgcctggcacatggtaggtgctcaatacatgtgtgtttaagttacaaaaaaaaaaaaaaaacttgtatgacggaaagacatggaaaataccatgacatagcattgggatgccttagcatacatagattaactctcgataaaattacaaaccaccagaaatcaattaatatttgccgtttaacacttaaatagttaaacattattcattgctggaacctttatttttaaaaaatttgtggtactaatttttgtattttataaatgaaatagttcttggattatagtaggcgctcaataacaattagtaactactactactaacaataatggtgtgtgttctttttgtggataaaatatgtgtgctgaaattttaaaaagatatcaaaaagaaagttgtcttctgattaagaaagtcctgctaggaagagcagtaacttgatgaattcagtgatcgttctttaattttcatctctagaaaatgccaatttctcagttatgcttccattatctagttctaggtaactgcctgaagtcaaacaaattattcacaagatcttacactatatattcttaaaacaaaaacaaaaacaaacaacaaacagaaaaagatttagtaggtggacataccataggtgtataatccccccaggagccaagatagctaggaaatgaattggtaacctatgacaatgtgacaattatataaagctctattatgattatttgtttccttcactagactaagtttcttaaggataaggacaaacttgtttatcattgcatatttagtattgaataattgctagcccatcgtaagctcttaatgattgttgaatgagagagtagcttggtgtgtatatgctctgagtaaaataagccagatttaatgaaggttcttctggcttcctaaataatacaaggtcctactgagtgggaacatctgtgtcctttggtttctctctctctctccctctctgtctttgtcttggtataatcctggcagatttgtgctcttggctcttgtttctctagattccaagcaaattgcagatgtgctgttcatgtatctttacttcagagaacaagtttaccataaagtgattattctcaggttcactagtcctaagaacttagtttttagtgattcccggtaacttcagtagcatccctacaaactaaagtttgtggaagagtgctttaacaggtgaggtctcttattttatcttggtaatattaattgattcaagtactctctgggcactggagatacaggggaccaaaacagtttctgccttaaaggaatttgtatcctaattagcagagagtaaatgcgtgagcaaacagatcctgttgccagcttgcttgtcattcaagacagctgactacagtgtagtttaggaaaatggccagggttagcaaattaccaacaatttttaaaaagtcaaatttaaggctggtgtggtggctcacacctgtaatcccagcagtttgtgaggctgaggcaggaggatcacttcagaccaggagtttgagaccagcctaggcaatatgatgaaaccccatccctgcaaaaaaaaaaaatacaactagctggacgtagctgtgtgcgcccgtagtcccagccccagccgctagggaggctgatgtgggaggattaattgaggctgcaagtttgagccccactgtactccagcctgggcagcagagaccttgtctcaaaaaaaaaaaacaaaaacgaacaaaccccaaaacactgcaacctctgctttctgggttcaagtgagcacttttggctaatttttgtatttttttttttttctttttgtagagacagggtttcattgtgttggccaggctggtgtcaagctgctgacctcaagtgaggcacctgcctcagcctcccaagtgctgggattactggtgtgaaccaccacacccagccaaaaaatatatatataatatctctgtatacagatattaaatatcaaatatataaaatatacttatattaaatatatacatattaaatttatataaatataaatttatatttaaataataagatggggccttgctatgttgcccaggctggtcttgaactcctgggctcaagcgatcctccctccttggcttcccaaattactgggattacaggtgtgagccaccatgccaggcctgttcatggaaatttaataacgcttatggtatatttagcttccaacgcttcctgattctcccatatgctttaaacatgcccaataaagattaattaggatgagacaatttaggactatgttttctattaagaagcttttctatatacttaagatatgatttattgtcatagttttagagatcatatttactgaggaaattactcaaatgtactttgtcaaagtgacaaagatatgacagatttttgaaaaattatttttgtcctatatttcacatttccccaagaatatagaatttaaggacaaaaggtatgcttgctttgcctgtttttacagtaaaaaactgtgttgattgtgttgactgtgtgtcaggtagtaataagtgctttgtgttcaatttttcttctgttttaatgacagcattaggaggaggtcccattactatcttgtttttacacttggaagataaagcttagaagttagggtttgttgccaggtgtggtagctcatgcctgtaatcctagcmctttgggaggatcgcttgaggccaggagtttgagaccagcctggataacatagtgaggccctgtctctacaaaaaaaaaaaaaaaaaaaaaaaaaaaaaagggctgagtgtagtggtgcatacctgtagttctagctacttgggaggctaaagtgggaggatgacttgaacccaraagttagaggttgcagtgagccgtgattgcatcagcttaggcaacagggcgagaccttgtctcaaggaaaaaaaaaaaagaagttagagtttgttcaagatcacataattaggaaaagacagcatgagtgtaggccttctaactgctgaagcctgtgctcaaaccacaatgctgcactgctctaccaagctcaaactggacctgtctgcatgtcacatccttattcagacaggctgacttatcctcaggtaaacacaaccattccttacctttcagaagtcctaatttctatgcctttctaaccagtatgtctgttacgatttcccaggtgttccataaaaatctgtattgtggatgctttaagcttttaaaaatgttctattttcaatctacacatatttaaaagtggtattcttgtcagcaaagcaaatgacacatttgtaaaaaattccttggaggacatggatgtatggagtaattcagggagatgttgtggtttgagcagcttatgtaaatattttttccttgctaacaatataaaacatgttgttgtttagttctgcgtggtggtcctctcactggaagctacaggttacggcaggttcaccttcactgggggtccgctgatgaccacggctccgagcacatagtagatggagtgagctatgctgcagaggtaagccataagacatanctgtgattcacagttttcccacatggtggratttaaggggtacagagacaactttactgattccaaatagatcctgagccaattaggtatcttagtgtctgaaactgctttattcattcaatatgagagtttatgaatatgagagcttcagatgttgccctcctaagcgttaaaccaaccctgagagcttagggttatatgttcccattttagacataagtaaactggttgctggagagattaagtaatttatccagctaggaagcattgagacaggtttaaatctagatctgtctgatatcaaattacaaattgtttctatctactgaaaggccagtgagaagagagagaaagaaacatttgtcttagtccaaatgtggtcatatttcatccagatacaaatatccactaatatgtaaagaccacattaaataggtaatatttaaataggtaaatggcaaagtttcactgaggaaaaaaaaaaagacaaactcttctaaactctactttatctctatatttacaggtataaaataaaaatctgttattcagtttattggtaaatcataacacaataaagcattcattgagttgtttctactcctttttccttataattgtattcactaataatactctgtgcaggatctggattaaaaaatgctctactttttttaatcctttggttaaagaacaaagcataataagcttcaagtttaatatgattaaatattactaacacccaactttaccatgagatgaaagtgaattatatgactcaatcaatactattcacgtgaaaataatttggtttytgagtcgcctaggcargacagagctaagttatcaggcaagtgcaatttttcttcatgttctcatggttactgagctgtagagtttagatgccctgtatagccctgctgttcagagaaatccgacaatcagaacttttttccagtttcactcttccattgacatgtacctctgccctttcaggttwtcatctgaaatgtttgctttgccactaaatcacttgtgtttgaggccaagtagctttagagtatggaacctgctctgtcctcagggtagagaaataaaatgtacgtacaaagttttttatgatggtggacaaactttgtctagaaggtagaaagtgggactgctgaatttgtatggtgtctcaatttgcatcatttaccaaatagttttcatgtttgctttctaaagttttatgttctgaatataacatgttctaaatgtccaaagcgccctcggaactaattattggttgctttggatcactggtctctcattttccttaccaactcaggaaaattggtcaaaatgctgtgtgtggttacaccttgtactttaataaacttgaaagtactacatactcagagaggcttaggttttctgccagctggcaagtagtttcctgaaaagggtcctcctgacatatgtcagaggctcagagtcyttacctgcagatcaagggccatttttgtagacaaagacttttttkttgttgttgttctgcaataaataattatcttttatttatttatttattttaaagcaaaccagtgaaggaaaggaccaaaacctttggttcacttatgtatttataaatggaaaaaatttataatgcaaatttcacttattaaaaaacttaggtacaacttacaacattacagataattattttcccttcttttgtttcacatggagaccttggagactcaattcatgttaagacacctaagtatgagtcctccaggtaaatattacacaaatcagaagcatcttggaatttttaagtatattttaagacatacatttttatgcatgctttaaacaaacagtattttatttattttttttttgagacagagttttgctcttgttgcccaggctagaatgcgatggtgcgatcttggcttactgcaacctctgcctcctgggttcaagtgcttctcctgcctcagccacccgagtagctgggattacaggcatgcgccaccatgcctggctaattttgtatttttagtagagacagggtttctccatgttggtcaggctggtctcgaactcccaacctcaggtgatctgtctgcctcggactcccaaagtgttaggattacaggcgtgagccaccgcgcccggccagtgtatatatatatatatgtttgtttgtttttaaatgagagaatctaacaaagaaactatgaccagcaccagcatttaaagataaagctttgtggataaagcttggaatagattttcttttttctttctttttctttgagacaggctctcgatctgttgcccaggctagagtgccatggtacaaacatggctcactgtagctttgacctcctgggttcaagggatcctcccaccttagcctccagagcaactgggaccacaggtgggcaccactacatctggctaattattttttatagagacagagtctggccatcttgcctaggctggtctgaaactccttgaatgcatattaaagaacagtatacaattccaaggttgggtgcagtggctcctgcctgtaatcccagcactttgggaggccaaggagggatgattgcttcttatttcattggcttatatattcattcattctttcactcagtaagaattcattgagaatcaaccatgctcctaatctttacacagcttactgatgcttaccctgaaaggagtgcagcctcacacatatttgaggtcagaaaatgctgccctgtgggataggcatccgttttaagttaaacctggtttaacttaaaacctggtttggttgaaggggagggaactaggtcaagtggggggacagcagtggttttgcataaaatcatgtgtgaggatgtgggttgggaaggaggctcatacatttgaaaaacagtatggcctttaacagtgtagttggagcttggagaatgaaggggagagttgtcagaggcaaagttggagaggctgggaagggcctgatcttactgaggtaagtcctggtaaggtttatgaaggtgattctaagtgcaatgggaagccactgaaaggctttccattgggaagtggtgatatttgcatttcaaaaataattcaactactgtttgagaatagattggatggaagcaggagtggctaaggggagctttggaggaaacttttggggaaagttccaggcaataaatgagagtgcaggtagaggctggctggctggcagtggcagctttagtggcatttgtcgattggtgggtttgagagtgagggagggcaggatccatgtttctaggttgagataggaaatgcagatagagaaagtctgggtcaaacctcaggcttggtggggtgggagaggtagacaataagcaaataaataaatggtgcatggtaagttctttgatgggaacaataccatgtgatctggtagagtggctgagggcttaggaaaagcttctttgaggtgatacatgagttgagactgactgataagaagaaagcattaagagaaaaatctagagagacctttccaggaagtgggagcagcaagctcaagttctctaaggcaggagtgaggctggcatgttcaagaggagaaagtcattggcctattaggattggaattaatgagaaaggaaaagttatgtgctctgtcctgatgaggcaggcagggaccatgccacatcgggtactgttgggcattgtaagcagtctgaagtttatctgtaatgcagtgggaagaagacaatggaaggttttgatcaggggaatgacatgttctgctttatattttacaaaatataactagctgctgggtagagaggaggccgctgtcaggcaaatgttgaagtagggagaaaaactagaaggttatggaagtcattcaagtgagcagtgacagtaatttggactctgggggtggtggagacgaagagagctggacaaatctatgatgtttgggagataaagtcaatagggtttgctgatgaaaaggatgtcatgattgaaggaaggaaaaacaggagtttagaaacactcttaaggtttcgatgtaagcatattggaggctggtggtgccatttactgaaatgtgcaagtctgggaaggagcaggttgcagagaggaattcactctctgttttagacaggttaagtttgagatgtctgttaggcattctaggctcatgttcaagtaggctattggataaaaacttccagtttaagaagaggtcaaggctggagatgggggcatttgggagtccttgcatttggtttcatgttcaaaagaacccctttgtgctcagctccgtgattccaaggagttgattagtttttccagccacttttgtacaaagttcatgaccatcatcaagttacgttcccttgtgagtaaaaaggagaagtgaaagaaagaaaaaagacatttaaagttgcaacatatacaactttaattttaggcctaatatgatggtttataatattacagagagattaaagtgatctaaatcaagaaaagttttatcccaaaagttaggcgtctacaaaactaggctaatcgtccattctgtgtttggaactttatctaatgaaagtttaggcagaatatatagcaagcattttaaatatgtagctaataatgaaactgatttcaacattcatcatggatttttggcatagtatttggcagtatattttgcataccactaatatggaatttgaaactgctaaattttaataatattatttagaaattagttgccagtagagaagaatctaattttcatttttgtagtggttacaatttcttgtcattcagttcaaatcactgctcttgtcattgttagtcaggaaatgtgagtttgctttttttttgttttaattaaaatataaatgctaatagaagtggtatcagttcctctgtgaaggtattgctgccagtcttaagtaaggtgtgtaggagagaaagaaaaatattttcttggcctagtttcccatcatagtttaaatagttgtacttttaactagcagaaggatggttatatataggatatatatatgtccattcatctctctttagttacacattcattttttaatcagttctggttgtgatcctaacgaagtcattctatatctttctctgtttggtctcatctcttactgagagaactggtgcattggcacagagccacttaaaacaattttaacatccttatcagcccttccctgacagtgaatgtcatctgtctcatgtgagccaaatgaattctgtttcatcacccggtgttttcaggtttctttcctcccccaactatctcacaccaacttggaacatggcactacaggaatctacttttatattgcacagtcttccttgattgtttgtgcatgatgcactgttttatagttgactgtttatgataattgttatctatccagaaattatctcctataaatttcctgtaagacatatttatctcctataaatttcctgtaagttatatttaaaggatgggataaacatgtatttgaatatgctaaatcctctctgtaacagtcagctagaaagatgatttgggcatgaaggctcacataagtatttccttcctgataaaacaaaagggattcattagaaggagatcttgtctgaagtcagtccctcatatcaggtccttggacaccatggcttgatcaccatttatgattgtagctaaatgttttaggcatgtcgcattgccctttggcttctgtctcactttgtccttttggggaagactcccccaaagtggttttctcctttatcgttattctgaaatctttcacacttgtgggtgtgttcgagataccgtattgcttgcaatggtaaaacatttaggatacctttaggtgttgcataaggccgctgcatatgagtagagttgtgaggtgggtgaagtctgttttccagagttccaggccccccacctccttcccttcccccttgttttatctccctccttagtagcatcagctaccctcccattttctacctctttttcccccattgaaacttgctctcagcaaagtatctaaacatattcatagaacgtggtaaatgtatcaaaatgataagcatttttatgtgcgagatgacaaatattttaattagtttgatttaatcattccacatttatacatatattaaaacattgcattgtgccccataaatgtatacagttatgatttgccaattaaaaatgctcttaataaaaaagtttgaatgctacttaacatgattacatgattactcataaggagactttgtgttttcaagccataaatagtcttaaaatgacaggtagtaaacatttaactggacagttttagaaacagcctcactgtccttggtagcgggattgtcctggaaaacctactgtgtcggaggttgacttctccacccatctgtgagctcagccctcttccatggactttactgccagccgggatttgatttgaggctgctccattgcagtctcatctgtggaaggcctggaggagcctccagttacttgggagcaatagctggagtttgttagggctgaaggggctgtgaaggatgttcaaggctttttwaaaaatttatttattttctgatatgaagtgtcgctctgttgctcaggctggagtgtggtggcgcagtcttagctcactgcaacctccacctcctgggttcaagtgattctcctgcctcagcctcccgagtagctgggactacagtcatgtactaccatgtccagctaggatgctcaaggcattctatatagtctttaatatagtggaccacagactagttaagtgactgtgatccttcactgcatgaactttcacttttggacaaaaataaacaagaggattctgtccaagattcttgtgataaatacattatacataagtgtacagcaccagaaaatttgtaaatgttttatttgcatttatgtttttcaggatgtctaacaaaacattcctactatgttgtatatctccctttcagctccatgttgttcactggaattcagacaaataccccagctttgttgaggcagctcatgaaccagatggactggctgtcttgggagtgtttttacaggtgagaatctactgttttcattttaartgatcagccttgttgaagaaagagcttcagtcacgaagtagacattcaaccatcttgtttaatagtaaattcattttaggtgtagcagtttccttttgaaatgaatatttaaaaattatatattcatttaggagcattgtcttataagtcttcttattgtccattgatcatttttatgtgaataacaatagcagcatcaacatcaagaatagtagcagaaataacaactgagatactggaagaaaacatttattctgggctcttcctaattgtatactatttaggacagaataaagttcaagctcctgattcttgaaacactggtctcaccacaatgacatattgtcccaatgtgctcactggtttttaaaaaaattttattgtatttcctttaatctaacgttcacatgtggttagacaattattgtcatcatacctgggaacaggttgggcttctcacctccctctgcctccacattcttgtaggtgtgcccctttgtcacaccccatactctccatgtgttgtaactcatgaacagagaatgcttcacggatggcaacaattccttgcctttggacaccaagtaggggtggttgcggcaggatccgggtgctttaaaaccttcaggtagattcagatcacctgtaataatgaaaagaggatcatttatgtatctataatttatgatgagtttgcttatgatgatatattcccttgatttgggacctcaaatcattttaggctgcaagtgtgagatgtttgcatctagtattttgatgccaccattgtccgtttgaattgaggggctgactgtcacatctagcttagtagtgcaggttatttgttagactgtcttatgcaaagtttctctcaagttaacctacatcttaaacactgataaaacttaacaaatattaagctgtttctattagttttgggactaagctgaaagttcagtacaggaaccctgtaatattatcttgttgttcagatccttctggcatgataaggctggcaggtaaaagagaagctttgttgtagaacaatcactgtatgttctgtgctggctaaggtttttttaaaaaataatttttaaatagtggctgaaattgagtgattcagacttgatctgctacagtaaccatttcttttgaaatttcatgtttttagattggygaacctaattcccaactgcaaaagattactgacactttggattccattaaagaaaaggtaaaatgaattactgttaataattaacatatttcttgttctctcccacattctcttatcttcctttaaagacttagacatatgctgcctgctttgaagtttgcaacatacttgatgaaaaaaagcagaagtaacctattaccacttatcttttgaatgtaaaggtcttaaattacctaaaataaacatgaataaatatacttatgcataattagtctctggtattatattacagagtaagcctttaattgtaacacatttaagggaccacttatatgaaaacaaaccttatgcttcttaaataaatctatgatatgttactttatctaaaatttttaagatgtagatgcttttttaaagatactaaaggaagatattacataattctagatgcagatattctgtattgtttatggaattataatggaagtacatggatgtatgttttttgaggtctatgtagagctatcccattgtaatttgtgggaattctttttgatcctccagggtaaacaaactcgattcacaaattttgacctattgtctctgcttccaccatcctgggactactggacatatcctggttytcttacagttccacctcttyttgagagtgtcacatggattgttttaaagcaacctataaacatcagctytcaacaggtacataatctcttccaggttgatactgattccctcagaggaaactgggctttttttttttttttttcaaccctgcccttaatttctactgtgttttgaagtctgttttctctttattcatcagacgggtcgttgggctagatgagacctatgtccctttcgtatttgacctgtgattagatgatttatttgccacttcttagaaatgtacatagcgacactgatgaaagtaaagcatcattttgagcactataatcatttgcttttggtttgttgctgtttgtttgatatggggatataaacaggctgagataaaaatgaaaaatggggatataaacaggctgagatacaaacaaaaaaatcagagagcggctacttatagaaggtgacatttttctttctgaccttagtccccacacctgcttctacaaatttccaagtgaaacttgaggacagtgattggtgcagtgccctaagaaatgtgtgcctgctaagtgtaagaagttgttgttttgtacacttaaaaggtagttaagtgggtaggctgggcacagtggatcctgcctgtaatctcagcactttgggaggctgaggtgggtggatcgcttgagccctggagttggagaccagcctgggcaacactgtaaaaccttgtctctacaaaaaatacaaaaagtagccaggtgtggtgtgcatgcctatagtcccagctactcaaggggttgaggtgggaggattgcttgaacccaagaggctgatgctgcagtgagtcaggatcatgccgctgcattccagagcaagactttgtctcaaaaaaaattttttttgttaagagggtggatctcatttaagtgttcttactataattataagaagaggaaagagagagaaaggggaggggaatgagagggagaggaggaattgttgatcttttggcatttgttgacaaaaacttttgttgggctgtctgaggggcttaatgcttaagcatttgcagagaggctgtagggaggttctttctgtgtagacatctactcactcattcttctgttaaatacttatggagcttcccctgtaggccaagagtctgctagactcaggatatccagtttgtcagccaggctggtgtggagtcggtgcaaccatacctcactccaaccttgaactcctgggctcaagccattcatcttcctgtctcagcctcccatgtagctggaattacaggtgcatgccaccatgcctggcttattttttttttgaaaaattttgtgtagacagggtcttgcattattgccctggctggtcttgaagtgatccacttctggccttaaatgatcctcctgcttcggcctcccaaagtgctaggattacaggcatgagccactgcacctagccagtatatccagtctttaatgttcagaaactgtgcttgaggtgtgaaccatggggctggccaatctgatgggtggatgctgtgtgttcttggatgctgtgcttcttcattggttttgtttttgttgttctttttgcattaggtgcaatatcttagcaagaacacagtctagtaatttttgcagctaataaagtacacatgtactgggcttgcccacctgcctacctgtttatttttcctcctaatgataccagagctggcccacctttaccgagatcatttcaggcagcatttccccttggggcattgaacacatccttccttctgttgggtgtttctccttgttgaccttgtctttaggattaaaggcaaataataacctagtgtatactttttaaaaacattttacaaaggtctatgtagaaatccagagcttgactgacatgaaaactcctgtgaattttttctatcattgtatcatgagaaaaatgacctgttactgattcagagtccttaataagggaattcatttttctccctgtcacatgctaaatggtttacttttacatttctttattaaatttgaactgaataatattaagagtgaataaactataacatcaaggtagttaataagggaatcctgttttccctcatatttcaaggacactgttatttcttaaagccacttggaaaataactttttgtttagtttcgttttttgttttcaatccaccagtgatttggaagagaatatatcaaaatatatagtttagttccttaaaaataaagttaaccttattaaaaatatctacctgcaagtttaggaattgtgactgcctagctgaggattcactactttgtcttatttgaggctcaatggattactattattaatgtggcttttatgcagagcagtatataaaataatagctatgttttagagctctgatgtgattgttaattcactttggagcattcacttaaatctcctatagtaggaacactttcacgtattttagtttttaaccaaattgagaaagttatttgagtaacaattcaatttattaaaatctgatattgtggtggttttaaaagttaaagaataaagcaaaagaaaaaaaattcagtcccagtctaaccatgaaaaaatatctggcaaaacccagtcaggggacattctataaactagtcagtattctcaaggttgttaaaactgccaagttcatcaaaaacaaggtaagtctgagatactgtcacaatcaacaaatgcctatggagatatgaatactaagtgtagtgttttccggattttttcctagggttttctccacaatttcttgccaagtcacagtttgacctaaggggcaaatcagatgtttttcattttctttttcttgatttaagtccatttttctctttcagagtcactcattgaggactaaattcttaactgccatgccagtgagcagataaatgtactattttctgatccttttgaagacaagtctgtcattttctctggagggacaacttctcttgccaagtctctttgggttatcctaaatcatcaaaattgggttacttagctgaaattcaatgtgcaaaatacttggctttgtttctattctccttttaaagaaaaaaactcttttttgtttattatatttgcatgcagtgaaactcatgaattttaagtgtgtggttgctgattttggtaactgtatatagacatgctacaactactacaatcaagatatagttctcaaccactgtggtggctcacacctctaatcctagcattttgggaggccaaggcggatggatcacctaaggtctggagttcgagaccagcctggtcaacatggtaaaaccccatctctactaaaaatacaaaaattagccacgcatggtggtgcatgcctgtaatcccagctactcatgaggttttgttaggagaatcacttgattctgggaggcggggctgaagtgagcccatattgcgccgctgtactccagcctgggtaacagagcaagactctatctcaaaataaataaataaaagatagagatctcagccaaaaattttctggtgctcttttgcagtccttcaccttcttcaccatagtcctaggcaacaactgatgtgctgtcactagaatttaaatgagtcatacagtagatttttgtgtttgagttcttttaatggtataatctttttaagattcacccattttattttatttttttcctgagacagagtctggctctgttgcccaggctggagtggagtggcgagatcttggctcaccacaacctctgcctcccaggttcaagtgattctgctgcctcagcctcctgagtagctggaactacaggcatgcatcaccacgcctggccaatttttgtatttttagtagagatggggtttcaccatgttggctgggctggtcttgaactcctggcctcaagtgatctacccatcttagcctcccaaagtgctgggattacaggtagtgacccatggtacctgacccatttcattaacttttattactgtgtaatattccatggtatggatatattatatttttaaaaaatatatttcacagttgatggacatttggcttgcttttaatttttggccattatgaataatagcaatccatatatggatattaggagtaatttgctcacttttgtgtggacacatttttatgtcttgtgtcaatacctaggactagaattactagttcatgtttgtttaattttgtaaagtactattacattgtttccttttcttttctttttgtttctgaaggagtctcgctttgttgcccaggctggagtgcagtggtgtgatcttggttcactgtaaccaccacctcccgggttcaagagattctcctgcctcagcctcctgagtagctgggattacaggcacttgccaccacacccagctaatttttgtatttttagtagagacagggtttcatcatgttagccaggctggtctcaaactcccgacttcaagtgatttgcccgccttggcctcccaaaatcctgggattacaggcatgagccactgtgcccagctgagtaaagtactactatattgttttctaaagtggctgtgtcatattaaattcccaccagcaacgtatgagatttctagttgcttcatacccctgcaagcatttggcattgtcagtttttctaactttaggtattctagtgggcatgtgtgattttaatttgcatttatctagtgaccaatgattttgaacattttttgtatgcttattggctatgtatgtatctccttttgttaagtatctgttcaaatcatctgtacatttttacattgggttgtttgcaagagttctttatatagtctggataacagctctttctcaggctgggcgcagtggctcactcctgtaatcccactgaaagattctccccggggcctgaaagcttaagggaatgaataacttttccctcctcaggcccagtcccaaggcgcaaggccacttgctccagcagcgtgcgtcaggcaagatagcagaagcaggaagagagctggccagaagacacataccccctgaagaccgagagggaggccatccgggtactatgtagcagtcagatcagactgggacacttcctgtttacagaggactgtcaaacccctgccccatcctcacttggggctgacgccataggcccccccccgaatgcccccagggatgcaagaaaaaagtattggatcgaaccccaagagtgcgccgacagacaacacgaggtggtgtggagcaacacgctgttttaacgagtgcctgggtgcagacgggctgaggtctaaaatggcatcagccccaagtgaggacagggcaggcaggcgttttatagtctcctgtaaacaagaagtgtctcagtctgatgtaactgctgcatagtacccggacggcctccgtctcggtcttcagggggtatgtgtcttccggccagctctcttcctgcttctgctatcttgctgacacacactgctggtgccagtggccttgtgccttgggactgagcctgaggagggaggagttattcaccccctgcccagctttcaggtcccggggagaatctttcattcctatttggttatagaaaaaaggaaaagggatgactttctcaataactacttcaggcgtgacataggggtggcgtgagcaccttggaaaaagaaaaacttaattttttggggtattcttgagagacgggtttgtatccatcatgtcgctgtagcaggagcaccgtctggattttttggtggctagtgggataacacaggggagaaacaggaggaacccaatgatgaagattactgtccctaccagtattttaaatcctcctaaattagagaaccaccctcctagaaggtttgttgggtcccatcccttccaggtttggactgatacatgggctacttttctgatgtttgaagcgatttctagaaccgcttttccgttatcgtctatgttaag

SEQ ID NO: 94904 - DNA, 189817 bp, Homo sapiens
  misc_feature (1)...(189817): n = A,T,C or G
acagatgtgcacacactcacagacacatacactcacatagacaatgcatacacacagaggcatacatgctcagaaatacccatacacacagatactcagacacactcagtcgctcacacagatgtgtgcacagtcacatgcagacagacatatacactcacaaatatatagccagacacacacagacacacatattcacagggagttgtttaatggaaacagagtttcagttttgcaagacagaaacattctggagatgggtcatacaataccatgaatagccttaacactactgaattgtaaactgaaaaatggttaagattataaattttatgtgtattttaccacaattaaaattttttttaagacagagatatttactgtaagaaggtgggtacattagttaaatctttctttcctaaggcgagaacagctttcttccatttgcctgccatgaggtgaggcagcccccagcaatccatcactgctcctcgggaaggtagattacaggtgatcgtagatccctggcaagagtgggctatgcccagggaagccaaagcaaagagaaaactcctgccatctgcacctgtccctggcatgggttttcatctttcctgaaagaagaaggaaaagaggctgtgggagacatggtcctgtcttagatcccacgccctattgtggtggcaactgcgatgatgctttataaattccttttaaaatgtcattgccagactttgtgaaaacgctcgtgaggctttgaaaaatatgtgaatggatacagagggccgcttgccttcccccactgctcactactgtggctagaacctgactacaaactgcccacccagcctcccttccatcctctcccccaggacacttccatctggagtggaaagttttctccagctcctacaggatgaagggcagtgcaggagaaagactctcccaagagacgaacttgggtcattcatgtcagagggtctggcatctttgaacaaggccagttgttatttatgtatctactcacctccctctggaattacatctataaccaacaaaatccaggtcttgttcagctggaaaaaaccagcagcgtccagacatgactgggttttttgtttgtttgtttgagatgtgaagttttgcatgtaaatcraatagagtttgccagaaaattcattgcctgaacaaatatggtctgctccttgggtattgccaagtaggagaaagatggtttgtctggagagactgcagagaaaagtgtcaataccatagaaatgaaaactcagaattaaaggatcaaggtaaggggatccggaatccctcctcccacgtattttctgtttactcacaactcccaaagtttactacatatttctgagagacgccaggatcccagagtgatgtgtttaggaatttttaccctgcttcttggggaggcaatggggtgagcccttcagcttcagaagagtgagaaggtatgcccaggcccgtgcagccagagggagttcacgtctccttggaggtctcatgctgagctggtaaggccaagaaagtaggggcagaactggattacccttgtgacgttctcattggagtctcctcgtgctccaggcctattgacatctcatgtgagggactggccatgccatgatgaaagagcacagtgtgttgtggcagtcctggaactgtttgcccagagagcctttcctcaccctttccctgtatggatgcagtaaagagttaacatagcaaacctgaaactggcttagaaagccctacttgcaagcttggcccttgtctggcatctgggaacttggacttcaggagtcttcccactgttccctaactgacaagtggggctggctgggcctaaactgtacaaaaattgtggctcatgcttaacacctgcttccttcagggagtctggaaaatggctatgagctaggtagagggtacctatgtgaccagccccccataaacaccctgagcactgagcctctggtgagcatccctggcagatgacattatatcagtgttgtcacaactcattgccagggttggtaggcacagcccatgtgccttgattaggacaggacctttgggaacttctgcctggtcctccagactttgcccaagtgccttttctctgctgatttggatttgtatcttttcgtcatgatttatcgtgtagtatatatgatatatgtacatttgtatctgatcatagctacgtgggtggccgagtctggtgagtcctcctagtgaatcacagaacctgggggtagccttggggccccagcacaggagtggtggggctaactttgcaggcggtattttccagagtcctttgtcaactgattctagtggagttcagcaaaacggcagacaagggagggagagggagcgggaagaaagggacaagctaggatcattcttccctccctcttgacctcagacagtgtttcttggaattatgggatctaaagctcccaccagacaggaccacacggttccagtgcctgacctaccctcagtcctcccgctacaacgacaccaactcctctctgctgttgctaattgtggagttgattcaccttctcgtgtttggtttcttgtctcttctctcacctgtgtaaccaatcccctgccttaaattccttcttttagaaagacctaaagtggtttttgttttcctggatgaaccccgtctgttacatgccttaaatatttacatggctccacttccatgccaggcagggggcattcagaaataaaagacaccatcccatccttaaggacctcagagcctatgcacctgtggaagttgcatccctagcacagttcaagattcactgtgtgaccagaaacctttgttctgatgtctcagccatataaccatgaggaataccctgtaaaatgaatgggcttcaaccgcattctagggcttggtggcttagacacatttttatcgactttgtttagcacaaggaaagccattgcatttatgatgctcttgaggttagtggtttgggggagtcagaaagccaaccactgtgtgtgtatgttcacaaagccaataattagtctaaggccaaaagtgacaccgtggaggtggttgtgagggtgacaatcctgttctgaatgcacaactcaaccccaagtcccaggggtacctggcatctgcgtaacctcatctgaagggtgcaagggtggctgctcatcctccaaccccacatggatgagggtatcttggaattctagacactcagatttgatgtttgccaggagaactaccagaatatgatcgttaaggattgggggagggtttaaaaaatactgaggagacctgaaattgtatgaatgctgaggggaagcagtgctagacatctttagggtctttctctagcactcagcaagggatgtggcaaagacggcctttggatagttaagtggtcagcagcctctctccagggaactctggctggagtccctacctttttgtactctagtgcaggtacagccaaggaaacagaaaatgatcatgcagtgtgaggagcactacaacaaggcaaactccttgcaagacaactggggagtcagtggagggagactgggcagggaagaaagatggcagaggaagatgatagggaagaaagatggaagccaaatggcagaagcttagtgatgaagaggaggagaggagaaacaacagtggaaggcagggagggtagattggtgttgggggaaggttttttaaaaatactggagacctcaaattgtatggatgctgagggaaagagcagtgctagaggcagggtccagcttgtataggccttgtcagtttcagcttgcaatttatccaaaaagcaaagagaagtagccatataagggctttgtgcaaataatttgatttcrgattttagccctgaaatgctcattctgactgcactgtagagaatggactggaaaggggtacatacacgggtagattcaagggctgtttaagaggtaggatagaaaatatttgctcaaggatcggatttgatgattgagggagagaaacaaggaagcctsaagaatgatgcccatgtgtctggtgtaccacctgcgtgcaaagtgatggtattcattgaggtagggaactcctgagatgcaccaggttttccaggaaagtgatacatctcatgttagacatgatgagcgtgtgttgtcactgggatgtgacaaatgaggatagccagtaggcacttagatacgggaatctgcaattctggaaaagatcttggctaaagacccagatttgggaggtgtcaggatatagatggaatttgaaaactatgggagttcctcagacaatcaaggaatattgcgctgcactggaggaaaccacagagtgttcaatgtcaaggaggcctaggaaaaataccttcaaagacagagttcaatgcttccaaaaggtcaggtaaataagaactgaatcctgtcttttggcctgagcacaggccttggagaccgtgacctccactttcagtagaatgatgaggcggaagccagatggcagatacttagtgatgaaggggaggagaggaggagtaacagcaggagtggggacataggttgggggaggtttttaaaaaaatactgaagagacctgaaattgcatgaatgctgagaagacccactattagcaagcaggagcttgaagctgcaagaggaagagtacrtaagagtcacagcaaagccccggagaacaaggcaacgcagaagcctggtttggagatgcagagggaggagggacctttccaacttcagtaacaagaagaaagaggaaaagatagataaggttgcaggcaggttcatagattggtagcagaaaattgagagaatttctaaccaatggcatctttttttttcttctttataacattgggagattgagtggcagggtcagaaatttgaagacagtaaagaaggttagaaatagccatgtttgactgggtgcggtggctcacgcctgtaatcccaacactttgggaagccaaggagggtggatcacctgaggtcagaagttcgagaccagcctggccaacatggtaaagccccatctctactaaaaatacaaaaattaggcgggcatggtggcatgcacctgtagttccagctacttgggaggctgaggcagaagaaycacttgaacccgggaggtggaggttgcactccagcctttgcaacagagcaagacttcatctgaaagatagaaagatgaaagaaagaaagaaagaaagaaagaaagagtaaaagaaaaaaattaaaattttagggggaaaattttctaatttttgaacatgcactaaaatgattttcagagaaaaccaagtgttattttctaatctgcatggcattattaaagatgtttactcatcttccttggggctaggcatcccattcctgcaggaagtcttgtggttaggcggtggctgtggctctgggatgattcaggaatgcagaccatgccttatttgcacaggagggacacgttgctctcactgcatgcatggtcacaactgtctgtgtgacctgtctgtgggagggcagacccccctcctgccaagccacagtagcagctgacctgccaggcaaaagcattcctttgtaaaggaaaccctcccagaccctctgaccaaaggggacgggtggggacttcctggcactgcagggccccttgcctggtactcccagcaactggttgcggtggggagggcagatctagggrtggggatggggaggagaagtgggaatgggaaattgggagtcagaggggcaagtgggagagaagggcgcacctgccgggataacaggccagatgaagtaaatagaaaatcctctgagctcccctactggctccagctgtggagaagggggaggagaaaaccctgtgggacaggggaggagggtgagggctcctcttaggaagttatttaagagccaactgtcttgtctttcccgagtccgtttgaggaagtccccgaggcgcacagagcaagcccacgcgagggcacctctggasgggagcgcctgcaggtaagccaccgmccctgcaccctatgagccagggmccgctgcgtccaccttctgcacctcggtttcctggttgaaccagcaagcggcttgctctgggccctgtggcgccggtcacaggcagctccacttgcccaatcctggcttcccgcccccaactccgcacctgcccagcccagcttctaagcgggacttctctcaggctctcgaggcagctctcccgaagccgttgcttgcttagaatgccaccaaatggggatgggggagttggaggtgcttccccaagggacgagccccctttcctcagggagcagattatggagctggaacacaaaaggtggagggagtggggccaagtgagaacagcctgctagactggaaccccgccggcttggctccccactcctgcgcgcctccccactcctgcgcatcgcctgcctccrtcccaatttggagctgaactcgagccacttctcctccttagacccgcccagaagcgagggctcctgcccgccgcactcacccagccaggcgtgcacctggggctccccccttctcccccttagcactgtgtctcccgacagcgygccacactgttctgcacccctggcaatgccrcagcctaccttcggtatttctcactagaggatggctctcgcagccttctccctatcattaaccctttttcgctcttctccctcccttcccccstcagctcaccaatgactgtaaatatatttatctatacttatggatacccattcacaccttatgcatccaaacactcctgtctccttctcagaccagacaccttaggcgtggttgtcttttctccagcatgttgttagtgctccacatgtctctggaaccatctctctactctggtggcctctataatggggactcttcacctcttgngggtgtgcmtggtttttgaaaatagccaagtctccaggagtcatgactgggtaatccaggggatcaagggggaaccttcactgggcccagaaacaaagtcccccttcatttggtcatttggtcaacaagtacttactgggcactgaccgtcaggtgtgtgttgtttaaactggctcagtgcctgcacaagctccaagggaaggggaagcaggcttggggaatgggaaatgttggcaaccctgacttcttaagcctattgatagccctattgaaaattgcatgcccaacctctccacctccttatcctcytccatgtggctcaatttccaaagcagttcctacctcctcacccctaagtggatttacttayggctcttcttgggctccaccctaaccctatcagactataatctatcagagcaaacattctgttttgttctctgatgtatcccatgtacctagatcacagcctggcatgtcataggccctcaataaatattggttgaattaaattgcaaatgtaaaygctttagaagacaacatttrtctggacatgsttgtgtgcgtttattcttaaaagtgacttataatctcataaatctgtatgaaatgaacatagatacagcacatgcatataacaggaaacatttcttgcgaagatgctgctgtaggattatggagggtgggggaatctgggtctccaaaaatcttttaatttttaaatttctttgaataagccccttttcttctgctttccatatgttttgacacatacaaaaatctccccaagatccttggggaactgtattccatcattagactaatccttgctgccacttctcagtttttatttatgcaaacggcaaaatgtgttgctcaagtgctatcacacacagatatatctgtttctctattttggaatccttgtctcaaatgttactcactttacatgccttttctgttgtcttctttttttttttttttctgaaggaccttgtaaagtcaaaaatgtcagaaacttccaggaccgcctttggaggcagaagagcagttccacccaataactctaatgcagcggaagatgacctgcccacagtggagcttcagggcktggtgccccggggcrtcaacctgcaaggtatgagcataccccccttccccaccactctgggtccaggcacagccgggccctggcccctcttccctgcaggtaaacatcctctgtctccactggggttcccacaaaaggaagccccctgccaatctctggttttataaaggaagaaagcaaaagctttcttttaagtggtgaaagcaccgaagacccagagccttgtcccagttctgccccttactgaccttgtaacctcagagaagttgctttgtctttctgcctctcaactatttcctctacaaaaccagagtgctggattagctagggcctcttccagccctactgctcaatgctttagagaattttctctagctggaatattccacttccaaaatattgtggctgttttgattgtctggcttgcacctccttccttctccctcctccctcctccatccattgctgtgaatttcagagccggggagaagtgccagactctgacagtaatagagatagaagccctctatttctctccagagcagcctggtgagctggcaaggcaagctgcttccccagcctcttgcctctgcctgatccctagaaacctgttccgggtacagcagccrgcagctgacctcctctcagccctgtcagtggtgacaaggyccaggtgccagcactggtttggtgatacagacatcattcccctgggccatggsagggacattcagactcatgtccccgagtggcattgagcagggagtcttttttgtcaataacattcatgcaccaaaatctaattttactcctaagggtgttctgtgctgggttycactggggataarcamcyatttgctgggataggtgagcatggtcatgctggagctgtgtggtcgattcccctcattagaaggagacsaatgcctgaaagcccagattgatgcagctctccatatagcaaagggaaaggggaagtgcagtttatccagcaagccagacacttgcccaggtgttgtggactggtgtcattgtgttactgtcacactagatgatwtgatatcaaatagtgaaatcagggaggtatccagtaccatccaagtttgggaaaagaagttcacagaacagaagggcatcttcagtcaggtggtagagtttgaggggctaagacgaacttgtagttctgaaatctgtctcccagctggatgccactctctaaaaccccaccttgacagccacagaactgagtttaagaggacttgctaatcaatgaatcctcatccccatgttatatgttaggaaatagaggctgaaggtaagcagttgatattcactgcttacccagtctacgagtctttttctttaagaatgcaaataaaatgcaaaagcctacagatatcaaattattaagcaggttgcctttgtgtattccatcttctagcaaaattcccctgtggcccaaaagactctgggcccccggaaagggggtgtaggcactggaagaagtgggcagtaagaacaggaggagtaatgacacaaccgtccttgccacgaggagtcaggacacagccacccttgccaggattgggaaaaacgggaacctctacaaaggcagtgcagggaagcagggaagcagagagcagaggcagaagacctggcttcctgttccacatctgccacttcttgctcactctgggaaagtcatattggtgcccaagcctcagtttctccatcagcaaaatggaagcaatgcctacttcacagattgtcgtgagcatctagtgagcagtgtctgtgatcaagtctgacccacagcacgtgaccaataagtgttcattgactgggaatgtgcaacttatcataycccagcaaggtcaggaaagcactccagggaatacttgttcctatgaggaatatgtacgacctgtagcccccataaatctgacatctgaacaaaatgctgctagtaagacattaaaactgtcagagaacatgtgcaggtaggccaattaagaaaaataaaatctgggattactgcttttgttgatttctggaggcacaggtggggagcagcataactgaattactctgaaaaaatcagtcattatttacttggcagacatatgtgtccacaacccaagtgacattctgggatatccattagaggcactggcataggaatatgaatgtccagtgrctgtagaatgaatgaacgaacagtcaatcacttgtgaattgaatgactcatagctctagtggcattataatttattattaataacaagctacagatttcatacatatgcattcatttaatatttttcacagacaagataagtgttacatgctctggggatacggtttctgaagcccagaatcatgacagcaagtcccagatgagaaggacaggaaaaaaactatatatatatatatatatatatatatatatatatatatatatatatatatatatatatatatgcacacacacatagcagcacacaaaccatctgaacaaggaggtctatctcctggttaccttttgcatttcagatttatatttaattgttctaaaagcaggttttctggcactatatatcaagttttctccaagtcactaagggaygaaatttgctaagcgactaaaccttggaaagmacackcatttttaaaatgccatcttcatgcagttcacccagtggccactagtggcctctaagaggccttgtatccgcggttaccaatctgcggatgatgactttggctccaggaacaccagcmccaagttaaaytcttgtctccatttttttcagtggccactcttccagttagcaagctgctcttgtaatactgactgagaaatgcagagaggcaagaagaggaaaaggggggaaatggcggstttttcatttctaatagttctgtagcagtgagtcctgcccatyactgygtgtgatatayacagtgttctaaggtatactgagtgtatataacgcccttaagtcatggctttggtaacatttggttaagaattattttggtaaaatctrtattttaaaatgtataaactcatgtaagtttcctctcatacacaccatgatattcaagaaaaaraaatgaaatatttgaggtaggcacggaaatcccagaggtgggaccagccattcagtggtagcgtttgacatctttgcatgattttaggcatctttaatgtcaccctttgaattcagttgtagccaggaaaggtactgagacgatctcctcagatttggatttgtatcaatttctaatagactgttctgcaggcttagttggtgtttctgaaaaatctctccactgccttcctggtctgaaaggttatgtgtagctggaaatgtaatattccagaagaaaccttatgttgttggtctgctttggctctatattgttaacaataggcgaccatttgtagcagtaattggaatcatttaacagttctattgtattgaattaaaactggaaagcaagcctggccctatttaaaaactgggttctagtagtttttcaggctaatggggtcttatrcctttctaagaatctcctccatcccaccactccttgtcagaattaaatcaaccaattaatgataaacctcctctttgtgcagagtaaacctctctggattgaaggttactgagagactaagaggcattcagtgtatgactgagaaatgctattgtccagcagcagttcctcctttcattcagttcctggaaaaatatacactggttttcacatatgtgtcaggagctgctccaggctgtcccttgggacatgaagttgagtaagttagtccctggcctcaagaaactctcagtgtagaagacaaaataaataaaagatcattgcaattcagtgtrataaagactgtgactgtgatttatgcaaattgcagtgaaataacagaaatcaatgtctagcrgtgtggtggagtggggaagaggatgaggagggcttcctgatgcaaggatattggagccgagacttagaggatgagtatgagtgttcctgacaggcaagcgcrtggaaaagtgtttgcagtagagggaacagtatattgcaagtgaggagggactaaaagatgaaagagaagatataagcctgggaaargatggcaggcatcacaccataccaggccttggggatcttgctttcctcctgcagataatgsgggacttgagaaggattctaattagcagaaatacataatcagaattatgctttacaaagtggtagggagggctgggcacggtggctcatgcttgtaaccccagcactttgggaggccgaggtgggcagatcaccagatcaggagttcgagaccagcctggccaacatggtgaaaccctgtctctactaaaaatacaaaaattagcctggkgtggtggtkggcgcctgtaatcccagctactcgggaggctgaggcaggagaatcgcttgaacctgggaggtggaggttgcagtgagccgagattgtgccattgcactccagcctgggcgayaagaccaagactcygtttcaaaaaaaaaaaaaaaaaaaagtgtaaggagaaaatggagaacaggagatatgtttggaagctgtagagatactccaggctagaagaggaatagaccagagggrttttagcccctggaggtatggggctcatttctcttgttscagcttcctctgagcacctgagcaatccttcaacattataggttccaggatgtattaataacaacactttataaattaagccacttaagaaaatgcttttaatcattctaattaaggacatgttaaaattctgggtacccaaaagaaatgtgagaaagagttatttttcctgtttttttttaaataaataaaccagtttctcatggatagcatttatgcttatagttcaataayaatattaccaaaaattgcatggagaattcagttcactagggaattcctagtatataaacctaaacatttaacttatttcaagatcccatctgtgacaggtataatcattctctgaagaatattttacaacctagggagacaataatttacattttgttcatattagasaaaaagyaggaggacagggaggcagttgctcctccggagatttttttcttttctttaacagtccattttccgatatgtttggaattaggctaaattgtgttaggtagacagtttgaaagctgtcactttgaaagagcgagctgccaagtttctagctacmgtatttaaaaaaaaaaaaaaaaaaaaggcggcttagcaatgarctgttccattttgccaggaactaggcttggacaggggaagcaaattcatttcctgtttgtggcaaacggagtctggatgatgataagactttttccatctaaactgccttgtkaacccagtaaacaaagcaaaaatcaatatgctagattcatcaatgcttgctggaacacactccatggcaagggacatttcctaggcaaaatggacaatggaatgaacaatgatatttttatgtctatgttcatattttatacagtcatcttcagagtctttgatactatcagctgttataagaaccaaatacttggttgacctgtgtgtggctgactcatgggcaatgaaataaattttgttgaatcagtggtattggggacctcacctctatccccaatactttggacaacccattaagcttsctcatgtcttttccatttgactacagtctggaacattatttctttaaactctcaacctctctgtgtagcttttaatcttccccttcttagccaagttttattttttttttatgaaatgtctttctttgtttaaatcattttaagacagactttttttgtttttgttttgagacggagtccggctctgtcgccaggctggagtgcagtggcgcgatctcggctcactgcaagctccacctcccrggttcaagcggttctcctgcctcagcctcccgagtagctgggactacaggcgcccaccaccactcccggctaattttttktwtttttagtagagacwgggtttcaccgtgttagccaggatggtctcgatctcctgatctcgtgatctgcccctctcgcctyccaaagtactggaattacaggcatgagccaccgcgcccggcccccaagacgcacttttaagagattatacaggaaagttttacttatcactgccttagtttttccccacttatagtaccactgtgattttatgtttttcctgaggcattggcttgttgaagtkatattgcaacagagaatcaaaagatcacttagaaaaagtaacatgttagaaaacatcatgcttagaattaaatgtctaaagtataccagtatagatgatataatttaaaacaaytgataytatcagctgtcataagaaccaaatacttggttgacctgtgggtggctgactcatgggcaatgaaataaattttgttttatacgtataactttatatatatgtaactttatatatatawaaaaagtttgcttatatataatatatatacacatatcatatataaatatattgtttataatatgtaaacaatatatacataaataatatataaaaastatatattatatatgtaaacaatatatttttaaaamccaaactcatgggtttatagttttttcatagtgaaaacaaacaaatatatagtttgcttatatctattatatataaacagtatataatatataaagatataaataatatataatatataaatatatatttgtaatatattatttgtttatatccatcatataatataaacacatgtaatatatataatttatatgaacaatatataatatataaacaatatatgtttttatatattatatgtaaacaatatatgtttttatatattatatataaacatatatattcatgatatatatgtatgtttgtttacactatggaaaaactataaacccatgagctggggttttgtctttttttttttgacttaggttttctattctcaaaggcattaatcagcaccctttttctcacccttygttatcaacatataagcaggctagraagacagtattttattccratgtgaaacaaaactgctgatctggagktcttatgttataaattcccacatcataccttcaactatatatatgtcctgaaactagcatattttgagaataaaatggkaaatgacatttaaaggacacctatggttaatcctacagtaaatgagataatttattttgaaatgaatgatcaactctacgctccaaattttcacgtaaaaggtgttcaggtgaaaggaggcatatttgctgtggcatttctgcacactgccccaggcactatagcaagataattaagacatggtccagtcttcaaggggattacaatcccatggctaaaaaatcacctatataaagataatacaaagagacratgatacttttttttttttaaaaagaagacagatgtttcctgcgaatcaagaggagaaatgctttctatttacctgtggaaattcaaagcaagcctgtctgctcagaagayaaggagtataaaatggcatgcttccctgggaaggctggaaggccactgctaaaaagcttcccagggacmttctttaccttgtgacttccattgctcagattccagcctcrcaccatgccttctcagatacctgactacttaatgattggtcctaagggccaatccaaatgctcagtgctattatgattattattgccatcaatttctgagcatttaccatgtaccaggccctaggatagagcactcggtgcattttctcatttaatcctcacaccaacttcattttgcagatgagaaaactgaggcacaggacatttatgtaacttgccaaggtcacaaagacagtacgtgagagttgggatttgggttcaggcagcctagctccacagtctatgctcttactatgctcttctacttctcttaataataataacaacaacaataataataaacatttattaagaatgtacttgstgtcagccactctataagataggtacttcattcccatattaaagataagaaaactgaggctcagakagattaaataacttttctgaggctgcacaatwagtaagtagtgaagcatttccaaaaacatattctgaaaaatgcagatctccaaagaaaaaagtttccatagtcatttacrtttggaaaccattgcccctctgagatatctgtggtatacatcagcatattaaagtctcacatgaatgcttcagtaaagaatcctgatcagctttggttaggcyagcattttccacactggtttaaacatggagctctaattcttccaatacctgtcaatatcccataaaactagcactatgccatgatggactgactctaaccagtctcactagacattaaccaggtacactaggctaggaggtaaagctggaaagccaggttttcatttgcaatgagaactaggatggatgagacataccaatgataccaaagaaatactcgaatatttctccgtctccagccttactttgccttgtaggtagagctgcttgggaagccaaggcaggactcatttcagggacacattatcatgcagggagggagggtaggaatagagaaggcaaatccaggagtaccagaggagcagtgccttgaacccctacatgcaggctaaactcacgtggcccctcacccagaacactgcaacagcttcttaactgggttcagcttccagctttgccccttccaatcccttttccactctgccaccagaagcagtttcaatatatatataaatctaatcatgtcagtttgctgtttcagattcttcactggatccaccatgcaattaaaacccaaactccttcgcatggtctccaaggctcgtgtgatgagcaggctcctccttactcttccaccgtggctcccactagtacatttcagccaaccatcatctttcaatttcttaagcaactatgcactctcttgcctcagtcttcacctatccttctttctcygcctgaagcattcctctccacccccctttccacatggacaactgactcctcttttgctcactgcttatgtctcacttccttcagagaaattccttattttctaccccctaaatgtgggttaggggctcctccctgatactcccctcagttctctttacttcctttgtcagagatgtctgacactgtgtcataattatctgtccacattttagcatctactgctgtgcgtttacttagttagtagttattagacagttgcctaatcaacatttatacccatgtcttgagtggcaacataaaatagcacacttataacattcccagaggacaagaagctagggagaatattaaatatattaaatgcatacttaggggttaaaatgatcttaagagcatgggacagtgagccaaattcaataagaagaaatttaacccatgcaaagtcttaatatcgaactaaacagaagaaaacaattgcacaaataaatatagccaaatagcaacatgagtgggtgacttgtaggggcctcaactgaattttgatccattgttgctagaaataacattagaatgtgttttaagggaggctgaggcagggggattacctgaggtcaggagttcaagaccagcctgaccaatatagtgaaaccccatctctactaaaacaaaaacaaaaacaaamaaattagccaggcatggtggtgtgagcctgtagtcttagcaacttgagaggctgagacatgagaattgcttgaacccgggaggcagaagttgcagtgagctgaaattgcaccactgaactccagcctgagcaacagagcaggactctgyctcaaaaaaaaaaaaaaaaaaaaaaaagaatgtgttttaagggttttgctttatcagatgcataatataaatcaacagtgagttaagagtatccaagacactgacaatatcttgatktgaaataatagactgtttattttaaaagatgtaatggtctcttttttttttttttacagaaaaaccacaactagagtaatgtacttaattccagaaaataacacttcaaaagagaaattgacaaagtggaaaatattccaaaacagagcgttggataaaagttctagaaataacttcttaaaaacagttaaataggctggatgtgatggctcacgcctataatcttagcactttggaaagccaagccggcggatcacctgaggtcaggagttcaagaccagcctggccaacatggtgaaaccccgtctctattaaattttttaaaaatacaaaaattagcggggyatggtggtgagtgcctgcaatcccagctactcaggaggatgaggtggggaggattgcttgaacccaggaggcagaggttgcagtgagccgagatcgcgccactgcactccagtctgggtaacagagcaagactctgtttcaaacaagcaaacagttaaataaatgaagaatgttttactcagaaaaaaaaaaaatcctatgagcagtctttaaatacctagagagtgccagctaaaatgaataagaggacttattctatatttatctagaagtcagaacgaggacccatggttagaaaaattacaaggaagcagatgtcagtttatcttaagagaagttttcaaataattagagttgtttaaaaatggactgtttgccctatgaaaaaatgagttccctgttcaaatggaagctagaagcccaagtagtagggctctcatgaaaatgtttcatgcagggtatagtagttctaccagatggctgagaaaatgctattgctgttctgtgagattctgtaaggatgtaatatcagtatattccttccattggtgctggtaaacggagaactgatgaaacccatttctaaggactttggtgtttagctatttttaaaaaaaaaaytttaaagcccctgtgctaagaaagaggaccagaggagttgattgctaagctccttttcaacaggaacatttgtgctcctccagctcattcttgggctggtttatcacggrgattgtggtcttaataagaccagaggacttaggagaaaggcagcttggaatagagaggtctagagaattaaacatctttagctcacagcataatgsaaagaaagtgcccttcaggggaacatgtatacaacagggttctgagaagaggtaaaaataaaactgcatcctgcactttctgcttgccgtaatgctgcagtcagggtaacccggggagcaccacgccctgtgaaatggctgtcacagtttaggggcagtgagccacagtaagcctaggacccactatgtgccaggcatagtgccagacccactgcaccgttatctcattgagccttcatagaccttctcagggtattagtatcctcattttaaaataagaaaattcagattctgaaaggtaaagtaccttaacgcagtaattttgacacctgagattcaaactcaggattgcctgaactttgaattgctcagcagtgtttcaggaactcctggactttaggaccgaagaggatcttaaagagcccaacttcttggttttgactatggaacacaatggggtccaaagggaccaggcatcctgcacaggatttatgtgtggaggtaaaggaagccattcgactatggcaggagatgccccggcatgggtacaagctcagcaactgtgctttctgcgcacatggtgcttatagccatgaaggcaaatcatgcatcaggcaggggcagggagggggagggcaagaggccagggcacccctgccgacccttctaccctcccaccccaccttctccccaataactctttacaatgccaaatgcacatgcagaaaccagtctctagactagatcttctaaagtacagtgaggacagggagttaggatgacccccactttcagtcatcattcatagaggggaaggggaaaagggcaggaagagagctgactttcatgtgtcagaccctttgctaaatgcttgcatacgtgtcatctcatgccgtctcctgtcacattcctgtaagaagtggaacatgttaggctatgaaatgaatattagtgtctccattctatgatgaagaaatgaatttaagtcacacatacaaagttagacaactaagaaacatgtgatttacgtttacactcctgatgccacaaatcaaaagaaaaacctgtgaatgttggcatcagacagtccaggttttgacttttgaactggcccattagtagctaaggaaagctgaggatagtttctgtgtcactgaaaacaatcacacttayctcatggaaatcttagtgtcctttctccagacctgctccctctctttcctgcatttgagggatgagatctacttttagaattacagagggaggaggcatttgaccctttttgaggtaaaaggagaattttagattaatggctaactttgtccttcgaatgtccccttgaggctttgtcagatttgattccttcctttggaaagataagaaaattgaagtggctattccctgcttctgcctggttagtcacagagtgaggcagtgacatgatgggaagcttctaacataacgaaaactagcgtgagactgagaacctgaagacttcaactctggccctagcttctctgtatttggatctcccagacaggcatccatctatcccacagtgagtgccttgtggtctgaaacgagatcaaaggtggaaaaagctttaaaaagctctcttcaaaaacaagaatgtcacaagaggctgactctcgagactgtgttcccctacccctgcctcctacagagtttcattcagcagaccttgctacctgccttcttcagggaaaataatcttgtttttgagtttatgtttaaactaaagttagttgattattttcttcaacccttgtttttcttgttcatagagtttcttaatgtcacgagcgttcacctgttcaaggagagatgggacactaamaaggtggaccaccacactgacaagtatgaaaacaacaagctgattgtcygcagagggcagtctttctatgtgcagattgacytcagtcgtccatatgaccccagaagggatctcttcagggtggaatacgtcattggtgagtgccatgtgcaagctccagtcttgacaccatgggttgcattgtagagagaggtgggtacaggcacagttgtgtgatttcctagtgtcatatgtcaacagtgkcaggagctggaatgacatscagcccctgaattaccctgtgctctaagactggtctgtatagtgccaaatattgataacttgggcccacccaaggagaaaatctcatataaataaaagtaaaactggtataatgtgttgcttaactaaattattcttcctcaaacaaatggttttggcatcctatgattctaacttttatctccatgatttaattggtctcgtgctgaaaatgtttgtaaatcttagcatgcaatccaagtatgcattccgaaagttgattctgctctgatctagtcccatgggatggcccgtgaaaaatatagtccaataaacttcactaaacactttgtactttaatcacccttttttttttttttttttttgagacagagtcttgctctgttgcccaggctggaacagtggtgtgatctcagctcactgcaacctcttcctcctaggttcaagcgattctggtgcctcagcctccagagtagctgggaccacagttgcacaccaytacgcccagctaattttatgtatttttggtagaggcagagtttcaccatgttgtccaggctggtttcgcactcctaacctcaagttatccacccacctcagcttcccaaagtgctgggattgcaggcatgagacaccatgcccagcctttaacctcctcttgaagattaacgatgcacattagcttcaaaggtctggggaaggaccatttaactttggtctggtgcttcttaaattaatttgatcatggaacccttttattaagttatagctattaacttttgacacattttggtaaacatttctataggaatttataagattatcaaggaaatacatgcacagagaagcaggggtggcacaacataggaaatctgcccatataatcctatgcacaaattaaaggaaaaaattaggcaatcaaatcagyagtcacagaaaggtacatggtaaaattcagcatccagttttaggaagagtttaaggggaaaaatttagaaaaaaaacacctcaatgataataaagattgcttacatcaaaacaacaacttttgatatctaagtggaaaaaagttaacaaatttcactgtaatcagaaattagaaagaaatgcctgctatcatcattccctttttaaaaagaagtactttaaaggytttagtaaatgaacaatgtaagagatacatctgctataaatgctggaaactaagaagtaaaactatatatttgctaatactatgattgtgtatgtagaaaacccaacagattcaagggaaaaaagcactgtattaataaaactttgtaagttggctagatagaagataaatatataaaaatcaataacttttatcttccccagcactaagcacccagaaatagacataaaaaaatttcacatgaccaaaactataaaatgtaggactaaaacctgaacacgcaacctatataaaccagctattaaatcttaataaaaaacatgagaaaccaatgaaaagtcaaacatgttcttgagtgggaagtctttctgtatacatttttagtctcccaaggggttggtcaaagaatacaaaatttcagttagatggaaggaatgagttttagtgacctattccacagcatggtgactatagttaataataatgtatatttccaaattactaaaagagtagattttaaatattctcaccacaaagaaatggtatgtgaaggaatgaatatgttaattagcttgaattaatcaatccacaatgtatattttgatcaaaacatcacatattgatcaaaacatcacatcccaaaaccccataaacatatacaattatgattgtcaatttttaaaagcctcccaaaattaatatgtaaatttaatgcatttccaattagaatcccagtggagttttgagttgtctttggctttggttttggttttttggacttgtataaaataatcttaaagttcatttgaaataataattacctggtgataaccaaggaaatcatacaaagaaataataagtaagagtattttctttctgaagcggctatcagaacatactatgaaaaatatttagtaggacataatagagaatccagaaatggatttcagtatatgagttaatatgattgttggtttcatgaagtaagaagaccatatgagattttawctgtttgcttgtttgtttttacataaatgatgcagaaataactgactctccractggaagaaagtttaaaaattgaccctcatcttrtcccatatacagtagtaaatctcagatggaatgagtattaatgtaaaaaagacaattttttgaggaaatttaacagacttaactaaaaactggaaactctgacactgtagaagaaagcaagaaccatgtacagttatgtgccacatagcaacatttcagtcaatgacagatyatgcataggtgatcttatgagattctgatggagctgaaaaattcctgttacatagtgatgtcatagctatcataatagaatagtgagattacttatttttttaaatgtactgtagcctaagtttatagtgtttataaagtctacagtagcatgcagtaatgacctaggccttcgcattcactcaccactcacccagggctacttctggtcctgcacgttccattcatggtaagtgtcctatgcaggtgtaccattttttacttttyatattgtatttttactgtactttttctatgtttatatataaatgtttctatgtttatatataaatacttaccattgtgttacaattgcctgcagtgctgtattcagtacagtaaaacacactatgagtctgtaacctaacagcagtaggctctgccatatagcctaggtgtgtagtgggctgtaccatctttgtttctatgatgttcacacaatgacaaaatcacctgcctaacaacatattacatcccgtgcatgacaacaaattcacgtttgaagctctggaccacagttctgctgcaattatgagggaagttttatctccatctttaaagccaaatatttagggtggggagaagaggagagggaagcttcaattctgaattggacttgtctgaggtttgaaacactctcataggccgttcagaaaataattatgataatggaagtcttagaaaaactggtaagatgaatgtcttagatcgggttactaggaaataaactctgagaagaagacttgtgcgcagaaagtttactggggagatctctcaggatcaacatctgcaagggagtggaggaatcactgttggacagagggaggagttgaactgcagtgcagacagggcccccgtggatctcaaggtgaactctagctatgggttggatcttcagagttgtctcgccttgagccaagggcatgggcctgttataccttttataccttgactggggttacagccttggtgtaattggttctctgtggctgagggtaacccctgaaagcaactaaatgaatgagaattgtcagccaccaacactcccaacaatgggaaaggtccaggcagcccaccacagcatccattacagtgaacattttaagtcctcttttcttttttacacaagaaatactattacttttgttccctcaataaaagagggggaaaagcatagctaatttgtttttgagataaaatctgtatatttttaaaccaacatgtattctaaacctttcagaacccatgatgtgtgcgttcagagttaagctgtattctagtatgtgtgggccattacagggccacatgtatttgaagattttctattataggtcacacacatttgaagatgtttcattgcccaacctgttgtagatacaagaaaggcaagtgacaaaattccacactctactatttagtgtagaaattaagcacacttcgaggggcgtggaaggacccatggtagaggatttatcttgatcagagtcatttctgcatctcacatcattcaggaagttacatgagagcctcaacttcatggctgccatagttgtaagacaggaagaaaaaagaacattgctggggaaataattctcttaaaattcagtgcctgtttcaataggactgaataaagccaaggaaattagattttaaggctaattgctataatgagaagagacaagtatagaacgtgaactagaaatgaaattaagtgcaaaggtttctatatacaggtgcacctcaatttccagaaactcagaaggtaaaagtgatggtttaaaaacgaaaaagaatataatttctattcatttttaaaaatctggcaacaccatttcaagagaagatccattttagctaacgttttacaatcagctaaatgtctaaacatttgagatatcatttactattaaaagtgaaccaaaatgtaacataaattaaaaaaaaaaacagacgagaataaatactttgttaaaaataaagggcacttaaaagaatctcggggggaggagccaagatggccgaataggaacagctcaggtctacagctcccagcctgagcgacccagaagacagtgatttctgcatttccatctgaggtatggggttcatctcactagggagtgccgcacagtgggcacaagtcagtgggtgcgtgcactgtgcgcgagcygaagcagggcgaggcattgcctcactcaggaagtgcaaggggtcagggagttccctttccgagtcaaagaaaggggtgacggacggcacctggaaaatggggtcactcccaccccaatactgcacttttccgacaggcttaaaaaacggcgcatcaggagattatatcccgcacctggatcagagggtcctacgcccacggagtctcgctgattgctggcacagcagtctgagatcaaactgcaaggcggcagagaggctgggggaggggcgcccgccattgcccaggcttgcttactgaaacaaagcagcctggaagctcgaactgggtggagcccaccacagctcaaggaggccagcctgcctctgtaggctccacctcagggcacagacaaacaaaaagacagcagtaacctctgcasacttaaatgtccctgtctgacagctttgaagagagcagtggttctcccagcacacagctggagatctgagaacaggcagactgcctcctcaagtgggtccctgacccctgacccccaagcagcctaactgggaggcaccccccagcaggggcacactgacacttcacacggcagggtactccaacagacctgcagctgagtgtcctgtctgttagaaggaaaactgacaaacagaaaggacatccacaccaaaaacccatctgtacatcaccatcatcaaagaccaaaagtagataaaaccacaaagatggggaaaaaacagaacagaaaaactggaaactctaaaaagcagaccgcctctcctcctccaaagaaatgaagttcctcaccagcaacggaacaaagctggatggagaatgactttgacgagctgagagaagaaggcttcagacgatcaaattactctgagctacgggaggacattcaaaccaaaggcaaagaagttgaaaactttgaaaaaaatttagaagaatgtataactagaataaccaatacagagaagtgcttaaaggagctgatggagctgaaaagcaaggctcgagaactacgtgaagaatgcagaagcctcaggagccgatgcgatcaactggaagaaagggtatcagcgatggaagatgaaatgaacgaaatgaagtgagaagggaagtttagagaaaaaagaataaaaagaaatgagcaaagcctctaagaaatatgggactatgtgaaaagaccaaatctacgtctgattggtgtacctgaaagtgatggggagaatggaaccaagttggaaaacactctgcaggatattatccaggagaacttccccaatctagcaaggcaggccaacgttcagattcaggaaatacagagaacgccacaaagatactcctcgagaagagcaactccaagacacataattgtcagattcaccaaagttgaaatgaaggaaaaaatgttaagggcagccagagagaaaggttgggttaccctcaaagggaagcccatcagactaacagcggatctctcggcagaaaccctacaagccagaagagagtgggggccaatattcaacattcttaaagaaaagaattttcaaccccgaatttcatatccagccaaactaagcttcataagtgaaggagaaataaaatackttacagacaagcaaatgctaagagattttgtcaccaccaggcctgccctaaaagagctcctgaaggaagcgctaaacatggaaaggaacaaccrgtaccagccrctgcaaaatcatgccaaaatgtaaagaccatcaagactaggaagaaactccatcaactaaygagcaaaatcaccagctaacatcataatgacaggatcaaattcacacataacaatattaactttgaatgtaaatggactaaatgctccaattaaaagacacagactggcaaattggataaagagtcaagacccatcagtgtgctgtattcaggaaacccatctcacatgcagagacacacataggctcaagataaaaggatggaggaagatctaccaagcaaatggaaaacaaaaaaaagcaggggttgcaatcctagtctctgataaaacagacttcaaaccaacaaagatcaaaagagacaaagaaggccattacataatggtaaagggatcaattcaacaagaagagctaactctcctaaatttatatgcacccaatacaggagcaccaagattcataaagcaagtcctgagtgacctacaaagagacttagactcccacacattaataatgggaggctttaacaccccactgtcaacattagacagatcaacgagacagaaagtcaacaaggatacccaggaattgaactcagctctgcaccaagcggacctaatagacatctacagaactctccaccccaaatcaacagaatatacatttttttcagcaccacaccacacctattccaaaattgaccacatactgggaagtaaagctctcctcagcaaatgtaaaagaacagaaattataacaaactatctctcagaccacagtgcaatcaaactagaactcaggattaagaatctcactcaaaacggctcaactacatggaaactgaacaacttgcccctgaatgactactggatacataatgaaatgaaggcagaaataaagatgttctttgaaaccaacgagaacaaagacacaacacaccagaatctcagggacgcattcaaagcagtgtgtagagggaaatttatagcactaaatgcccacaagagaaagcaggaaagatccaaaattgacaccctaacatcacaattaaaggaactagaaaagcaagagcaaacacattcaaaagctagcagaaggcaagaaataactaaaatcagagcagaactgaaggaaatagagacacaaaaaacccttcaaaaaattaatgaatccaggagctggttttttgaaaggatcaacaaaattgatagaccgctaacaagactaataaagaaaaaaagagagaagaatcaaatagacacaataaaaaatgataaaggggatatcaccaccgatcccacagaaatacaaactaccatcagagaatactacaaacacctctatgcaaataaactagaaaatctagaagaaatggataaatttctggacacatacactctcccaagactaaaccaggaagaagttgaatctctgaatagaccaataacaggatctgaaattgtggcaatgatcaatagcttaccaaccaaaaagagtccaggaccagatggattcacagccaaattctaccagaggtacaaggaggaactggtaccattccttctgaaactattccaatcaatagaaaaagagggaatcctccctaagtcatttcatgaggccagcatcatcctgataccaaagccgggcagagacacaaccaaaaaagagaattttagaccaatatctttgatgaacattgatgcaaaaatcctcagtaaaatactggcaaaccgaatccagcagcacatcaaaaagcttatccaccatgatcaagtgggcttcatccctgggatgcaaggctggttcaatatacgcaaatcaataaatgtaatccagcatataaacagaaccaaagacaaaaaccacatgattatctcaatagatgcagaaaaggcctttgacaaaattcaacaacccttcatgctaaaaactctcaataaattaggtattgatgggatgtatttcaaaataataagagctatctatgacaaacccacagccaatatcatactgaatgggccaaaactggaagcattccctttgaaaactggcacaagacagggatgccctctctcaccactcctattcaacatagtgttggaagttctggccagggcaattaggcaggagaaggaaataaagggtattcaattaggagaagaggaagtcaaattgtccctgtttgcagacgacatgattgtatatctagaaaaccccattgtctcagcccaaaagctccttaagctgataagcaacttcagcaaagtctcaggatacaaaatcaatgtacaaaaatcacaagcattcttatacaccagcaacagacaaacagagagccaaatcatgagtgaattcccattcacaattgcttcaaagagaataaaatacctaggaatccaacttacaagggatgtgaaggacctcttcaaggagaactacaaaccactgctcaaggaaataaaagaggatacaaacaaatggaagaacattccatgctcatgggtaggaagaatcaatatcgtgaaaatggccatactgcccaaggtaatttacagattcaatgccatccccatcaagctaccagtgactttcttcacagaattggaaaaaactactttaaagttcacatggaaccaaaaaagagcccgcattgccaaatcaatcctaagccaaaagaacaaagctggaggcatcacactacctgacttcaaactatactacaaggctacagtaaccaaaacagcatagtactggtaccaaaacagagatatagatcaatggaacagaacagagccctcagaaataatgccacatatctacaactatctgatctttgacaaacctgagaaaaacaagcaatggggaaaggattccctatttaataaatggtgctgggaaaactggctagccatatgtagaaagctgaaattggatcccttccttacagcttatacaaaaatcaattcaagatggattaaagacttaaacgttagacctaaaaccataaaaaccctagaagaaaacctaggcattaccattcaggacataggcatgggcaaggacttcatgtctaaaacaccaaaagcaatggcaacaaaagccaaaattgacaaatgggatctaattaaactcaagagcttctgcacagcaaaagaaactaccatcagagtgaacaggcaacctacagaatgggagaaaatttttgcaacctactcatctgacaaagggctaatatccagaatctacaatgaactcaaacaaatttacaagaaaaaaacaaacaaccccatcaaaaagtgggcgaaggatatgaacagacacttctcaaaagaagacatttatgcagccaaaaaacacatgaaaaaatgctcaccatcactggccatcagagaaatgcaaatcaaaaccacaatgagatgccatctcacaccagttagaatggcaatcattaaaaagtcaggaaacaacaggtgctggagaggatgtggagaaataggaacaattttacactgttggtgggactgtaaactagttcaaccattgtggaagtcagtgtggcaattcctcagagatctagaactagaaataccatttgacccagccatcccattactgggtatatacccaaaggactataaatcatgctgctataaagacacatgcacacgtatgtttattgcggcattattcacaatagcaaagacttggaaccaacccaaatatccaacaatgatagactggattaagaaaatgtggcacatatacaccatggaatactatgcagccataaaaaaggatgagttcatgtcctttgtagggacatggatgaaattggaaatcatcattctcagtaaactatcgcaagaacaaaaaaccaaacaccgcatattctcactcacaggtgggaattgaacaatgagaacacatggacacaggaaggggaacatcacactctggggcctgttgtggggtggggggaggggggagggatagcattgggagatatacctaatgctggatgacgagttagtgggtgcagcgcaccaccatggcacatgtatacacatgtaactaacctgcacattgtgcacatgtaccctaaaacttaaagtattataataataaataaataaatttttaaaaaaagactaaaaaaaaaagaatctctaccagtacatctttaagagtgtttataacaagagacttaccaacaaagattgacttactgtcactcactatattagtcagtgttctcttgagggacagacctaataggatatatatatgtgtgtgtgtgtgtttgtacatatacgtgtgtgtatatatatatatgtgtgtgtgtgtgtgtgagtgttgtgtgtatatacatataaaggggagtttatttaagtattaatttatatggtcacaaggtcccacaataggctgtctgcaagctgaggagcaatgagagccagtccaagtcccaaaactgaagaacttggagtctgatgttcaaaggcaggaagcatccagcatgggagaaagatgtaggctgggaggctaggcccatctctccttttcaagttttkctgcctgctttatattcactggaagctgattagcttgtgcccaccagattaagggtggatctgccttccccagcccactgactcaaatgttaatctcttttggcaacacctaggattaatactttgtatccttccatccaatcaagttgacagtattaaccatcacactcactatatacttaaaaaaactttttttttaggttcgggggtaaatgtgcaggtttgttatataggtaaaaacatagctgtttcataaagcaagctattattatatttaaaatacagaaaaaataactttatacttagttgcttccaatttgcattcagtttttttgttgaggttgctctctcattccctgtgcctgtatagatgagctgagatatgttagtacactggagtttccctatgttgctgttctcagaacctaggtcatgggatttatttatgtgattctgccttctaaccaatttccttctctccctccctccctccctccctccctccctccctccctccctctctctctcactccctccattccttccttcctccctcccttcctcccttcctcccttctttccttcttccttctttctttctaaatatttaaataaatagggctcttggatggtgtgctgggctctgagtagagaaggtgagcaggagagctactgccttacctggccacggcttgatgagctgtgctgcaggggttctttgtgctttgataactgcgttcatgagttgctggcagagcacagctatctctgtgttaggtgggaggtgttaatgaatctgaggaggtgggtgtggctgaaaaatgccctgggagtctgcagggccttctctctctctcacctctgagcctgcagcctcgacaaatcatgaaaggcaaggaggggagtggtaatcacaggttttactaacctgtggctgagrctgtgaaagcttgggagcagcttctggtgttaatttgctgttactttgacatgggcccctgcttttttgatacccagttgagggtgaaatcccaagctgtatttcttaccaggtctccccctcaaaacggcagaggtttcactccctgaggagccctccgaagtgacagtagggtccatgagcaagtttctttctccctggagttcaaccacaggaacctgggggtgtccaggtcagcgctttggagattctcctgacctttccctcaattctatgatggccctcacagattcaagcttcacatttctggttacagcagaaagatgaggagaaggatggcattagcatgccccaccccacttatcaggaaaacaaaagctttcccaggcacttctggcaatcgtttatgtttcatttgctacccttagctgtaaggcaagctgtgaaagtattccctttttccagtctcttcagaggagagggatggggcagagctgaaagtgggtgctggtggacccgcagtcatgtgtgctgggcatcccccctagctgggccatcctgtgagtataaaagtgctgtcctaatgctggcagccttgaggcaggttgttcatcacccgctcaagcatttctaggactgggtcaactgcacatgttctgcatcacaaaccctataaaacatggaaatgtcatcagcaacactttaatatctttctttcacttatttcttgagtagcatttatggaaagccagcggcggtgttggatggtgttttcagggtgggagtgacatggatgattctcatttgagatagcttgctctggcccacttcagggaatcagggtaattcaggataggagaggagatgatcagaagagagaggatgagaaccggggttatggctgcagttgtagacatggacaggagtgacagggtttgagaaatayttaggaggcaaaatctgcaggayttgtgttggggagtctgtgaggggtggaagggaggagggtcaaggtcracttccaggtggctggcttatgtgactatgatgacagatgctagcacttccaaatgagataaagaatgcctggaattccagaggraaaaaatcgagtgtggaaaatgctaatggaggtagtagcttcattgataactcattggcactgktgctgtgcagaggtgctgtatgcctcccatttaattgttcaagcagccctctgggcattggactatggccatctccatttttcccatgagataatggttgaaaggattaagtaatttacccaggtcacacctggaaagtgctgggacctcaatttggacccaagcagcctcttctacttacaatgcttactacctccaccragggagcctccaccaaggagatggtggaggtatgaatatgcttctgtttgaattgatgagtgtgaattasttgagggactttcaggtaaacctgtccaatagayaatatgagtctgaagcttcrggaggaggtttgggttggacaggagataatttggatatcatacacacgtgggcaagctcactcagaaaaaggtaaatcaagtcagcagtggactgaggcttaagccctggggaaaacaacttctaaggcatcagtccagaaactagagcccctggaggagacaaagaccaaatgagcagataaacagaaggaaaataagggggttgcagtgtcactcaatccacgagagttgtgtgtttcaagaggaaagcatgaccaatgttattaaatataactaggagatgcagtgagataggaacttcccactggagtcaacagttgggggacactggttgaactcgggtagattccaaattttaatggtctaaaagtcaaggagatgtgaggaaatgggtgtagtcaatttggatgaatctttaaagaaatttgaaggagaggaaaagaaaatttgggtggtaactagagaggaatgtgggtgagaggaggggtgtttcaatttcagtatttgtttcaggattggagggactggaacatgtagcaggcagagagggaagaatcagtcaaggaagaattctgaagattcaggagggactggaggagaagcatagaggacaggggcacgggtgaggggctgagtaggaaggaaaattcctcatcttccaaggttgtcgagaaagaggtgaaggagggtatgactgccgtaggtggagaagtatgaactaagcctcatgcctgacaatctcaagttatttaaagatgtaggtggtgagcaggtgctatagggtcttagaggggcagatgagtacccttacatctgaaaacatcatccatatcctttaagactatgtcttcctatggattttgtttcagaaagtccaggtaaaatcatcatgctgatgtgtgattttcacatacataacatactttctctattgagaaatgtcttgccccaaactgtgcagcttgtaacgtgtagataactatttcttagcctrtactctttcaactattttgtgctgcattttggtgaaaatagacagcctatttcatcattttgaagcaacatttatatagaatgtcatttcagatttttgctcctatgggtttctgcattgatgatcaacgtgtttatttttaagcatctctgtgaagtgactaataatggcatctaagaaagtaggacagtgtttcccagagtgtrttctctatgaacacctgtcatgtgagattctccttgggggaaaaaagttccatcrtcaaatayagttggatcatgctgtgttttgtgtctcttctcatagaggcccaaggcacattaatatataaaaggctatgagtagacacgtagtcaaaaaatgaatcttgtttagcccaataattcccaaaattgttctactataaacactaccctaccacatttttatttttataataccattgaataaggtgcagaactcattccaggaaatgctgaactatagaggcatattacctctattccatacaacactgaggcaggtggctgacagaacttgaacagatttgtagtctatgtgttgtgataactttatatccattttttctttttgacacttaagattttgtgcaaacattgaaataactattaatttggcattcatatttagtaacttttcaaaaataattgttaagagtatgtttttatatttatttttcagatatttatttggcttctttcaaccataaagcctatttattttctttttgaatgtgcttattgaactcttatttaatactttgtatgtgcaaagcaccatattgggattagagtagtaagatatgttcatcccttgcctccagaggatttgttgtccagaggggacagtctgagtaggaaaggctgtgttcaatgccaaccttttgaacaaaatgcttagaagctactttggagggagtgactgatggcaagaatagttgaaagaatcctccagaaagtgctatttgaggcgggtctcaaaaaacgaatagaaattgacccaggggratggaaattgtatacattctagaaaaaaaaaaatagaaaagttcagtggagcatgacattttggaagcacactgatgtctttgtatgacttgataagaagtttagatgtaattctataaacagccagaagcctctgtagtagcattttaggtagagtattaagatctgatttttttctactttttagattactatagcagaagtgtggaagataaattggaggamcgagattttgttagggacattagtaagagactcaagggggaaaaaaatctcactaataaatgataggataaatggatgctgcatgagtttgtatgatttttcccctcctttttttcccccaaaggaacttatgtttacttctataactagaagtagtaaaatgtgtgtgtgcgtgtgtgtgtgtgtgtgtgtatttgcatagtaaaatgggactcacctgtagtgaagtaacacactgtggtctgaggactaacaatatgccccagtggctggccctctgccatttgtaggccatctcagggatgacagctcacgtgattaaagggctaaatgaagccctttttggtggggaaagaggsggcttggactcaaggcagtgcccagtcagaacccgagctccaccatggatagcagtgacagaatcactttaccccaccccccatcacattactgtttcctcacctgcaaataaggactatactatttattttaaacagccatttatgggttaaaggagataatgtataggaaaccacttttttattctcacaataaactgggaggcagggaaggtagaaataaaacttattaaaaacatggaaaccaatgttcacagggattaagtgatttaccccaggttgtgggcaaaggatctgagcaaacatttctcaaaagaagacaccaaaatggccaactggcttatggaagaatgctcaacacctctaatcatcagggaaacgcaaattaaaaccacaatgaggtgccacctcatacctgttagaatggttactaccaaagagaatgataacaagccttggcaagaatgcagggaatagagaaccctatacactattagtgggaatgtaaattaaggcagctgttttggaaagtcgtgtggcagttcctcacaaaactagcaatagaactaacgtgattcagcaatcccacttctgggtatgtatctaaagaaaattgaaatcaggatgttgaaaagatgtatgtagtctcatgttcatttcagcatcactcacaataaccaagatatgaaagcaacctaaccaatggataaagaaaatgtggtatatagacacaatggagtactatacagcccttagaagaaggaaaattctgccattctcaacaagggtagaactggagagcactatgctaactgaaataagccagrcacagaaagatgaatactgtatgatctcacttatatgtggaatctgaaaaagtcaatctcagaaacacagtagaaagttgtttaccagaggctggggcttgggggcaaggaatgaggaaaaagaagatgttgatcaatgggtacaaagtctcagttagactgaaagaataagttttagtgatctactgcatggcttggtgaccacagtttaaaataatgtattgtatatttcaaaattgctaaaagaatagatttttaatgtcttcaccacagttacctttcttttttccatgtacatagaaaagaaaggtaactatgtaaggtaataaacatgtgaattagctgattgaatctttctacaatgtatacatagatcaaaacttcacattgtatcccaatagattccccataagtgattgtctattttttaaaaaacatctacacacgcacaaagaaaatgcttccaaaagcaaataggagggcattgctctcatgtcttttgtctcctggtggcaaagacaaccatcactgaacctcccaacagaaatacccagtctccttgttacatccattctgacagcttcattagtcacataggggctctgacaatccacaggccaagttctgcctggaattatttgcccatagttctagctgaagtgacagaaacagtttaatctcaaagtaggtgggattgccatccatattttggtgccagagaccttaccatgtgcttcctcagccctgccctgtcacccacatcatgtctgcagagctggagtttcccagtgaagcttatggtccctagggtaatagagtcgctgatgtctttgtcacattaagggtgccacacagagcacttatgaagggccatgggtatcggaatgagaacactcagaacatccacaaacgcttcctccctgactgcctcctgtgctttctcccctctttcctattcccctaatttgccttcacccttgctcctatgtctgtttctctctgtcttcacacttgtatcttatgatgacctctttcacttacaagaattcataaacgtggctcatttgcacccacataattgaaactgtactccaccagaaagcgctggtctgaactcagggaggacggactgtgggcattccctggcttttccacataaattctaagacattcttgcagcatatgaagcaagaggtgaaaaaggtgggggaaaatatttaatgaaaacaaatgtgcccactgcgataacttgctcttgagtctctaatctaaaaagagagcatgcaagtggaattacagcccactaaagaaaggatccaaatggactaaatattcttcatctttgccctccagttactccagaagcatgttgtaaggattaatgagggaataactggaagctctttgaactgcttcgtgatagttccttcctaataagatgacccaattaccagscttattttcaatattgcaactatgtaggaaagctaaattcttatggtattccttaaggaaggataaccttcataaaatgctactataacagcagccagagccagacaggtattacacaaccataagacaggctataaatagctgtacctctctcttgctaccctcttcaccctctttcttctcagtatcttggcctcttttctgatcttttctcttctttcttaagatttctattactttcatcccggcctgtctgtttctgtcttgctcttcctctctgtctgtctctcatgcatacatacacactgtcctgtggatgcacgtctaggtgttagtggcagcaaatgtactggagtcccacrgcaccaaagtatgttagcagcagtgaatccayatggatctacagcagcctcaattcttgcctcctcataaggcaggagagactggggcaagttttagagcaggagtgaaagtttattcaaaagctttagaacaggaatgaaaggaaagaaaatacacttggaaaagggccaagtgggtaacttgaaagacaagtgtacagtttgactttgacttagggtttttgttcgtttttttgagacagactcttgctctgtcacccaggctggagagaagtggcgcgatctcagcttactgcaacctccacttcccaggttcaagtgattctcctgcctcagcctctccagtagctgggattacaggcacttgccacaacacacggctaatttttgtatttttaatggagatgaggtttcaccatgttgaccaggctggtctcaaactccttacctcaaataatccatctgaaagtgctgagatgacaggcatgagccaccgcacctgactgacttcaggttttacctgttggcatacttctggggtcttgcgtccctactyctgtgattcttcccttaagtggtgtgtctgcgtgtgcagtggcctgctagcgcttagaagcggagcatgcacagtgcgtttactastgttgtactcgtgaccacttgatgcattttttccttaccagttgagtgtccctggaggaaggccacatactggttaaattccgccattttggctcttagtgcgcatgcctgagcccactcacccaactgctgaggttttattgggaagctgctgatcaccagtttcaggtatttctgtttattgggagactgcccttccctagcactggctgggaccaattattattttagaaggacagtttaacaatgaccgtcacctgatggtcgcctgccattcctggtgtgtgcgtagtgggggaagccctctcctcccctactcatgcctgactaggtacctactgtagcataggtatttactcatttgttagagaagtaatgggagttacccttgggaggtgggtctgaccgtttttgtgtctgttcatgagcatttctttagccttcaggaagctggggctggatgtgctaaatgtgctgcccatctctggctaaagcctagcttagccattgggatgctccttctctgcactgttggaggttttgctttggcttcttcaacttccttgtctatttcctttccaattctgtttacaaatctctataacatcttgtcccatgtctggttcagtgaatttgtgatgcagaaacctctgctgtgtccagcagtttgtgacaccccagagggggtttaagaggaatgaaagaccccatctctgtcttttttctttttgagttggagtctcgctctggtgcccatgccggagtgcagtggcgtgatctcagctcactgcaacctctgcctcccaggttcawgtgattctcttgcctcagcctcctgagtagctgggattacaggtgcccgccaccaggcctagctaatttattttttgtatttttagtagaaacgggatttcaccatgttggccaggctggtttcaaacttttgaccatctctgtctttaaagagcttactgtagttggagtgagaggaattccacaaacaatgaacacagtcagagagtatataattgagctatactgatacagttgccttccagaaatgtgtgacacgactggccgaagtgactctgggcagtcaagagcaagaggatcagctagagttgaagggtaaaatctcagaaaagggcagggaggtcttgagatgactcttgaggaactgggagcattccaagagggctacgaagtatgtaccctccatgcaaggaggacggcattcttggtagtccaggagcttattgttctgctgatgcaaacaagcttctagtgagaaggaaatatttccctgaatcaagtgtctggctgcatttggagtttggacaccactcagtttcaaggctctggagttgtaagaagcttgcagcggcaggaaaggcccatcaggcaggcccatgaggaatgtgctcccctcatgcaatcagtctgctgttattgcttggttagtgcccagggtggacaggggccttttgtattaaagcaattaattttacaaaaagaggaagaaacccttatgtttctgtgactaaaatgacggaaatgaagtagtggagacagctgcagtggcattttccatcaaacagcttttctatttgtgcaacatatttctaagtgatagaaaatgacacactctctccattacttcacttccatcatttccatcatttcaaccttttctaactttcatatttgtgaaacaaattgctttaaacatgtcaaagacatttgagtggagtgttagccaaattttaaaaataaagatgattcataaagacagtgcttgtgtttatagccatcaagacaaaatttcaggaaaaaaaatcacagtcctaattactgaaggcgcatgcataaggtaatcatatttggaagttagaaacaaatctctttttgctctctgcctcttttcccttagatttatatgggttggtaaacctggccttgtggtactcaatcatccttgcttcagtgattcactaagtaaccccttgcgagttgatttctccagcctctggatttatttgcattgttatgcaatgggtggaacacctcactgctgttctgctcctcagcagttagttctatcttctcttacagctgatgcttcttgaggggaaaggccaccttgtgtcttttgttagagataggatgttgccaagggtagggcaaccaggagggtatcccttagcatgtaactttgaagaatcaagattggtgctccacacaaagttcgttcaaaaatgtttctcttaagaaacttaaaaacctacatcgctgatggaaaaaaaaaaggaaggacatgaatatacaggataattgtacaaaaattgggtacatgtattgttgttgtttaaaagttttttttaaatttcgaaacaaactccactttacagaaaatttacaagacaaaccatacaaagaactgttttttcccagaaccgttattagagttgtcaatctgatgtctcgtcatccctgaatactttagtgtgtactacctatgagcaaagacattcttctgtgcaaccatmaaaataaggaaattaacactgatatttgatggtagtctaatctttagaacacatttgagtttttctacttgttcagtaatgtaccttatagcaacagaagctagtccaggatcacatgttatatttagatgtcatgtctcatgtctttagttttctttaatttggaacagattcataatcttgctttgactttcatgatttgacacttttgaacattacaaggcagtaatttttagaatgcccctccatttgggtttgactgatgtttcctcacttgatgttaaaatcaagtcacrtatctttcacaggaagattgcagaaatgatgctgtgttcttcttggtgcctcctacctggttgcacataacttttacagatcccattactgatgatgttaacttaaccactcgattaaggtggtggcacaggttgagtgcccaggaagtagactgtgaaattagcatgcaagctgttgattagggagtgctgttgggatcaactcctgtggaaggaagcagtattaggtagtgggggagtcaggctgcaatgcactcacaccaaaggcctcagatgaccctctgtgaaactctggagctgagatagctcttcatagtgctcctgagatgaggacaaagggatggggctttgttcctccatagtgatcagtcactggatgtgagccacccctggaatgaggtgtgaccctggatgaggcagttttctyctgctaaggcaactcccaaggaggcctgaaccaccaaggactattttctgtcatcactcccagcagctgaggataagcctgtcggtcatttccgaaggtgtcttgggcagaacatcacagagcccaacacagaggtgactgttggggttacccctgcaaagttattctttgttccttttatagttaataagtactttataggaaattatcttgagactataaaatcccatttattaccaaaattattattgatagaatgattgattaatacctggatgaatcctgattttctcttttaattaaataggttacttaaatcttttattatcattaaataacttaatgttcaaacagcctcgattttgccagttggactgttccaactagtttcagtatccttacttcctcatagtctgttacagtaagatgtttcaggcccgttttgagttttccctgcacctaccctcaaaataaccatttatctaaggagaaacatttctccaaagaactccacttcattttaatagaaagtagtatttagaaaccaaggtctagatcctaggtgtgctcattagtattttacctcctttcagtatttcccaattcaacctaggtatatctcacttaccattcttttcacctctctgtcatacctatggtgacccctgattcatgactcttgtcctccatacatttttttttttttttttttttttgagacggagtctcactctgtcgcccaggctggagtgcagtggcatgatctcggctcactgmaagctctgcctcccgggttcataccattttcctgcctcagcctcctgggtagctggggactacaggcgcccgccaccaggcctggctaatttattgtatttttagtagaggyggggtttcaccaagttcgccaggatggtctcgatctcctgacctcgtgatctgcctgccttggcctcccaaggtgctaggattacaggcgtgagccaccragcccggccgtcctccatacattttttatctttgagcttgtcatttactgagtcttcacaatgtgccaacagtgtgctctgtgtttgcattagttttatgttgctgttgtaacaaaatatcataatcttagtggcttaaaacaacaaacatttattattttgatataaggtataatgatatataaaaggtgtaatgacatcttaactgagctcctcctacctagtgtcgtcccttagggaggaatcagtggaattcagatcctgattattctggctctaaatggtccagaataatcaggatccgatggctggtcctggtatacctggtctgacactgggcctgggatctggaaaggtcttagaagaaattacattgagactgtaaaatcccctgaggaagaagacaaggtcttcagaatgtgaagtaaagagcatgccctctcccaattttatgcaatgagtgaaattctattatggcaatttattcatttaagatatgaaggaattattttctacaaagtgtaaatatggaggtaagaagaagtattagcactcttcttagacattaacattttagcaaaatgaatttattagactcttgccattaactgttagctgagaccagttcccttagaacgagttgccaaatgaccgttttcatggggagccatgcgatgttcaatgactaggtgctgccagggaaggctggcccagctgagtcccaaagtgaggattctccagccactccgcaaacagtatgaaactccagggtacatgcttaaagcactctggaatttaagtagtggcagatgttttagaagaaattccactgtgccactttccaaagcactggaattaggtgttatttacggaaggcaatattgtaccccttcaagcccacaaataaagaggtactcagcagtgacctttattaaaggcaaatcagtggggaacacatgaccagaggaaatgagagaagattggaatatattctaaggccttaaaaagatgtcaagaacaattgtgttcccccacaaggcatcmttaggcaaggatggtccaacctcaatacggtttctttacatccctgtgtttcagctacatccgtggtctcytgtattgtttatctatgtcacttgcaaaaaactaggcttgaatacagttttttaaaagtgatgcttttaaatataagcggtaatcaacttatgaaggaacaatgaacatctatagtaagcaaataaacatccacacataaatatacatatgaataaacaaaatgcaaatgtgtgtcattctttctgccagtcctttgagttccatatttgttgtcatgtagttaataaagtcgttgacttcccccacggtctactactcttgctctgttattctcatgtggcattagtattatgaattaaattacagtctaaacttgcgtatttaattataaacccattgagcacaggaaatgtatcatatctcagcacattcaccaccctgtctcctccagattaagtggtatcactctgctcatcataagcactagtaaacatctgtttaaataaatgtttattgagtatgtattgtaaatatccacttgtaggttaatactagatggactgtaccatactccttagaatgttttctatgttgatttttgtttctccartaattgctttaatctctggcaatgcaaactcatttaacacttgcttttatatattgcattcatatatactccaaagacaaacaaatgctttatcagaattaccagtgatttattctcattattgttgccattcaattattaacaggaattgactgttttagcaaaaatgtcatcagttggcctgttttgtttggaagacattcagctaaactttttcctttgttggctaatgacactttattttttaagtcagttgccatgattttaacgaaatgagcctttcttgtaaaacctagaaggctcattctgctcatataatggatggaacacaagcaaatgagcaaatggtgctttggctccatagacttgccatttgctgggggaaattcagttgctgtaggagattctttacggcatgtgttctgagctgactgagaacatgaaagagatgggtctcgaagatgctaaatgcagtgcatctggtcagtgaccttcatgttcagtgcaaagtgtgcctccccaccaagtccctctccaccccttgggcttccagaccccagcacgaggggtcagaaacccaagaaatatggaaacattctttgtcagttgaaagaattgcataacagttggggtcagatggggcaaaaagctgggtatgcagtttggtttataactgtgaaatctggcaaactacaataaattagacattgtgacaccaacatcctatttctctgtctcacatctctagatcttaaagagtttagccttcatggattgatagaataacacagtcttgtttaaactcatgccaaggaagggctggaaactgccctagaaacaatggtcatgtagatgaactttgtgcttctggtggccacattttttataccatgtcccctgagcaagtttccctatttccaacctccactttcctccctatttccaacacccagttccagcttttaggaaaggtacatagtgcagtaaatttaagcaaacacattgcctttcccagggatataaacatttcagcatcatctctaatttctcttctgttggtaggattttcattaccaacaagcaaagggggaatattgagaggtcaagagatcttcatagcaatcctgattgctctcctgcagtcttcacagaacaaccaaagtgattttttaaaagaacttaaagcagaccatgcctcttttctagtgactgcttttctcaatcagaataagatccaaagtcctacaaagccctgcttgatctggctgtctctgacatcatcttccatggtttcccctgctccaggaactttctcgtctcccacaattcccctgctcaggcactgtcacctcccacaattccctctgctccaggcgtctaatctcccccaattccctctgttcaggcacctcatctcccacaattccctctgtcccaggcatcttatctcccacagttccctctgctcaggcacctaatctcccacaattccctctgccccaggcatcatacctcccccaattcccctgctcagatacctcacctcccacagtttctctgcttcaggcacattggcctcctcaagcatgccaagtaccacctcccacagggtctttgcactgatgacacctgtcccctgatatttgcactgctcattccctcacttttctcaagtctcttctcaaatgtctcctctggccactgtctctaaaatagcacccccagctctgaccctctctgtcctcttaagctgctctagtcattttttcatagcacttgtctccgtttgacgtatcatgtatttatttgtttattgtccgtatactcccactagactatacactccattaatctttatgtgttgacactgctgtattctcagtacctagaacagtgcctggcacttaaatggtgcttaataaataacctgttgacgaaaaagatcctgaatcgtgccacagcaacaattacttgttaattgaaaaatcacaaatctatacatttggaaaggagtctttatttcttataaaaggttacagcctgcagagtgactatccggacaggctgagaagcacagcctctggcagaggctgaaaggtgggcacttcaagggaaaggaagatggaacaggaatttatgctgagctggttggccaaatatacatattccacaggttacaggaggagctatgaacatttatgaagagggtcttaatgtatgcatactgaataaacatgcatgttatgtgtgacccatgttcgctttggggtgagacttaacatttatatgtgcttcagttaggccctatacatcaaaaggtgaagcagggacaggaatgcattgtagtgtgcagcttcggtaaatcgtccagaaccagtccatggttgatagtctcttaccaggagaaagatgctgaaatcagtctcttacgcaatcaaaactgtagttgtggctggtggaatgtgagttagttagtcagcatctggtgatggatgaactgtagttgttccaacattgctcatcttgagaccagggcttgtttagctgctagacaaaaagaaaaactttgtggcagttagaacatagtttattctttaaatgcaggggttcatgacttaatccttgcctggtgtggccttgggtcttgtttataattatatattttattgccacagtgtcagtcttatgatctctattttaacattgattctgttcaattttgtctaaacagcaaaaggaaagggaatatagtgaggtgtgtaccacctcccatcccatcatggctgcggctcagtttttaaggtttctctggggtccccttagccaagaaagagtctgtacagttggttgggagtggggtggggataagattttacttttagttctcacaccttattcactacctgtgtggttatgctcagaaataaaaataaaataagtttagtaagatttctttgctattatagccatcagacaccatataatacggagaataataatttgttcagtttatgaaatgcccttcacacacactattgtttaatcctcatcttctggaatgccaattttacagatggaaaatgcactgagagggttcattagcctccccagtcacagctctggaccaagccgacctgggttcaaatgattgttctgcatcctgatagctatgtagcctagagctagttacttaagttacctgagcctcagttttcccatatataaaatggacataacccttaaaggtgatagagcaaatagaaactgctctagatttgtaagcagtgggagcttactggaggcaattgggtacacaagcgagtgaatgactaagaagccaaacaaacgacatggtgaggcaacccaggaattaggaacagtagaaaactgccaccacaccaggagctggaggcacayggaggaggaggtcccatcagaacccagaaggcatcagcaggtgctggagccatggaggagactcagactctcacctcaagacagagagagcacaggagacacaccctgacatctcccctcctcctgcttccaatcctctctttggccgaacctacctcgaagtcagagagcagaggagcrtgggaacatggcttcctgtggaacctgacagaagattctaggggtgcaggcaataggtctgagaacagccagtctgtcaataggtggagttgctgagacaaactataagtggttgttattcccgaatggacaacaggaaacacaagtccagattctttgactcctgttcctcctggtccttcggaattgaatgggcaacgtgaacaaatctgcagtgtaatgttatgctctgtaaccaactttgtctacattgtagaacattttctgctggttattttttcttaaagactaaaaatatcctgtcttctcttaaatgaggcaacacacatgtgggttagggaatttctagaaaactagcttcctggagtaaatttgtatcgcagttaacaacaccaggtcctaacttttggagcaaactcctcataaagcagcatgttctcccatgcttgaagcttagtctggaatctttgggttagagggaatgactgtttggttcrtggctgtatctcacttaaaacagtgcctagggccaggcacagtggctcacgcctgtaatcccagcacattgggaggccaaggcgggtggatctcttgaggtcaggagttcaagaccagcctggctaacatggcaaaattccctatctactaaaagtacaaaaattagtgggtgtggtggcccacaccagtagtcccagctacttgggaggctgaggcaggagaatcgcttgaacctggaaggtggaggttacaatgagctgagatggcacccctgcactccagcctgggcaacagagcaagactccgtctccaaacaaaacaaaacaaacaaaaaaaataaaaaaaatggtgcctggcaccttgtaggcactgaaaaactctttcaagaatgaacaaaacctggggtcgcctatggctctgcccccctacttaatgccaacatcaaatacctgttgcgtctacttcctgcttccrctggcacccctccacttaccttcccccgagagtcagtcaaagacaccatcatgcctcccttgagcacttcagcaccctctgactggtttccttgctccactcttgtccctctcaaaccattttccatcttgcagacagactgatctttctaaaatgtaatctcaccagatcacttaagcttttcaatggctcctgccccatctccatcccctccctaggacacactctacatacctttgcacagcgttggaggtccctttgctttttaccctccctgggtcaaatgcttcttctgccacaggtatcctgagtttcctgccattccctttatgcaccatcctttccttattccctcagttggttactcccccagctgggaagacttttctctaccttttccacctttaagattgtatcccaaaaccacattctctgaggaatcttcttcaacttccacagacactgttagccacttcctcctctgggtttccacactgtgttcctcgtgaccagtagtcccaggaagaggctggcatgctgtaggaatgtttaaaatgcatgcacatttcactgaaggggcttcacagtcctctttctcagaaataagccattcttagggagaaattctcctatctcaatgctgttcgtattttctctgaagttcatgttatgttcttacttcctgtgaatgccactggcatcatcctgagacagggtgtcctcatgttcacattcctgccttggttagccatctaagtggtgcacttcttaaagccagggaccaggtagtcagcatcaggtgacagccttatgatttmtttctgattcactcaaaaaacctagcacgatgctggtttcatgtatatcccacaaaattacgccttacrtttactccaaaagaggctttaagtgatgtaggaagcactgaaagaaaagtaaaataaaatcaaggtagaaaagacaccttaacaagtacctagcttccatttgccaaatatttattgagcacctactacgttccaaacatcatgcaagctgctgggtatacaaagttaaacaaaactccatctctgtcttcacaaagtttccccccaaccctwcctaagtttgcctgagctagaataaacatggccaggaaggtctcttttctttaggaaacatctggaaatatgtatgtaatctgccaatggcaacttagcaatggaaagggcggatttctacagtcctcaaagagatgatttgcttttgaatacttgtgtttctctcctcttagttgctatcatccatgatttctgygcctttttgattgtttcttttttggtggtggcattttgtttttgtagctggtaacctggtatttctaagagttattyggtgacttattcccacttggtctcagcacactccctttccatcctaagactgttagcacaagttttgcttccttttccaaagcaactgtattcacacttccagcgctgccacatacatcatgctgttaccttcatacttcaagggcccatttggaaatagattgattattttgaacatgaaaggtgcgccttgggaaaaacaaatgaatcaaatggaaaaatgaattaacatcatgaaatttaccttctcagctgaagacatgatagattcctgtgttccttagagacagtcctcttataagaatgaactcttaagggaagtctgcaggtagatggagtcagggctcagcttaaaatgtgtttatataagaatggaaaacaccctctgaggaagaagcttagaaataaaaaagtttctttcttgtgaggggtgcttggattgaacacccagattgctgtgggcatctcattccagagcttctaacatctctatgatgatcttagtggggcttgccatttgcagagagctcagttcagcctcactgacatttattaggtaccgactgggtacaaaacactgtgacattctatgggagctatacagacatattagacaatgtcttcagttcagtttaacaagcggaatagatatctaagtgaataaggagaaaaatgtttgtttgggcttttctggcaaataattgttataggaaaaggggtctcgatgcagaccccaagagagtgttcttggatctcatgcaggaaggaattcagggtgagtcacagagagcagtgagaagagatagtttattaaaagctgctccattacaaagtagggtatcctcagaaagcaagtggaggaatgcgctgtcattgttttaagcttttcttacataggagtcttgtctatgtaaagactaaacaaagctgtgcttttgtgtgggtaggatgacagcatgacaaaatttattattctattgatttaaagaaaactatccttgacattttagtgtgtgagtatatcaaagcataactgtaattctcttgaaagtatatatcattatgggtattgggacatctggactttctgttgttgtaggagtttgtccttgcaggcattactaagttgtttccttagctgtcaacatcttaggaccatgggttttgactggcaaggaaagtgccttgctagttttcagatgcagttgatttaaaaaggttgtgaccctggctctcctacgttcgtttccctaacgatatggccagaagtcttcttattactaagtatagcatatgaggggcacagactgcagccactggacttacagatgacatgcccaaaagaggagagaagtgggagtgtcctgagttatcagcttctttattttggagcacgagagggagcagtgattgatagatgtgtctactcagtcactgataccaaccctccttgatggcaagtatgttcttccaggtcctaggcatgagagaggtggagtcagaacagttctattaggaacaatattcaaccatactgaccataccatgtgctatttgatgtcctttctagactacctgggaacctaatcaccacctaggacattgtatttttaatgtaaaaatatttcaaagccatcaactaacccaaaagattaattttttaaaaggcaatgaattcttctagtgggcactaccaatgcagggctttgcgtgcagtgggctctctggtctgtggaatgcattgaaaggttgagaggacattttccccagggtcacatagcactgaatttgagctgtggctagatttctctttcctatcttgtgaagaatactaatatcaagaaactgtgcacaaagctcaatcaagcctaggtagctaaggttggaaaagagtaacrtcacaaatggaattaaagattttcatcttcttcctcctacatcccagctggggggattaaggtaggtctgtgtaaggagagtgaggccctcagtaaagggacaatgagacattcgaatataggcatatggtccaagcggcttttgccttaaaaacattagttttgtggcctcaataataattcacaaatggaagcaagcactgaaactaagagcatatgttaatttctagatcacttgggaagatggcactagtttttgataagtgtgaaaaaatgcaattggtaattataatatttcctcatgtttagtagtccaatttcaaaggctgcaattattaaaaacaaaacgggattcctttcttggatgctgtctttcccgatgtctttttcttgccctgatgtttttaacgcaaagttgcatgatttgggggagaaaaacacatctatccaggcattatatactctaggcaaacacgtgcatggaggttccctgtatggagccatgttttccatccagattgggccaaggatagctgatgggcagtcatggatgttgatggatgggttttccmagggtagctggattgtggtctcgtaaccatgccgactcctggggctgagaagggctatttagtgaaatgaaatactactctgtcacaacttcctcactcacaattcaatcatggagagtacttccccagtgctgtcactgaaatcattacattcagaattaaacatgggtgtaatagagcagtccctgaggttctattggcacatcaggttccacattcctaaccagctttcccatacaggaatatgaaaagcctgccaatcaggattctttttccttcctttggaattaatctcaccactccctgtccctgataacgcttccataacctgttcccgggccacgtggcatcagcgtatcagcaggattgctcagccttcaccctttggtgtctgacattactttggaagtcttcccaatgcaaatcacaaaaaaatgagttggcccagagagaccctcatgcaggttctctccacctggtcttccttctcttcactcactcagttgttacctcctttgatccacatttctggctcacacaactcttatccayggcagcatattttctcaatgtcccttttcctcatattcctttggactttccagttttattcttctcttgtctcctttcatctccctagatcccttttgccattctccaccttcctccacagaggaagcatgacatggagcaaagagaacaggcttccctgtccccagttctgtctccacttctgcctagctatgtgatgtgcacacatgacgccctcaccaagcctcagtttcccrtctgtaaaaatttcctcacagaggttttgtaaggaccccaagaaataaaacttatttcctgtcactttatttgcatcactatgtgaactgccttggcaactctaaacaacttttgcaatcttaaaattgaatattttagccatgaatcataaaatcaataaaaagctacaaacttcctatgttttcaacaccccctgagactgtggggaatttaggcgactttaaggaaactaaaggttgacctactagtagtacagatgtttgcgaatagtttagaaacatatttctccttggaaggagaagctaggtgatggtattttcttcttaggctcaagtgttagacttcaagagtctgtaataaatcgctccttaaataaataaaatgtgaaatcctctaaggcagatgttggcaattgtttactgtaagggccagctactgtgttaggcgttgcagaccatagggactctgtcacaactactcaactctgctcttacaagagtagggttgtattgtagcacaataatacacaagcaaatcaacataactgtgttccaattaaactttatataaacagtaggtaggctgggcgcagtggctcatgcctgtaatcccagcactttgggaggcctaggcgggcagatcatgaggtcaggagatcaagaccatcctggctaacaaggtgaaaccccgtctctactaaaaatacaaaaattagccgggcgtgatggtgggcgcctgtaatcccagctactagggaggctgaggcaggagaatggcatgaacccaggaggcagagcttgcagtgagccaagattgcaccactgcactccagcctgggcaacagtgcaagactccatctcaaaacaaaacaaaataaaacaaacaaamaaaaaaacagtaggtaagctacatttggcccgcagactatagttttctaaccattgctctaaaggatgaatggagattacattgatcattaacaactcagaaaatcagaaattatgattgaatgggaggtttcaggtgactccatgatgattctggaattattaaggcttttggttactaataaatggcaacccttttttttttctttttttacttctacaagttctcctgatggaaaaatcagtcagctcaaggttttttagtttgggatgaattggcctttgaaatagatttgggctttgataggtttgttggcaattggtaaacccatcctaatttcccacagatggagcagagaaggatcacttagaggaatcagaaagcccaggacaacagggaagtaatgataactaccaattattaagctgccctccccatcacaaactatgaccaccatgatctccattttgtagaagaagcaaagttttagttgacaggggatgagtgctttgcccgagatcacacagaagtgttagagccagctgaattgctttccccttagccacaatatctcaatcaacacaagtaacgtactttccttgggacattcacctttcttcagattcagaaccagagagsaaaaaagaaatcaccccttcttccttctgcctttactttctagtagaagttatacttaaaaaaaaaaaacaatttgccaggcatggtggctcacacctgtaatcccagtactttgggaggctgaggcgggggggaacacctgaggtcaggagtttgagaccagcctgccctacatggcaaaaacttgtctctactaaaaatacaaaaagttagccaggcatggtggtgggtgcctgtaatcccagctacytgggaggctgaggcaggaaaattgcttgaacccaggaggcagaggttgcagtgagctgagactatgccactgcactccagcctgggtggcaagagtgaaagtccttctcaaaaaaaaaaaaaaaaaatgagtgccccctcagccagcccctactgtgtgctaagcataaagctttcattatattataaaatctattgtctttttatttcccaaactaaactgcaaagaatcaagaaaatggaagctaagacaagtaagtgatttgcctgaagttgcaccagtagttaatagtggagtcagaatttgacatggttctcatcaactccaaaacattttcaactcacacagctgccatagagcttagaacaggccgactctcaaaccagatggtctgggttcaaatctgaactccactatttgctagttgtatcaccctaggtaagttgcttaatgactcttagtttcctgatttgtcaaattaggatgatgataatggtttccttctcatcttttgttatagggaataaaggggtaataagaacatggtaagccacatgctttggctttttctgtggaatatcagctctatgagcacagaagttattgtctgttttcttcactgttgtatccttagcacttaggataatgtctagcacatagtaggcaatatcaatatatgaatgaaaaatgtcagaagtagtctttaaattaggttatgactggattcaaagtcagcatgaaaaagcatagctttccttttgctttactatttttgtataacttggatttgataggtgaaattcaatatgagtctttgaagtcttaatttaaagtgtaacagtggaaactagtgattgtcttcattctttccatgttcccaacaaaagtagaagttagtacaaaggtgaagcttttaaaacaaaagtggaagttagcacaaaggtgaagctgaggttgagcacataacaggtacaaagagtgctttcagatgtacttctctagttttttgctattccccaaagtgcatccttacataattagctttaaaattcctttcatcccttatttttttttaaatctatcattaacacgtagatttttatctctaagtttatttttactaaacttgcatctttttaaatacgacgtattctgaatctaaatcagtatttagtgacaacagctgctgggaaccactgtaataaatgaattatgggtcccatttacctggcaagattgcctttgatgtctacacgtcaacagtgaaaggggttccagagaaaaacaaagcctctggtaaaaagggcaagctcatcccaagattgagtatgcacgaagagggagcagaaacaggagatgggtgcctctggaacaaacatgcttatgcaggtgggtttatggaggggctcctgagagggtgagtcccatgagtcttcaagagcattacttagatgccatggcacctaggcagaaaacaatgtttaaatttgtgctggatttacaagtatatgtgatattcattctgagtggtataacctatatccctaatagcaaagtgttgaagttctaatctttctcagtggtttgcactgtgtaaattattattttcattaagattaagcatcctcacagaattgcacagcagtaacttatgtaaccacctccttagaatgttctctctctgacaatatgcctaccaaagactcttttaaagatctttgaaattagtaattagggaggttamaatggagcactgtttgcttgtcttaatgtggaatcctctacatgctttatagaaaacaaatgaagtgaataagttttgctcttgaaggttctcctgcttacaatcaaagtaatttgcagacttgcctgatttgtatgtttcttcaagtcaagaataattctaakggattactcctgtcccttcagctataagataacagagtgagaacaaaaatggcttgtgaaatcaacctaacagagtatttcttctctcttctcataggtcgctacccacaggagaacaagggaacctacatcccagtgcctatagtctcagagttacaaagtggaaagtggggggccaagattgtcatgagagaggacaggtctgtgcggctgtccatccagtcttcccccaaatgtattgtggggaaattccgcatgtatgttgctgtctggactccctatggcgtacttygaaccagtcgaaacccagaaacagacacgtacattctcttcaatccttggtgtgaaggtaagaggcagacatttagttttctcatttaaaaattcacctatttggcggggtgccatggcacatgcctatactcccagctctttgggaggccaagatgggaggatcgcttgaggccaggagtttgagacctagtctctaaaaaataaaaattaaaaattagatgggtgtggtggtgcacacctrtactcccagctacttgggaggctgaagtgggagaattgcttgagttcgggarttggaggttacagtgagcaatgattgtgccactgtactccagcctgggcaacagagcaagactccgtctttgaaaaaagaaaaaaaacaagctcatgtatttccaatacatctctttttgaaggggtagtaagattattctaaatacatatgcctctcctacatataccatctttaatgattgaaagagaaagatagaaaaytcatcctccatgtgtatgargataaaacctctatatgtgaagtcaatgctgctatacatttatttcgggattaattggagattgtctaaagttgcagttagttatttgtggagctattaattgcagttttgtaattaaaagtaattgcaaaaatcacaattacttttgcaccaacctcaccaacctaatatatgttgacagtataacctctgtacactattactctgtaaacaaattgggcttattaagcttgattatcaaaactattagagtctataactctgacttcagaaaaataaaataaagtcgacgctgttcatagtagaactaacctctctatccccctactttaagaacagaaagtctgtatatctaaaggattccacaaagttgtttatgtgcatagtgggtgcaaattttgcaaaccataactctggatgtgcaaagatgtagctgtactttaatataatataacttgatctctagtgctattttcagtcttcctttctgtctgcggcagaagcttaatctagttatattcaaataaaactcagtcaagttcaatgatttctctatcaattctgttttgtgcctcagtcacacatagcattttctcctcatcttcatctctgccctttcatacctctcccctgctcccacactttgtacgaagctgttttaagttccagaggcagatgcagatgttgcagcagcatcaatgtgggagagaccacttctaggtcctaggaaataaggcagtgaaagatatgaaagctcacatggggcaggagacttcccatggcaccctaccccatatgcactgctctctaacatcatccaaaatgagcccatattattgctgattttgaatgatccttgtatgtgaaagtcacatttgaatcagggttaatctgtcctagatatagataagtgcacaacaatatttgctactcatctagaacatacaccttggtcctactgatcttttctttgttttatatttatatttatttactttttgtagagacgtggtgtcactatgttgtccaggctggtctcgaactcttgggctcaagcagtgctcctgcctgagcctcccaaagtgttgggattacagtcatgaaccaccatgcccagcatggcttgggaattacctgttccactagtgttggcaaaaggcgccaagctattcctacactccctatacatccatcctcatcatattgtacccaacactcctatctatgagacagatattcaaggtaaatggtaacaggaaatgttaactgggccatgtgcagttcaaaaaatgaactcttgatagtaatcttaaaaccagatgtgaggcatttgcaactggttgatggggtgatatttacagagatgaaaaatactgagaggatcagagttacagatatataaattaagattttgaatatgttaagttggagataaccatagatagacagcagaaatgacaaataggtatgtgaatctggagaagaaaatcagagatatatatttgggagttatctgtacctagggagaaaatatagataaagaaggaaataggatatagtatctagccttcaggaacaccatcatttaggagtccagtagagaaggagtcagcaaaagagaatgagatggaagagtatgtaggaagcaacctattctaagaaaattgtatttaaaaattcatacttatcaatcaagagtttgttattgactttctttttattacaaaaagaaaatcctaggctacatataactgttcagaactctaggaaatttcaggaatgctataatttacccagactttggtttgtttgcaacttttctggattatatcatgtgtgtaaatgggatatgtgtctgcattcatttcaacttatgtgaccactcttcttgacgggaaaagggttagttaagttgcttgacatattaactttcaggataactactcaggaggtggacaatctaataaccttctaattgctgccttgatcttcagttgtatccatgatgagcagcttccagatacctctgttctgaaaaagtcacttaggtctggaggcgttcttgttctagaggctgtacagggacctcccctaggttttcagttcatggaaaggattggaggaaggtgggacaaaaaccagagaccaatttggaagctgtggtctaggacaaagatgatgataaactaaacatgstggtaccagtggagatgagaaggggttagattggagatctattttgtatttagaacaaaaattgcacagggattcaagatgagaagtaaagaaatgggaggactcaagaataactctagatttcttgttagaccaattgggttgatggcggtgccattttcagagctgggaaaactgtgggaagtggaggggaagcactgggggtgaagctaagagttacattcagaaatgttaatttggtgatgtctatgagacatgcaaatgaaaacgtcaagtaagcacttgaataaagtgaatctagaactcaaaggagatggctgagctagacatgtaaacatgggcacggttaggagcaataacggacacaaatgattcagggtcattaacaattaagagttgagacaaaggagaagtcaacaaaggaggctgagcaggagcagtcagtggagcgcaaggagatcaaaagagcccagagccagacacattgatagattcaagacagcagtcaactctgtttaatgctatgattagttgaataggataggggaggaaagtggccatatagtgtggaaatatggatgtcttcgatgatcttgaaaaggacggtttcactaaagtgatagagacagaagccagggagatggtcatgggctgtgttgtaaacaggaggcgagaaagtagagacggcrggagatggcacctttctcaagactttctgtagcacctagatgttgaagcgaaggtcaaaggagaattttttaaagacaagagagagtgggtgttattttatggtgayggagaggaaccaggaaagagagtttgcagtccagagagaggacggtggttcacagccttggctgcacgttgcaatcatctgggaagctttgaaactatggatgcttcagtcccccatgcaggcattctgatgtaattgctctggactgcagcctgggctttggggttttttaaagttctgcaggtgattcttggagctaaggttgagaagtttcaggagtgaaatccttgagtggttggaatccagggaacaggtgaagaagggcctgtgatgggtggggctatctactctctccagagacaggagtagagtagaagaagaggggtgcagattttccagtttaatggaagaagaatgaggtgattgccattttgtgactcctttttttttttttttgtcagtgaagtgtaaagcaaagtcatgtgttgagaagcagcagcaaggaagggcatgaaacgcttgatagggaagatgtgagctagtcatctggagggtagaaggtgaacttattacagggacatgccgggagggtgctccctgcttccagaacacagggcaaactagcacaatcttcttcattacttggcctgtggaggcccaaacatctctgcaaattctttagggatttctgacttcatggctgcctctgcctctaggagtcctactcacacttgtgctgctgcaagtgagaaacttgaccgtcaccttcaatttcaatgttggcaacaacaacaaaagcagccacacacaacayctgtgaatgcccagaccttaactgcagtttgggatggagggtgagagcaggaaggatgcactctgtggtcaccacgcttggagcacatcagaatcacctggagggtcaccacgcttggagcacatcagaatcacctggagggtcaccacgcttggagcacatcagaatcacctggagggtcaccacgcttggagcacatcagaatcacctggagggtcaccacgcttggagcacatcagaatcacctggagggtcascacgcttggagcacatcagaatcacctggagggtcascacgcttggagcacatcagaatcacctggagggtcaccacgcttggagcacatcagaatcacctggagggtcaccacgcttggagcacatcagaatcacctggagggtcaccacgcttggagcacatcagaatcacctggagggtcaccacgcttggagcacatcagaatcacctggagggtcaccacgcttggagcacatcagaatcacctggagggtcaccacgcttggagcacatcagaatcacctggagggtcaccacgcttggagcacatcagaatcacctggagggcttgttcagccacttctgtgcagcaccctcaggttgagtaggtctgaggcctggcctgagaatttgcatttctaaccagttcctgggagatgctgttgctgctggtcggggtcaacacttagcggaccactgnnnnnnnnnnnnnnnnnnnnaaaagcagccacacacaacatctgtgaatgcccagaccttaactgcagtttgggatggagggtgagagcaggaaggatgcactctgtggtcaccacgcttggagcacatcagaatcacctggagggtcaccacgcttggagcacatcagaatcacctggagggtcaccacgcttggagcacatcagaatcacctggagggtcaccacgcttggagcacatcagaatcacctggagggtcaccacgcttggagcacatcagaatcacctggagggtcaccacgcttggagcacatcagaatcacctggagggtcaccacgcttggagcacatcagaatcacctggagggtcaccacgcttggagcacatcagaatcacctggagggtcaccacgcttggagcacatcagaatcacctggagggtcaccacgcttggagcacatcagaatcacctggagggtcaccacgcttggagcacatcagaatcacctggagggtcaccacgcttggagcacatcagaatcacctggagggtcaccacgcttggagcacatcagaatcacctggagggtcaccacgcttggagcacatcagaatcacctggagggtcaccacgcttggagcacatcagaatcacctggagggtcaccacgcttggagcacatcagaatcacctggagggtcagcacgcttggagcacatcagaatcacctggagggtcaccacgcttggagcacatcagaatcacctggagggtcaccacgcttggagcacatcagaatcacctggagggtcaccacgcttggagcacatcagaatcacctggagggtcaccacgcttggagcacatcagaatcacctggagggtcaccacgcttggagcacatcagaatcacctggagggtcaccacgcttggagcacatcagaatcacctggagggtcaccacgcttggagcacatcagaatcacctggagggtcaccacgcttggagcacatcagaatcacctggagggtcaccacgcttggagcacatcagaatcacctggagggtcacccacgcttggagcacatcagaatcacctggagggtcaccacgcttggagcacatcagaatcacctggagggtcaccacgcttggagcacatcagaatcacctggagggtcaccacgcttggagcacatcagaatcacctggagggtcaccacgcttggagcacatcagaatcacctggagggtcaccacgcttggagcacatcagaatcacctggagggtcaccacgcttggagcacatcagaatcacctggagggtcsccacgcttggagcacatcagaatcacctggagggtcaccacgcttggagcacatcagaatcacctggagggtcaccacgcttggagcacatcagaatcacctggagggtcascacgcttggagcacatcagaatcacctggagggtcaccacgcttggagcacatcagaatcacctggagggtcaccacgcttggarcacatcagaatcacctggagggcttgttcagccacttctgtgcagcaccctcaggttgagtaggtctgaggcctggcctgagaatttgcatttctaaccagttcctgggagatgctgttgctgctggtcggggtcaacacttagcggaccactggtttcataataatcacgaaacaataaagctgggcatggcccccagagcagcctgcggtcccagctacttgggaagctgaggcaggaggattgcttgggcccaggagttcgaggcagccccgccagcctgtctctaagaagaaagaragacaataagcaataactttaaaactcaagaggcagggccgggcccagtggctcacgcctgtaatcccagcacttcgggagaccaaggcaggcagatcatgaggtcaggagttcaagatcagcctgatcaacatggtgaaaccccatctctactaaacatacaaaaattagctgggcatggtggtgtgtgcctgtaatctcagctactcaggaggctgaggcaggagaactgcttgaacctgggaggcggaggttgcagtgagccgagatcgtaccactgcactccagcctgggccacagagtgagactccatctcaaaaaacaaaaacaaaacaaacaaacaaaaaacctcaggagattataatttactcttcttaaaatttcactggctctaccctgaacctaattccagtctctctcccttaccaccccttctctctctcctactgttctcctttattctctgaacttttctctcccattctgtcccaggagcaaattctccttccttaatgcagagggatccagtgagctttattatttttgttgcttgatctcttccaacaaccatgcttttgggccctgaacaccatttttttaaatgaagtgagagaaagagttcatctccccacttattgtgtggtttcccggcctagcacgcaaagcataacccaaaaaggggatgatatgatgaaccgctccccccaacacacacacaagcacatacactgtagcccagcagtcccctgcagttttatgcttgtgtgtgtgttaatgcataacaaargattcagcgctatggcctggtaactggaaagtaggtcaaaagagaggggtgagactgtcrcccaagtgaaaaagatagcagaagataagaaggaaaactgtttccagaaattgtcaaaagacagccaggtgaacaagattgtggyccgakgtggcacaggatgctgggctgaaaattacagcagcatgcacagcacttattgataggagaatgctcagctgtgctcctgagggcccttcagcctgctttgcattcataggcaatttatcctccttaatcactaaatcattaatggggatcaatagcaatgccacatcagwgaaggcaggggtgcatgcggggagaataattgcttgcttagtttttagtttagtggtgctaaccgggcttcgggtccattctgggaggaaacccttctcctgggtgttagagagaactgtacccacaaaggcagcaggagtgagacgggcagttattatgaattcatcatgtttttctaactactcaggaactctgaactattgaatgtatttcactatttaaatatagaatgttccagtttggtagtctagcactagtgccagatagtgggtcctgaaagatttagatttctgatatctgtgcctagtactctggagaagcagtgagcagtatttttgattgggcatcagttacctttaagggatctttctcctcttgataagttgttcccccattccattctccatcactgcttttccctcacctcattcgacctcatatccttagcctctggcacacttgaggtttaataaatgtttgctgtgttgatttaataatcccaagtaaatactctaggttcgccgcaccctgtcattacagataacttgtaaatgtaatctcagaccttaccatcttgagaaaagtcaaaaacatatctggtgtgctgggaggagtgtgtctgtgggtgatgtgtgtgtggatttctctatctcttagcatctgacaccaaattagcatctaatatttcctttttattcaatgtgttttttcacttttctttaaacaaataaatcaatttaatttaatatgaagaaatcaatatgttcccaatatcttggatgcttttaacagcaaataaataaatatgacctgcttgtattttatyattaaattcatccttagccwatttgctttgtatttatataaggtctttttagcccctttcatacagaatggagtaagtaaccaagactggtgtcctcagagtaacaatgacccacattccttctcttggagactcttgagcccagaccagcatttacgccctcaggctagagccattcatccatcaatccacaaatattgatagtatgtcgcatcccatgcccatgacaacacaatgacctgtgcacagtacgacagtattatgtattcattcagaaaaattcaaagtcaatactgaattaggtactgggactatggcagtgaaaaaggcagacacaatcttcgtatagcttctagcaaggattttacaaatgagctcctaataaaaaactgattacaattgtaaaaagtactaaaataagtcagtgcacaagaagaacacaaaactggggactccgacctatttggggaacgaggagagactggccagtggcttagctttgcaccttggctagcacccagaacagtatttgcataggatagtaatcaaatagttggttaattgaatttttatgaagttttaataaagcttatggaaaaattttaacctttatttactcaatattcctcttaaataaaatagtatgcatcattcttcctagtatctgagtcattagagacttattatgctttttatgccaagcgaggatcatttagtgtggccctgtaatcagaaaggatcccagagagctcacagtaaaccttcttttcaatggcatgtaggtgaccccaggattgaggtgcaaaggtctttacaaggtgtttctagaaagagcatggttggaagtgtctaatgcagagacacattcacccaccaattcatgtggtttacaattccttccttgtagagtctcttatatgcttcaaagtgtgctcatagtcagtatctccctagattgtgtgtttggaaggtgtaatccttatctcattcagcctttygtggtgcctggaattgagtcaatgttcagtaaatgtttgctgaactgaactgataatcaccattctgagaggcaaggagacgattattagactcagatttcaagagagaaagcaggttctgtgatgttacgtgcatttctcaaagtcctatagaaaattaagaaacaaactgaggctaaccctggagcatcctgactctgtcaaggtaagcacttatatttttaaaacaaaagccatcagtatctggcattgtgtaacaaaagaaaaaaaaccaatagatggccagccgagaagattctgtaatgacctaatcaacgtggaaatttctgccataataaataaatacataaataaataaataaattcaggttgatatttacaagatcaaatgaaagctttctctgggaaaaaaaattaaarcataccaacaagggcacaggctcccttagaggatatgtgctaagtaaagaagctctgacattttctttgtagaattgcttcatgaataatagtctatcttctgaagatatctcagtacactaaaaagcccttaaccagcaaaacaggcaaattagcacaaatccagtaaccttctcaagctggtgtgagctgtaatgcagcatgtttgtaaggaatgtaaactatgttgtactatgcacgcacggatgattgtgctgtcgtgagcactgtgggagatatactatcaatatctgtgaattgatggatgaatggcagtagcctgagggtgcaaattctggtctaggctcaagggtctccaagagaagcggtgttagtcattgttatttcgaggataccagtcctggcgaactactctactttatactgaaggggctaaaaggaaagaagcaaactcaactgactattgaggaamcatttgcttgtgcttcatagattgattccattccagtgttactagataggmaagcaacgtctctggagtggctatatgaaaccattttaggaaggcagtgcgtttggatccttccagaataaaaagctcagactctaaaaatgccattccttaatatgctcacaattgccaccgacaggaagttactcctggtatgccacagcacacacagcctgttagaatctgccaccccttttgatgtactttgtgatggaaaaacatatcatggtgacaccagtccggagtcacatttgctctgcagatcaagccactccctctaagagtgattacacactcccagcatgaatctttcctctttttagtggtgctcagcttttatataaagggggaagcaagtgtaagtgattcctaatcccctcgctctaaattccttccttccctaaatggtgactcattttgccttttggaagggccaaaccattattccttctaaaggattagaaacaacaccaaactctggtttaaactgttgaaagagaccatgtaggttagctgttctagcaccatagttttgtttaattcctgggctccctttgccagacttgagcctaatgaccaaggaaatggaacttgctctgactttgaaatagcatgtaaataagcagaaggaatgtatcagcccatgcaatgatgaatgatcttccttctcacaaagaggttatacagatactaaaatcagtaggctcagcatttgtttttacatgtttgttataaatccttaccttctctgggtcgggaggacagtgggaatgtcagagggtgactgaaatccaccscaaattttcttggcccactcttttcttttttaactacccttcyattcccaccagaggaacagtaaaataaatgaggtcattattcttcactacatgcctcttgtaaattgttagtcagcctgcaagggtggttatttacgaggcattttgaaggtctgttctggtgacagagttgctctgggcagtggatggaggtgctgtgtcacactcaccaatggtgccatgtgtaatctgtttttctcagagttttatcgtaatggtggttgtctgccagaggtcacctacgatcaaagagttgtcagttggtccaaggtgcagccgctcctactctgggagctgtctagaccttatttctcccctcagtcctcagttaagtatagtttccagctcccacattccacacaagcctcatacacgtctaccttctaccagtccaaattgttgggtttctagaatagtgagttgtttgttagtttgtttttcctattagtcgagccttccattttactaagtgaagaactagcttcccctgaaacttagtgaaaccccaccgctctgaagctaaccaaaaatttaaaaacaaacgaaaacactatcaaaaagccaacagcaaaaatctccaagggcaaatgattacatttttctatttttgttagccttccaaacatagggagtttttttggagtttccatcgtgatacaattttttttaaccttgctttggacaactatattttaaagtgacagatctgaataaaaacgggaaataaagcactgctttccaccctcaatcttctttttaaaatcataaataaatttaaaattaaaatcgagccttcccatttgacttccttgccatactgtggattcatgataatgtctgcctgtttgaggtgagatttaattcaagtgttggaagggaaagggtggcctagtctggagctccagaactcctctctatcatgctttgccacttaaatttatcacttcccatcaatactaacgcaaagcccaaaggtaaatccttcattttcttggacttcttccttactctctaagctccagacatcttccccatctctcattctttcagtacacattgattgatttcctaccgtgttccaaggcacagtgttgggggctggggacgcagtcatccgatcctttggacccaagagccatggactacttagaaggcagcttattcaaatcctagcttcacaactcactagctgcatgaccttggaaaagttatgtttctctctgcctcagtttcctcatcagtgaaatggggctactttcctcacaaggatgttatgagtgttgatgagttcatgtgtcttgttataaagcacttagaaagttcctggccataaataagcagtataacaatgcttatttacatgctactacttaaaaaaaattaagaagtaaatacttaaacacatacttattcaataaatataatcattaaacggcaatgtccatacagtgggataaatgttacccccgcctccatagggcactaagggaacaaggtttaattcaatctgtgctggaaaggaaagggttcagggagacttaaagaaggagaaaaaagttgtgttgaaggactctgataataaaaaagagcacaaccctatattgctcttaaagaaaaactaatgcacaaaagttggacttgttaatctctttttaaatgggtagcttcacttaaatggaaacacattttagaaaataactttatctgatggaaaagtctcattatagaaataaaaaataataaaagcataaaaagagctcaaagatctacaaattagagacactaacaattaacattttsttgtaatgtcatccatttaaagtattttcagtgcttttcatttttaattggcaattaattgaatatattgttcttttcaaataaacacacatgtacatttacatggctaaaagaaaactttccttttcaccaatcttccaatcctagagaatccccagggaaaaccaactttaactgtgtatatcattacagatactttgctatcattttatgtattgatggcatatatatacctagagaatttaggttttttaaaaccacaaaagagattgtgtcaacctgttgctctgtacctcattttctcactcagtatatcttggagcgttttctatatcagtacctgcatcttctttttaatggctgcttggtatggtcatatcatgttgttttggtgttttgtttacaactatttggattgtttcccatttttactatagcacgttatgccattttgaaggttgcacatacattttgtacaaatgttactgtagaatagacatctagaaatagcattgggcaaagtgaattcacattttaaatttgcatagatattgcctaattacccttctaaaaggctgcagtattttacactacagccatagtagatgagagtatccatctcttcataccctcattggcactggtggttaatcatttgttttaatatttgccgatatggtaggagaattatggtatttcattggtatttcatggttaatttggtttttatgtctctgattgttagtggagttgagcattttttcatatatttattgaacgttatgtttctctacctgcttatatctggaacatgtcaggtgaaataaagatcgtcagggagagacacacatgtgcctcttaaatctatggatacagtttgtatatagtaggataaagagatcttactgacactttttttcttacatagataaccagctgtcaaaacaccacgtattgatcagatctatttttacctattgattttaagggccatctttattatttactaagatttaatacacatctagctccttccatatatttgtccattactgtgctaatgtcagttttaagtgtagctttgtttcagttagctataatcacactaatgctacattaaaaagaaccagaaaatcttagtggcatacaacaataagcacttactcagggatctggggcttggctgggattgggctcatccagactgggcttgactagccagctctgcttccggtgggaacagctggagaggatccgtctctccctgagagctccggagaccctctgctctggtgcctctcatccttctttgaccagtgggcttgctgggtcatattttcctcagggtaacagcagatttgtatgatcacatgctcagctgcgcagtcatattttagacccctacttgcttctgctaacattgcttctgctaacaccccattagccaaaataagcctaaagttaagagaggatattccacatttagagggaagaactgctagttacatggcaaagggcatagatgcaggaaactataaattggggtccaaagtttaatttacctttgggcaagtccttcaatctttcttctttttcaacatattagtttttggctattttctctctctctctctctytttttttttttttttttttttgggacagattctagctctgttgcccagcctggagtgcagtagtgctatctcrgcctcctgggctcaagcgattctcctgcctcagcctcccgagtagctaggattacaggcacacaccaccatgcctggcttatatttttatttttagtagagatggggtttcactgtattggccaggctggtctcaaacttctgacctcaagtgatccacctgcctcagcctcccaaagtgctgggattacaagcatgagccaccacgccctgcctggctgttttctttcacattgttttttccagataagcttttgaatgagcatgcaaagttccaaaacttctgagtagaagtttggttgggttcmcattggtcatatagactaatttgggtagaatttatatctttacattastgaatgttcacatccaattggaaacattttgtatgtgttcattttgtatttcagttttatatcttttgacaaagttaatttttcttataaatattttcagatraactcaaaagcagaaagagtagcacaatgaatatctacttatatgactctcagagttaatggttatcaagattttgccacatttgctttatctatcccttttttccttattttttgccttagcattttcaagtaaattctagtaatcatattattttacctgtacatattttagcgtgtagctttttaaaaatagacatatatrcagtatacatagatacatatgtacatatgtgtgtatgtatgtgtttawgtgtgtttgtgtataattattgcagctaatacaaatcaacaagagctccttggtattatctaatgaaccatctttaatctaattttcccaatgtcyaaaaattatctttttagttagtttatttggattaaggtctgtagattaaatttggttggtatgtcacttaaatcttttcctctagagtaatyctcttcatctgtttcttcatgccacaaacttatggctgaaactgagtcattttttatgtagaactttccatattctgaattttgctgattccatcccccggtgtcatgaaatatttttctctaaccactgtgggatttttttttaaccactgtggcattttctgttaagcagctggttagatctacagactctgtcagattcagctccaagtggcattttttttttggaggaaggggcaaaaatatttcataagtcacrccattgcttcctaggacattcatcctggcagaagatacatatatttaggtttgtcaatagyatctggttcacgttttatcagtctcatccacccgttacgaagttctcttcttaacgaattatttctgcctcaattcgttacttcattagggattgcaagatcgtgacattctaattctaccattccttttgcatttattataatcaattatttcgttaccttgaggtagaattcgtgtaaaaacgcttagatgcctgtcccaaacacacacattttcctgagtgcgatttacacttgtagggtcctgtctgtgttaaagatgctttgctgctctcccaccaggcctgggaataagtaccagactgatgatagacggggaggatgatcctcctgaaattctagccacagggaagaaaagtccttgcaatgaaagacactrgccagggaagctggttggacacacacacatacttgcacattcacaagtatctttcattaaaaggagatgacctactgsttccctcctgccagtgatgggccacaaaacagacatgacacgtgggccttctcacgtgtcccagatttgttttaaaartcattttcaattcatctagttttctrttaatgttaaaaggttggaaattatattttaattagtgttagagaygtacatcagcatcatagaattctgaaactactgatgcaacagaatcataaaatgtttaatgagacatatcaatttaattctgctgcttggaacttaaaragccagagttcgtcagcattttgctaacaaatgtcatcatttacagactgaatttggtgctgattatgttcaccattactaaaaatattgggaaatgagctatgcttggtgaaacaaagggcattttttwaaaatttggctgattaaatgtagtttagaaacaaaataaacttgcataaacttgcaagtgtttggaaacagtctggtttggtaatagtcactatgtttaaaccctgatgcagatgatgctgtgtatctggacaatgagaaagaaagagaagagtwtgtcctgaatgacatcggggtaattttttatggagaggtcaatgacatcaagaccagaagctggagctatggtcaggtgagccacttaaaatttgttattgtcaaggacatttttacttcatattttttgtcacatgtatccctrcaggatcycatatatcgatattagacaagcayaatttcctgctttttaggatctgagactccwaggcagwgagcataggagtagggactcataaagacaactgcgtaatttatcagctgaaaccacatatctctggktattacagtgttacagaaatgagagattccatgaataatgtggcattctattgagaaatgctttggccacttagaacagtgaaatctcattagttcaacctggcttataaagaaaggtattttcaaagtgatgcaaagaatactgcaaggggtgtgcccaattcaaagaaatagcttctttttktttttttttaagtgttagcstagggtactgctaattagaaaagagtgttatcatttcatcaaaggaagggccactgagcttttacatagraagattttatcagctgcaagttgattgtctagacacaaagtagcaaatggcatttctttaagrtgttcagtcattcaaactatttcagtttggtatctttaacaatggagcaaatgaatgatattttaccaattttccataaatgaatgcatgtcctgtgatttcaaaatgatttttaattagcgacacaagcgggggcgaatgtcatttctcaggagttttggctgggatggctggaactgtgcatcattgcgctgggcatccagcagggagttttcayrgaatctggtggtcacagggtactttcttggctccrgatgccttgctttgacttccatatgggatctccctgtgttcctyacccactgctccagtaccygtgttatcctgcctacctggctttgtgaacagcttccctgactccggagaattacatgcccagtgctcaggctycccygcctgcatttctaatgtcctgccaagctacaagctagttggcaccccctgttcttggattcctgcctgactccctggtttcaagccatcccctcctcagtgacatgcaacctttgactatactgcctactgcctgatgcccttgtcttgggtccccaatttctagcctttagcctggtgattctatttatggyccaaatatgacaatctatagatagctaamaaggggaaaagtcatcaaggtgggcagcaaggaggtctggaaaagtgtcccaagcccagtcaggkcactcttcgccagcttgcctttgggtaggcaccctggagcacagtcacttgattgtatcttctgccactcaaagaggctattggtgtgtatcctttggccagaataaccagccaagcrtgtttacagtgatgcagggaatcaatccgttctatgactatttccttaactctccarttagttgctatcctgcccagcaaayacagctgagagaagctgcttaataagaaccaaaatactgagctatttgcatacctgaagaactagtgcaattacccattactgcatccatcctgtcagtttgggatacacccagagtgggtattctaactggactgaataaagaattgtgtggtaattagccattatgattgtggtttctgtcacaagcacttgggtggatagcacacaaggtttctctattcaggaaaatctcttactacagtgaggtacagtataggtaaaatcttcctgtcttgctatttgatctttattcctttttaagaaaattctggtattgcytgtggctagcagttctttctaagragactgaactggtaccagactcctcccttgatagygtaatctactttctgcagccttctgccctctccttgatcctggggtccaccttgtctcagaagaggggaaaccttagagggacagtcactatatgaggtctcctactattttgggtgcaaactaagtagtgtgaagcaccttcctgtgatacacctgagagctctttattttckaaatgcacgaggattcacattactttcgaggtcctaagactctggcctgactttggtaaatgattcattccttcttcttgggtacaggagccaatatgttgaaaagaccttctaaattgaatcattttctgaagaacttcaagtcagcttatgatccctgagtatatcaactctctagtatttctgtttatgtttctggcttgcttttatattcttattcactttaatgaaaaacaaaagaagatgtctcattccttctactttaatatttcatactaaagattatgggagatcactatacaggaaacacacatttctaaacattaggttgtggtttcatgttatttttcatcagagaatattttgcttgcagagtgaacactagtttctctttgtttttctttctccaaatagtttgaagatggcatcctggacacttgcctgtatgtgatggacagagcacaaatggacctctctggaakagggaatcccatcaaagtcagccgtgtggggtctgcaatggtaagcagcaattactgatacctaaaatctgttacacctgtcatttgcctcagtatatatgccagttcattaagagctgctgaaatgatgacttacacttaataaactttcatttgtaagattctagcttctgacacccagttatagctcctggaattttctgagcttatcatgtgctataaaacaaaattatcgtctcaatactgtatgtttctttggctttagaaaacaatgatagatataatgatactgtagaccagttattcttaagaaccccttgcctagagactgaggagtgatcatgacaaaaatgtcaatgactataatcaaacagttgatcaaccaaacatcaaggtgcacagaagatgtgcaaggcacagcttttctcaattttcacactgatagtaagagtgaagaaatgaatggctacatctcatcctaactcctgtcacaaggatgtgtcactgtagggctttctcacttacgaagtgggtattgattctttgcaggatcctgtgtggtaagtagggcagccattactcatgsacttttacaagttaggacacagggtaaggacagctttcagtgacaaagccacagctagaactccggtctgctgacttcaaatctagacattttctacttttcatgccgctctctgcaggatatcctaaaacaactttgagaatgcagagatcttgcagtggaacaactttctgagaaaggagatagaactcccatgagtgggaagggtgggccaggcataggacgtggattaaatgggatgtccaggacccatgcagtcctggattatatcaatgtacccaacatggagagccagatgttggtacagagaagtagacccartctggctgaagagtagattatttctgaagaaatgttaaactgggtggtatttcaaacaatcaaagactgaaaaaaagaaatacttatattaccaatttccctaagttttctaagaaatcctctttttgaaagaatgttatgtttgagtttggtttgtatattcttttgagctaaatgaaatcaatattgttaatataaaaatattagactgtgaatgatatgaaatataatttctggttagcttttaagaatggtggcttttattttattaataactaagctacatgtgaatttaagaaacagcagagcataaaaagtaaaaatagaaaccaacatgtaaaggcagttttgtttcctatgcatttacattccataatgggaagccaatgaattccaaagatttgggggaatgttgaatttgggaaatgtttaccaaagtgtcatgaccgtttataacaaatatattagacttgcatctgatcactatttttactgtttcgcccacaagatttctctttttcttctttgaagttaccataacaattttgcagtaagaaaggaagcaacagctagcagtggttaaatttaaattaattccttcttaagcattctaaaatggcacactcatcagcataagcttactcacacactgtgtgtacttttacgcacccagaagtcagaaatcactgcctarcagaagccagtgcaaaagagaagcagacaggaagcagttaacctaatgtgtctgtggtggcagctggctaagcggaagctgttaattattgaataagcacacatactcctaatgcaaattgccctgagattttattaatcatgtaaagcctatgaagttctaagtttgaaaatttatatcccaattaaaagatttaaaactagacagagaaaatccatttggaaaacggtttggttttatttttggagggggagaatttgggtgttaaggggtagaggtcctgacctgagacattttgagcaatatttccatttccgtcatacccttgtttatatacacaaaatrttcaatggttttcaaaaacactttcacctctattagctcctttaaaccttagaatacctctgtgaatctttccaaaatctgttccgttttaataattttaaaagctaaaatactgagcctccaaaaatcaatttaaaaaatgacacagaggaaagatcaagtgttctttggtcattcaggcagatactctcccgttcacaaatcctggaaatctatcatgaaatttctgaatgcagttaaacaaagaacaaagacaaaaaaaatctttaaatttctcaatgaatgatttgactttattagtatgaaaagatgtgcctagagagcccacaagaaaatgttctgaagttgtggactcttagccagaaccctgttgcaggkcgacagagctgtgtgtgttttctcaggggctgggcccaggcctcacaggtaaaacagaggctggtgcagagttgttctgaattcctctcaaacacctcccagcctggtcatagaggctagaaatcccattcgcaggttgcaaatgccagagcagcggtataggtggcatgtggactctccagaagaaatagcacatagatctcagttcatccccaggtgagagtgaaggaaggcagaactttcctgagggcacttgctgctgggaaacagtgaggatgagcagaccagtctttgctgggtatctggagagagtggagctgggtggggacaagatgcagagcacacgactggggccccaaagacaaatttgcttactgtggtccaggacaagtctagcactgaaggttggcaaggagttttcaggcaacaggtgggtgcatgttgaaaaaagcaccgataacccaaattgtgcaaactttcaatcataataagaatctgaatttgggccaggaacggtggctcacgcctgtaatcccagcactttgggaggccgaggcgggcagatcacctgaggtcaggagttcaagaccagcctgaccaacatggagaaaccctatctctactgaaaatacaaaaaattagccaggcatggtgatgcatgcctgtaattccagttactcaggaggctgaggcaggagaattgcttgaacccgggaggcagaggttgtggtgagctgtgatcacaccattgcactcaagagtaaaactccatctcaaaaggattttaagtgcacaatccccagataaaaatatttattgttcagtatatttatatttattgtatgtgaccttgggtaattgtttgttgtagaaggttgtcctgtgtagaatgtttaacgacatccctatcttctacctgggggatgcaagttgtcataactgttcccttaccagttgtgacaactcaaactgattccacatattaccaaatgtctactgggggtaaaaatcacccttagtgaggatgacagcactaaacccctctgtgactcagtttctccacctatggaatgtaagtaacactctcttctcacctgcatagcgaatctgtcttcctaactcactcaaaacctgctggttttcatccttgactgaaaagaaagtgaaggcagcatcatatgggaagcgactcagctcgtgtcgagggattggaccttgattctggttgtgctattaacttactatgtgacccagggtaaataactcacctctgctggcctcgcatctttgtctttaaagtgaaattttgtctctgtactcaaaccacattggcagcaagaatactcttttattcttcaaaatagtgctctcccttcttctattttttcctttatacattcagtaacttcccttgttcttatattgagttgctgttatttcactttgatgtaaaagtaggaaaagttatgacaatctggacagcctggggctattggagtttcccaggagaaagcaagtccaaaatcctgtattctcatcatctagagattaggcctgagatattataaccttacataagctaacttttgcttaggctcctttaaatactgagtggtgcattttaccaagctatactgcagattgatttaagagagaaaagaaaaaaaagagaagcaattagaaaaaatgaagaaacttgcccacagttatacttctccctttaaattgcattgcttgattgctgctttctttycaatgcatttctgatgtgacagttcccaccaggaaaattgccagagaaagctaaggagaatgcttaactttgtgccatccgaacacttacttccctcacatggcattaataaagcattctattgctagccccaagtttctgtgaataagccagacatggactctgagccctgagtcagactatcaaagaaggtgggccgtgacatattgtgacaagggcagcatggttctggggaaaagggaaggctgtgcaaccacctggcattactgcggcgtggttacctgtctatgcctgttcctgcctcccgactgataggatctggcagcaactatgggcagagaatttcccccaaggagatgcagctgcttctgcaaaggctgccgytactgcagataaaggctcgttattcactgtgacacacctacatgtaccacctccatccatatttgctccagtgggtcaaggcattaccagtggaggatctgtgtcgaaacacatgctgaaccagcgtgtgcaatggggaggactctccaagagtcttctgggtgaggaagcagaagcccttggaagtggtgtccctcactcaaagtcacacagcaaataagtggctgagctgaaaccagatatggtccttactctcagatcatattaccttagagggccactatcaacacgttattgccaataacacaataattatgtaagattgarttgccatttcctagaaaagaagagagccccaagggaatggagcccagatgaggcaaattattgaaaatggggaataagtgaagaaaggtatcaatcagaggattctaaatagccataggcactggggccctggagaatgagcttccaaagacgatcaggtaccaaatatgatatgataatggtggtggtgtttggtggtggtggtgatagagttagtgatgatggtggtggtgacggtggtggtgatagtgattgtgataataatggtggtgatggtagggtgattatggtggtgatagtgatgatgatggtgatggtggtggtggagatggtgacggtgatggtggtggtgatggtaggagtgatggtggtgggagtgatggtggtagtggtggtgatggcgtaatgtggtggtggtggtgatttatgatggtggtgatagtggtagtggtggtggtgatggtggtaaaacactcagtatttactcatttgtttgacaaatgtttatggcaatctaccagtctgaacactggagtacaattgtgaacaaaattaagtttctgccttcacaaagcttacagtctaacagagaacacagactagtaaatagaaaattttagctcagcatggcaaattctgtgatggaaataagcatagggttgtatgggaaagcaaatctctcaaatgtagctcaaaggtttcccaggactaaacattggatcaaaagatagaagaatgtctgaggtcccacagtaattaaccatgctattatttgaagaaaccctttctccatggtggaaattatatacaaacagctagtcaccaaaagcactgaagaaaaatgtagtagrgggttatttgctcttctgggggcttgtttgttttgcaattcagaaaactaaggttgacacaactgaagtttattccataggatctcaacatttacagttacttgatccatggtattctgattcagttgtagtaagaaaaaaggtaatattaatgagaaaattaggaaagtaggaggagagaaaaaaacgtcaatatagttacatatttttaaatttcagtgtttgtactgctgccatcctggactatccagcttcccttgagatgtatgcatttatttttaaccctggccttttgctaatatcgaaccacaatgccatcattaatccccattaatactttgctctgactatgmcttttgggaactaactcatgactaaacttttttaaccaatcgatgttcgatgtactctttagcattgtaaaaaaatcttgaacttcagctagtaaatcaaactgaccacaattcggagtaggtcctggatttttctaggacacagtacaagatgaatgactgtagacctttgagatgaaatggactttagtgcttctgatcctcatgcatctgtgatcctacagataaacagaaaataaagttattttccctttgtccatcttttcctccccctctttttgtcccagtatttagaaagatttttttctttccaygcatgaaaaagacagtaatgacataactacttttatatcttgccaagcagctcctcaaggggttaactataaaaccatgttttgttcattttctttcaattgtttacttggtcatcttataggaagcttcacgttgagcaaacctcttcatgcaacaaaccttaattataaatattcagattacatttaaaagttcactttgattagaaatttcacacctgagtcatcccaaatgaactgtaaagacagaaataaatatataaagtttgtatttatttctaaagtttattccttgatcatacagaccagtcacaaggtactttcgtaacagttttattaagaaaaattttaattacaaagcaatatctaacccatcctttggtttataaagcagcttaaacctctttttttggagtgaacggtcrtagatacatctgaggacccaggtgctcaatgggcattgtccttggcatttctaaatcaccaaggaactttttyrcatttacccatatggattttaatttttgaaaaagttcatctatcaaaacaaatcatgattatgtaataataccttgttaccccattcttgtgtcagatttatataactgccaatgggaacttctaatgatggtggcggtggtggtaatcatctctaccagataatgagtatgaccacactgaatatgattcggtgtcactttgtgggggtaaagatacaacttccatctggtcttttataaaagcgacaacagcctacctgcattactaacccacagatgcctagaggtcaaaattccccaggtggtgaccactgccagatgtaggttccatcatggacttgagtctccatccagagcttctgggtctccaaccctatcagcttttatttaaaagtgttattgtctctttctatgattcatatcaggaatgaaatttctcagtttggaacagcakaaaaaggcagaagcctccggtgttccttgcaacctttccaattrtaacgcatatcaattagtargagctctcggggtgacaactttgggagaatccactgatttatattaatgaagagtgttactgtagtccaacagagtaaagtactaaattaccaactctaaaaagattttttagaaaaccattaaagttaaagtcaaggtatttctaagaatgaaagtcatttctatgattctaaaatgacccagggaattcaatgatgaatgagaggtacagactcaaagcaattctctaatgtattcaaagtaaacaatacyataaggtcaccttattcaccagggattttcatttctgttcattgaagatttttwaaaaattgacagatatattggaagccagtgggaaaatagaatttatctaacagaaagtatcttcatagccacttttgagaaattgcataaatccattccataaataaccaaagtgcaggtggagagactgaggcatcaggaagttaagtaactttatccaaggttgctggtagcactgggggtgggtcatgagttgcctggccccactaattcacacacaatgttctatttcccctggatttgtcctctgtctgtcctctctccmggtcacatgagctccttggatacagatataatgccttttacatgtcctgtctgattcaatccttctctttcaggtgggggcagtggggggacgatgaactgctcagacattatcttttttctcttatggtaaaagccagcagtgtaatgaagtttccatttgtggtcaaacagcttggtttctcaattattaagcttacatttcttatgcctcttcaccccatatttttggagaaaaacagacatttattacaaggcatctctcgaatgtgataatcatgggcaatctaaatgtctgctttccctgaattgcttcctggaatgaggtttcaatgctgcagctattctgtaatcacacaggctatttctgaagcacagggatgctttacagcactccctccaagctgagcggttggtgctgctctggtctcctggggccagcatccccaggatagatggatagcaaaggagcaaagcaaagccagctcagccctttaggatatgcacagcttcatgcaccttgggttcccttcataccctctttctttcccctgtctcctcctgttacatccttccctttttcctcytcctgctctgcatttttccctctctcatacgtccattcctttaattcagatatttttgaggcctgttctataccagctctacaccatgcagcagtggtatggcaatgaaaacagcaggccacacttggagaccttgaaatctcagttttctctctcagtccacatttgcttatttctctcattattgtcaattagtaaaatatgttttggccaaatgagcatcctcagatactgagagagacaaggttaataatttcctgtggtcatagttatcatgaaaaatgagtctaattacccacccctatcagagcttgggtcatatatataccaaaggacattcatatatcggtagttatatgcttcatactattcattacagttagttacaggattttttttaattgaagtaaaatttacatacagtaaaaaatcatggatattaaatgcacaattcaatgacttttgattggggtaatcaccaccccaatcaaaatatagacatttccacaagctcagaagtttccctcgtgcttcttccggtcaatccccacctcattaggtagctactattctgatttcttgcaatgggttacatttgtctattcttcaactttacataaatggattcacacagtagaaatagggctggcttctcttactccatcaactgttacatgtgttttcaatgctttccttaccattactaagaagtattttattgcattgtatatcacaatttgtctatccattcacctattgatgcatgtttaagatgtttccaatgtgaagctattatgaatacagttactataaacattcttgtacaagtgtttttgtgtatgtgttttcatatatctggagtaaatagctaaagagagcatgcctagatcagaaagtatgtatatatttaactttataagaattggctagttttccaaagcagctctactgttttacattcctgccagcaacatatgagagttccagtttctccacagcttcacctattcttgatgtcttgaacctttttaattttaaccaatcaaatgggtatatagtggcatttcattgtagttttaattttcatttccctgatggctaatgattttgagcatcttttaatacatttattggctatatatatatatatatatgcagcatgttttcaagtctactgattttcttattcagtcatttgtacttttattattaagttatagttgctctgtgtatatacctctcatttgtcagatatgtatagaacatattttccccaaactatggcttgtagttatattttataaatggcatattttaagtaacaaaagtttttaaattttataaaatcaaattttttcattgttctttaatagtcatccccagtaaatgttctttccacatgaagactttcacatgaatcactatttgcccatgtttgccactatttctcctatgttttatttttgaagctttataatttgaacttttacattgtggtctatgatccrtcttgagttaccttttggtgttgtgtgaggtagggatcaaatcttattttttccaaatttatccatttgttccaccagcatttgttgaaaagactgttggaaaggctttcattcgttgcaaagagtttctttgttgaaaagactgtcattttcttcattgaattgctttggtgactttgtcagaaatcaaatgtctacatgagtatggatctatttctagactctcttttctgtttcattagtttatatgtatgtccttatgacaataccacactgccttttttactgctttcctctagtaaaccttcaaatcaggtagtcattcatttttgttcttctttttcaatattatgtttaattattctagatcctttgtattgctatgtaaattttggaaacaactttccagctttaatgaagtgcctattggcattctaactgtcccgttgtcttgatctattaaagaagtattaaaatgtagcctatagccatcttccagtgatagcacatccattcattcaacagaacttattgagttcccactctgtgctagccctgggaatataaagtcaaaacagcatagtgccttccttccttctgtgaacataaagtctgggaaaagaacaaggacagtctaaccaatgacacaatacaatgtgataaatggatagtactatgcaaagagtactatgtgatcaaagagtaaggacatccaaatcaaggtgataagtaaagattcccagggtgaaaccagctgagttttaaaggatcaatagggcaccaggtaaagaagaggtttgagtgtggatggacattccagggagcgagaataacatttccagcaacaacaaggcagaaaacagcttgttattaagcaaaccactatgaaaaaccaaagacatggtagatgattttcctttcctttcgaccaagtatgtgaccctggctgttgtaagtgccataaaagcccagaagaaaatcaaggatgaagagccaggcaagggaagaaatagaattgctgctaccctatttcttttttcttgtgcattttctgggatgcctgcccatggaataacctgagtacttgaccttcagctcatctcccttcctatccttacaacataacttggcaaatggcggagcaggcacaaaaacagatctctacattcccagaactgtgaccttttaaattttattttttagaacaattttttcaaacagcaattgaatccaaatacataaaagagaaaaagcagagcagctattattaaagaaaggtggtgactgcagccttgactatcaacattcaattctcacctgccccaccccacaacaccgtaactactgagtttcttttgcaaaaccctagcatgtcatgaagcacaatytgacatccaccacaccacttccacctgtgattaagtctggtcaccaccacactgtagctggggatttgtggttcacaaaacctggaaacgattttctacaggaaataattcttctccttgccaaacttaacgctaggcctttgatgttagttcgtgttacccaacatcaaaattcatttccaatggtctttgagaaaccattgtggacaaaattaggtataagactattttctaaaagagttatggaaatcctagcctttatgaggacataacttttaacaatgaaatttaacggaatatgataggtttataacagagaaaagtcatttcatcatagccatataaaatgcacacagaggagaaaagtacccttgcatatttttttaaaaagcagaaagaaatagtaactatacaaaatgtaaaggtctgcgctacaggaaattgaagaatcaagaaatgtcacatttctttatttttcagtatcaagttagaatctgctcatattccaatgaccaaaattaaacagaagtccagtacgggtcatgttttagggctatttctattctttgaattatacaggagaaataattttaaaatcatagataatattatactatagatgctggtttaatttaaaagtcttcattgattttcacagctttattgagatatagttgacaataaaatgtgcatacttaatgtacaattggataatgttgacatgtatatgtacccatgaaacgaacactaaaatcaaaataatgaatatatccattgcccccagaagtttccttattgtaatttcttccttaaaccactccctgctttgtgtaccatcccccatcactgctcagccttctgtcattatacattgatttgtgttttctagacttttacacaaatataatcatgcagtatgtactccttgtgaggcttcttttatgcttccttactgtattctgagcttcatccatgctgttttttgtttcagtagttcatwcctctttattgctgagtagtagtgtttcattgtatggatgaatcactatttgcccatgtatttacttgtggatggacatttaggccattttccgtttttgcctcttacaaataaagccagaaactttagcttggaagactttagtaaaagtctttgtatagacgtaagcttttatttctcttaggtaaatacctaggagtgaggtggctgggtcataagctaaacataggtttaatttttaagaaactaccaaactgtttcctaaattggatgggcattttacattcccaccagcagcatatgagagtctaaagtgttgcatatcctcccggacacttcatatgatcagtctttttaatcttagacttttaaatagatgtccaatgttaccttgctgtggttttgatttgcatttccttaatggctgatgatactgagcatcttttgttgtgattggccacccacgtattttctttgatggaatatctgttccaatatttttctcttgttttaaggttgtgtttgttttcttactattgagtttcaagggttctttacatattctggatacaagttttttctttttaatcagataaaggatttacaaatatcttcttccactctagttttattttttcattctcttcacagggcctttcaaagagcaaaggttcttaatttttatgaagtctgatttacaaatttttttatggatcatgcttttcatattttatctaaggaaactgcctaacctaagatcacacaattttctcctttgcttccttttagaagttttataaccctaggttttatatttaggtctaaggttcattttgagttcatttttacatatggtgcaaggtatgaatcaaagctcgtatttttgcatatgaatatccaattgatgccacctcattttttgaaatgattatcctttatccataaaatttcctttgcaactttatcacaaattagttaactgtatttgtgtgagtctatttctgtgttctctattgtgtcacattgatctgtttgtatttataccaaatggtgtcatgctacttaatttgaaagtattacatgtaattgtacccaaattctatttaattttaagttttattgaattttactttaataggaaagaaattaaattgcaacagaagaaattattaaacttcaaataaatatttcttcactacaagagatatcatttcttaacaggttttcctaaggttattaaaaattataaaaaccattaaaagaataaagtaattatgtacttttaaattatactttaatgttagatggtatcaattaactgagagacccacacactaaaacattaccattttcactgttcctctcctctttctcctatcttttttcttaggatgattattgtttttatattatcaagtcttaaaattcatctgtaactgtaaatcccaaagatgcttaacttatatagagttttctcacccctgaatctgttatcacagagtctctgttcctgggttctttgtttgactyagcccctaattattttgatatcactttcaagtattaatagtttggttatgataggtaccatattccctgaagtacttcatgttcgacaatgtgtgtaaaagggggctgaatgcttgatttgatgctccacttggtcactgttgatgtagagaagagctaatgatttgtgtacattaatcttgtatccagaaactttgctgaattcttttatcagtcctaggagctttctggaggagtccttggggttttcaaggtaaacaatcatatcrtcagcaaacagtgacagtttgacttcctctttacctatttggatgtcctttatttctttctcttawcttattgctctggctaggacttccagtactatgttgaagaggagtggtgacagtgggactccttgtcttattccagttctcagaggaaatggctttcaacatttcctcattcagtattatgttggctgtgggtttgtcatagatggcttttattacattaaggtatgtcccttgtatgctgattttgctgagagttttaatgataaagcaatgttggattttgttgaatgctttttctgaatctattgagatgatcatgtgatttttgtttttaattctgtttatatggtgcatcacatttattgacttgtgtatgttaaaccatgtccacattcctgttatgaaacccacttgatcatggcggattatctttttgatatgttgttggattcagttagctagtattttgtgaaagattttagcatctgtgttcatcaaggatattggtctgtagtttccttttttggttatatcctttcctggtttttgtattagggtgatgctggcttcatagaatgaatttgggagggttccttctttctctatcttgtggaatagtgtcaaaaggattggtagcaattcttccttgaatgtctggtagaattctcctgtgaatccgtctgttcctggacatttttttgttgataagtttttaattaccatttcaatctcactgcttgttattggtctgttcaggatatctaattcttcctgacttaagctaggagggttgtatttttccaggaatttatctgtcttttctagattttatagtttatgtgcattaaggtgttcatagtagccttgaatgatcttttgtatttcagtggtgtcagttgtaatatctcctgtttcatttcttagtgaggttatttggattttctctctttttggttaattttgctaatgatctatcaattttatttatctttttaaataaccagctttttgtttcatttatcttttrtatttttgtttgtttcaattttgtttagttctgctctgatcttggttatttcttttctcctgctgggttagggttttgtttgttcttgtttctccagttccttgaggtgtaaccttagaatgtcagtttgcgctcctttggtcttttttctgtaggcctttaggtctatgaactttcctcctagcactgcctttgctgtatcccagaggctttgataagttgtgtcattattgtcattcagttcaaagaattttttaattttcatcttgattttgtttttgacccaatgctcattcaggagcaggttacttaatttccatgtatttgcatggttttgaaggtttcttttagagttgctttccagttttatttctgtgtggtctgagagatggcttgatataattccaattttcttacatttattgaagcacattttatggcttatcatatggtctatcttggagaaagttttatgcactgttgattagaatgtgtgttctgtggttgttggataaaatgttctgtatatatctgttaagtccatttgttccaaggtatagtttaaatctattgtttctttgttgactttctgtcttgatgacctgtctagtgctgtcagtggagtactgaagtcctccactactattgtcttactgtctatctcatttcttaggtctatttgttattgttttataaatttgggaacttgagtgttcagtgcacatttgtttaggattgtgatattttcctgttggacaaggccttttaccattatataatgtccctctttgtctcttttaactgctgttgctttaaagtttgttttgtctgatataagaatagctacccctgctcgcttttggtgtccatttgcatgaaatacctttttccacacctttactttaagtttatgtgagtccttatgtgttaggtgagtttcctgaaggcagcagacagttggttggtgagttcttatccattcttcagttctgtatcttttaaatatagcatttaggccatttacattcaatgttagtgttgaaatgtgaggtaccattacattcatcatgctctttsttgccygtgtactttggtttttttgttttttgtttttgctttttaacttgtatttttgttycataggtcctgtgtgatttatgctttaaagaagttctgttttgatgtgtttccaggatttgcttcaagatttagagctccttttagcagttcttgtagtggtggcttggtaatggtgaattatctcagcatttgtttgtctgaaaaaggctgtatctttctttcatatatgatgcttagtttygctggatacaaaattcttggcygataattgttttgtttgaagaggctgaagatagggttccaatcccttctagattgtagggtttctgctgagaaatttgctgttcatctgataggttttcttttataggttacctgatscttctgtctcacagctcttaagattcttttctttgtcttaactttggataacctaatgacaatgtgcctaggcaaagatctttctgcaatgaatttcctgggtgttgtttgtgcttcttgtatttggatgtctaggtctctagcaaggccggggaagtattcctcaattattaccccaaatacattttccaagctttcagaattctcttcttcctcaggaacaccgattattcttagctttggtcatttaacataatcccagacttcttggtggctttgttcatattttcttattccttttcctttgtctttttggactgggttaattcaaagaacttgtctttgagctctgaatttttttcttctacatgttcaattctattgctgagactttccagagcatttcgcattcgtaaaagtgtgtgcaaagtttcctgaatttttgcttgttttttctttaagctatctatttccttgaatatttctcccttcacttcttgtattattctttggatttccttgcattgggcttcacttttctctggtccctccctgtttggcttaataactaacctccttaattctttttcaggtaaatcagggatttcttctttgtttggatccattgctggtgaactagtgtgatttttggggggtgttgaagagccttgttttgtcatattacagttccttctcatctgggtaggctctgtcagagggaaggtctagggctgaaggctgttgttcagattattttgtcccatgggatgttcccttgatgtagtactctcccccttttcctatggatgtggcttcctgtgagccaaattgcagtgattgtctctcttctgggtctacccacccagcaagtctacccagctctggagtgacactgggcattgtctgcacagaatcctgtgatgtgagccatctctgggtccctctcagccaccggaayagcgcctattcyggtggaggtggcagggggtacaatggacactgttagggttcttagctttggtgtttaatgctctatttttgtgctggttggctccctgccaggaggtggtgctttccagagagcagtagctgtggtagtatggggaggaaccagtggtgggcagggccccagaactcccaagattatatgccctttgtcttccactagcagggtaggtaggaaaggaccatcaactgggggctgggctaggcgtgtctgaggtcagactctccttgggcaggtcttgctgcagctgctgtgggggatgggggtgagatttctaggtcactggagctgtgtacctaagaggattatggctgcctctgctgagtcatgcaggttgtcagggaagtkgggggaagctggcagtcacaggagtcacccagctgccatgcaaaccaaagggccagtctcactcccaccgtgcccccctcaacagccctaagtccatttccaggcagagggcaagatggccttgaaaacctgacccggtctacccacctcccagctgcaaaagaaaagggtttggttcttccacacctgtggagtctgcacaccggatttgcaccctcccccaagttttggccaggaggcttctcaccccattcaaattgctacaaagttcagctagagatttccttctccatgtggagttttatcctctgctcctctgtccacctttctgatggatctctgtggtgccaggcagggatggcctgctaggggacctagcaagctcccagggcctttctgctgcttcctctacccctgtatttccctcagctctccaagttgacccagcaccaggtgaagtcggaaacttctcccacaaacagaccttcagcttctccagtggaggtttgtgttcgggagaggagggtctccctttcccacttgcatagttgggacactcacagtatttgggggggtctctcgggtcctgcagaagcagtctgcttccttcagagagtctgtggtcctctcaggattgctggtttgttcttgcagtcgacctggatctaaaatttacagcacgagcctccacatgctgctctgtccagagctgcaatccagtcctgcctcccatccaccatgatgatccaaatccttgggttctctattttaaggacactaatcatccttatgttgtatcatctttgttttccataactatggtactattagaatctctctaaataattcatcactttggttttttattagtattttctttgatatctcaagttttcttctatgtcattaatttttatttttaataatatgtattctgtttcttgcagtttataatttattattagctctgtaatggtatgatttggtcctcaatttgttgccttggtctgtgatctcctaaaaggttgtgagaaaaatgacttatgctccttaatttcgttttcttctatgtatattttttcatgatctctccctctctctctttctgtctcttcctctgcatgcagtttcttttccctatatttatgctcaaacttgcatcattcttgtctctagacgttctatttgctgtaataaatgaaattcttctcmatctaaggttagtttgatctcacttctgaactacaatttgaggccaatgtaccacattctatctactcttcagtactctgcaagagattggagtgaggactacagtattagaagatgaacaatctttggtatcatgcttagggtctgctctttcccttaagattctcctacatctgtcactccagaacccacccccacaactggaggcatatctcagttccattgggggatacgctcagcttgtattatttcccaattgtgttccagaatctctacctcttttaaggtgcagatactttttcactcgtttctccacagcaggtgtttccaccattctgttcagaacaataaaaagakcagcttttttttttttttttttttttgagacaggatctcactctgttgcccaggctggagtgcagtggtacaatcagctcactgcaacctctgcctccccggttcaagcgattctcctgcctcagcctccagagtagcggggactacaggcatgtgccactatgcccagctagtttttgtatttttagtagagatggggtttcaccatgttggccaggctggtcttgaattcctgacctcaagcaatcyatctgcctcatcctctcaaagggctgggattacatgcctggccaaaaagatcagcattttgattatatttattactttctagawtttaaaatataaattagaaatctcaggtttttgttgactagctggtaagatggttaaggttaggagctgakccatgttgcctctctgctttactccatagtcctcatgttttgttgggaccatgttttgaagtttattgcattatgctgataatgacttttaggggtttttgaaatttttttctaattttgtaggtattatgggagggcaatttagtgtagccttaatgaagttgaataatgcctcctgtaygtagtcctggacttgtattgtctacttgaccaccagtgactcaagaccaagacactttattctgccactggtcaaaccctgagatcatgagagggtgttaaaacagccaactgtggcatgaaaaatgacaaacatgtcctccaaacatatcttgttgcttatgaggggagatattattttaaccctttacatctgtcactaaaaacttacctctttcatggcctgagctccctagaaatcaatgttctaattagaaaacagtagctaatctgcccaaatgctaataaatgagggttgtgatttatctagcaacaggggaacagctcagcattaacaattaaaaggtctgtagaggacagagctttttttccttactcttcyccttagctgattgagttcagccctatgctataaatagcccttgtaattaatggctatctgtttgaaaatcagttatcaggaccacagtttaggagcctttacctctgaaattcatagagcctattttatgtctcagtgataagggaatgataatgtgagttcaaagctaaacctacctacccacaaagaccaaaccacatcatagcctaccaaggcattcttcaatcttcacgataatggatacagatttttaaataatcaatccaactgcaaggagaagtactgatctttaatatagccataatgtttggctaaagcctgctgcactccagtcatttcatgactctataagctaaagtcaaaatttatatcaaaggcatgagtttgcaattagctgagcaaggtcttttagagacccccaaagagttcattttttcctacattgaacaaattaactgtgtggttcataaagttcttcttcactttaacctgactggacacagagttaaagggggaagatagcatgtctaaaccaaattgaatagtgatcttctagacaacactccccagaagggaccctccttgggaaataccactcagtgctagagtaaatctcaaatttcagtgaaggctttgtcattcacagtaaaagatgcttgcacatcttgcatgttttcttctagtattttttttatttcgttcggtattgcctacttacataatacccatgcagagctcctagaaggtcccagagcctgccatattgtttcatgacactacacatttattaaaactgtttccactatgtagatggccttttctggccagtttgcctgtcatctccctctattaggccccccagcatcaccaccaccaccctccaatctaactgataactcccttcctcaggttcccactctacctctacatttttctgtcttaataccagtaatctttacatccacttgattggtttcttgaccatctctctccaggcataaggtcttattcttactcaaatatacatttcctatatgtttgttgactatataagtgattattgaacaactacakagcatccagtctttgctaacacttggtaraactcagaaagacggagattttttttctttgttcccaatgaattgataaaccagcggggaagacagacttctctacaactagacacagcaagtcaaaaagaggggtctaggcaggtgatgaggctgagttgttagttggtgaggcagcaaacacataaaagctcaccatgttttaatgtctcttctgtgattttcataatcaaaacacacatgcttcaatcatatgtttcacattgcttactaatgtctttgcattataactcagacctgtgcttctaaacgaatgtgcacacaaatcacccagtgatcttgttaaaatgcaaattcttattcaagagttctgggaggggcctsagattctgaattcctamcaagctcccagggaatgccaatattgctgatccatgaatgcctcaagtagcaaggctccacaccattgtaatgtcaatgtaaacattgttgaaatggcaccagtttttggaaaagctcctggactccccacctaaactcttctgactgtaattaaacatgatcaacrttacaccaagagaggtagattcagcagtgcccagaaaaaaactggcaagatgccttgaaactgttacctcttggcctttgttttactatgtaaacacaaaaggtctttgctcctgcactttaggtctgctgctacaagatgaatgtagtctgaaggtgtggcaagttttatccagatattcaagattgcctttctctgctaaagtctcttccatatttaaaccataacatcccaggttctttatggaaacagaaataccttctaagaaaactctaaaactttaatctgtttaaacaatcataagaaagaatacttaagtgaattttacaaagggaaaaagaagctctgggccaggcatggtgacttatgcctgtaattccaactctttggaaggctgaggcaggagaatcacttgagcccaggagktcaagactagcctgggcaacatagggagaccctggctctacaaaaaaaataaatttaattagccgagcatacacctgtagtcctagctactcgggagcctgaagtgggaggatcacttgagcctaagagttcgaggctacagtgaaccatgatcgtgccactgcattccagcctgtgtgacagatcgagaccttatcttagaaagaaagagagagagagagagaaaagaaaagaaaaaagaaacaaaaacaaaaaacctctgtaagcatcccatgggaatctattttcttaactcttaatgattccaagacaacatctgttaactttttcaattcattagagtctaccactcaaaatgacaacatctgttaactttttcaagtcggtagagtctaccactcaaaatgaaagtcaaaatccattagaccactaatttctcatttgtgagttttgagttatctttccaccaagacaagttccctacttgagattttatcttttgtaggtcttcttcctctcttccccacatcattcttgagcactaacctagcccaaaccaagtgtcctatgtatgtcttcttccaatccggtaggtgtcacactcctcctatctgccgttcaactttgccttgctataatatgcgatttaacaggcaatcttggttacttggtctcctcttgcgtatttagtttttgcatcttttttttctaacaatgtaatggtaaaccgaacagaagtggaactcttttcactgggcacaacatatagaaggcaatggcagccatagcttgcgccatgcatagcctggagtagacaaacctaaatgaactttcttccttctcacttctcayggactcatttaggtgaatgccaaagatgacgaaggtgtcctcgttggatcctgggacaatatctrtgcctatggcgtccccccatcggcctggactggaagsgttgacattctattggaataccggagctctgagaatccagtccggtatggccaatgctgggtttttgctggtgtctttaacacatgtaagtatccaactgagtaatttctttttaatataaaggaaacttcactctaagacattttttctataacctaacaaagagacatagcagcccctgttgacactatagaatttatgggtgagccattctgggatgtagtcaatgcataattaaattgtagtgggccaaatatgctcatagtttctctttgactgcagaatctttatagaaagaatgatagactatatcctgtgtaatccatcacttaacacccraagaaatagagggttacagtaaaaatayagagaaaaaagccattttctttycagccaccacattttaaaaaaackaaaacagttaaaactaaaataataaataacaaaagatatatattgcttatttatcattgagaagttgtataaatatgcrtatttatttattattgagaattttataaatatatmcacttaatttttatcccagttatggaaggtattatagcaggtggtctcatattcrtttttccacatttctcaatgcccctgagcaattagagatcagaacataatgaacaatctttccctctccagtttcccctctggtttttaatccacccaacatccaatctgtagaggaaagcatatgagaacagaattattctcttcagtgtcaygcatcatttttcagaggcatttgcctctctagacccagacgatattacaattaattcagtgaatatttttaaaaatacatttatttcagtatgtcttcatcactggtaatgattttcattcacaagtcatttctacagccttggagaaacattaagctcaagttggggtgtcctttctgcctgctcattaataaagaatttttacctagctaacattttttaaatcaaaaacaaagggaggggttggaggctggagggaggtcatttaaaaaaatgattacaaawcctatttgttttagctcaaagtctcaacagtctaagacttggtgatctaaatttaaaamaaaaaagtcatgagttttgttttgttttattttcccatagtatcaaacaggataagattattttyttagccatttaaatataacccagggaagaaggaatacatatttcttgggagcaatgaaaatcaaaagtatagtcccctagaagcactggtctctgaagttccagatagaagccggaacttcatggtaggttaaaggttggaggtcatcccatccctcgaggctcccaaaccaagacaaggtaaaagatgcccaacagaggcaaccactcttgtgaaatgattttagaagacagaaaggacccaagttctccccatgcctacaatttcactatcccagtgtaattccttccggctcacaacaagataaaatagtgaacaccttacatcygttcgtgtctttggcataaaaaggttatccaatctatgcctgaaaacaggctttggcggtaaatcaagaaaaggcagaaacacacagtggggaagtcacaacgagagtaaacctgaagatggaaattgggggaaggaggaacaggtgccctaaagtcaagcctcactttcttgaaattatgagtaaggcagagtcttgaccaagtcgtgtctgggataatgtgaattagtgttcakccagaaacagaatgagagtggcaatcgttttattgataagaccctgggtgaacagggctgaaaatcaagaaaggaaratgggaacgggaggcccgtgrcagctgccactgttgtttggggcattaagatcargtcctttaaggaggrggacccttgaatctctaccagactccagtttggacttccaaggttgttctgttgaaggaggtgggtagtctttggttaaaaatgctaaactattctgaaggagaaaataaaaaggcaagccaagtcattaatcttaaaattgtcagctgaattattttcaatgagccctgatgtctggtgtcctgggaggcakggagggcatttggattaagtttaatcagtaggtacatatggcaagaaaggtattcagataatttgttatctattaaaaygaactaaaatgaatctgtggtgtcacccaccaatgcatgtcacaggagcaaattctggccaagacagcaaattccaccaaggacctactctgtaaattcctaacttcctattagtgggtttttaaaattgtattttcrggaacatagtcccattcatgggactaaaataatactacgttgatgatcaaacgcttagaaacgaaacaattagaaccctgttgggattctactctagttggcttcacctgacaccagctgcaattctgaaggatcacacagcaagatttctctctaccgcccccatggggttgaatgaccacccttttccagcatggaacatttgagaataacatgtccaaagggcttttcatgttgggtcaggaagaaagtcccctacaagaagggttttttcactctgtgtttattaaatgctggtgatgtgtttagctgtggtctgtcctttcctgtagttttacratgccttggaataccmgcaagaattgttaccaattatttctctgcccatgataatgatgccaatttgcaaatggacatcttccyggaagaagatgggaacgtgaattccaaactcaccaaggattcagtgtggtgagtttgattgacantggcattggctgatgtcacattatagtaatgttacacatttaccacaagatagactcaatctgatgtttctgttctattttgaggaccattcaacagcacaggcagaaaactctgattgtcaaagaatgttctagcaaatgattagwaatgttactgaagagacagtttgggttcctagtgataaaaatcaatcattccttataatagcaaccaccaaaaaaaggtcatagttttagctgctgcatatgcctatactagttcctctctacyttgatatattaatattacagttaatagcagaagtattggagccaagcrttctctgggtcagtgccctgggactaatagagctaacatttatttagtatttactatgcatcggtcttggtgtatgcatgatcttatccagttctttttagttgtatcaggtggatgttattaatatcgccatttacaaatgaggaaactgaggcccaaaaaggcttgctcacggtcatacatctgttgagctgggaataaacccaaatgcttctgaccattaaccacaaccttttaaatgacttcagcagtataggttttcttttcgaatgtaaagatgagattctccttgattatattgtcacctttcattgagatatagaaatgggagtaaagctgaaattgttccccaaaaccagctgtggggttctctcactgccctgaacagctttgttacaagctggctagagggaacttaagatcccagggaaattccatttttccttgagaccccctaagtccaaatcaatacactaagaagaaacgraaaaaatcctaagagtttaagtaggaagaatttttatcaaggtctgtgtgggaggaaattggggcataagttcctctgtggtcaggcattgagctaggtagaacttctaagccaaaaatgagtctcatgcacaaataataaagctaaaacactttctgttatacaagcatccaaatggggatggtaggaagttacaagttcattttaagcaaaactaaaagttagaagtgcctgaacttcatgttacaggaatggatcacagttgtagcagcagtattaactcaccagtaggggcacacattcattggagaatgttgaaatgaaattgctgaatgagtagcaaagtgctaccatgaattaaaaatagttcggttcattggaagggaatgagctgagccatagtaagctggagggcacgtgtaagacaaaaccttgtctctgtaaattgaacagaaatttaaagaacactttaagcctgcagaattataatatagcagccctgcatgtatatgggatgacaaaacagaccaaaatagtcaccccaaaaactcattgcaattgttaaaaatgacaaaaagatagttatttggcattctccatatctcttccttaaaaacacacagacacacacacacacacacmgacagacacacagacacacacacacagcctttgtagctaagtgcagttcaaagttatctttcccagctccttgattcaggtacctcccatcatcaaataagtccctatgaggcactcctacaaataaccccacaggccctaaacagagttaatacaaaatagcgaaggtagatcttgcccttggtaaccctgtcctcwttcaggtccctgctccaaattacttccccttttcctgacaccatttgttcctttggtgccttactcaaatatcccatcaccctgagactgttcttcctggcctgggaccctcacccaccctccactgcagaccactgcccgagactcctcttcccttcctttgcctggcttgtagtaggttttcaacgcatgatgcctgatcagatgctctgactgactgcggggctgagaccagcacaactcaggacgtgcccagaccatgaagcacagggattaaagggctcagtgggatctgaggccaagacttggctctgctactgcccaagctgtgtgactttgggcaaggcacaacctctctgtgcctcttttctcctctaaagtggagagaacaatattccctgcttcactcatcacagagccgagcataacaggtgcctaatgaacgttagctgctattattgccttcattattagtcacacagctggaatttcttagaggcaatatgtttccatcaacccaagtacatcaaagcggtcagaaaaagagggatgcccagtgtcctaagatgactgygctatttctgttactttggggtatttttaaagaaaaagcagacacttggcctcaccagtgcaaacacccatgcaccttagaagttataggtggtccaggaaaacaagagtatggctaagactctcctggattgaggaggttagtgcgggctgtccccagacagatcagccagtgcatgatcaccacagccacactcctatgtcaagctctggcttgggcagctacttgctgtgtggctttgagaaaatgacttcacctctctgagcttcattttcttcatcagtagaatgaaagtaatcttagtagttaccatttcccgatggagtgrctataatgattaaatcaggtcatccaggtagagtgcttaccatagaggtaggcctgatgctgatttaattattattggtcactggtaagaagcaggggctgcctgagcatagggctggtgaggaagggtgagggtgagggtgarggtggaggctaaacaggggctgaggtgggggtgggaatgatttgctgggcatcagctgacctctgtgaggtcagtgcggtgtagactggcgacacatggcctgatggatttcctagcaaggatctcaggagctattggcctcatacttacctccctccacaggctctggtcaaacacacccacctcaacctgtcttccccgctcctggttggtttgtggctggggcccctctcctctccaagtaaaggagacctgagaacaatctctcatcctccaccatctatttcttcttcaacactcaggtcccaatggtccacagtttgtgatgaatcagtttgtccagttaggtctcagtgactcagggtgtcctcttctccatgactcagccaaatcccagcctgccgaaaccagaaatcagccagcagggaggctcagaggaaaagtacaagagggtgtgagaggtgtattctgctcgccacactccagagccaggagtgacaagtttggctctgtctcttgctgtgacccttctcgccttactactgcagaccatcaaggacagactgcttcctggtttgccaccgtaggtcccctgcatgaaggatgtttccttccaagagggagcctcacctcaggggggctacagttttgcacagagcggccccactgttgacgccaacagaggccatggtctgagctccttagctgttcaggagagggmtggggactcaggaacctcagaagggcagagcagggcagagtaattagatcccagggtagcaaatgaaaccccaagtgggcaaatgcaaagtagcagatcccagaaggagcaatttcggccgcctgtccccagygtgctgatgagttctgaattatgtgtaacctctggggggaaggcagctatgaatcactggacagtttaatgaagacgcttgctcaatgtttagctgcagtccaaacagcaaatagaatacgagggctcagtgaggagggagtcagggctactcagaggggcagggggacagcaatggtttggcctcaccttggaagagctcagcttgatcacctcattatacaaaggtcacagtcaaaatggaaacaattttaaaagacagagacgttggcacttactaggatcaagaaagatttttcaatgaaaggcttcgctccttctaaatgaagaagcctccctgtgttcttttgctggagagagtgtggtctgataggatgattctgggtgagggttggtgtcctcctctcagcttttccccaccggaatgcacccacccacagggggagcagtgtctgatctattttatttttgttgttttgtcagcatgtaacagtrtgcagggcatagagcaagcactgaataaacagaattgcttggaaaaaatttttaatgcataaaaactccatgctgcaatgggtggtcttaatctataaacaaasctttttcaaagcacattttagagcagaaattaaccagctttcacacctgggacactgccctaatcagtgtataatcctaattctcattatgtcctcagtactcatatggtgtttyacacattgtaggtgcatttttgaaattgagattgttcttctatacattattttatttttatttttatttatttttattattatactttaagttttagggtacatgtgcacaacgtgcaggttagtaacatatgtatacatgtgccatgctggtgcgctgcacccactaactcgtcatccagcattaggtatatctcccagtgctatccctcccccctccccccaccccacaacaggccgcagagtgttatgttccccttcctgtgtccatatgttctcattgttcaattcccacctatgagtgagaatatgcggtgtttggttttttgttcttgtgatagtwtactgagaatgatgatttccaatttcatccatgtccctacaaaggacatgaactcatcattttttatggctgcatagtattccatggtgtatatgtgccacatattcttaatccagtctatcatttgtggacatttgggttggttccaagtctttgctattgtgaatagtgccgcaataaacatatgtgtgcatgtgtctttatagcagcatgatttatagtcctttgggtatataccaagtaatgggatggctgggtcaaatggtatttctggttctagatccctgaggaatcgccacactgacttccacaatggttgaactagtttacagtgccaccaatagtgtaaaagtgttcctatttctccacatcctctccagcacctgttgtttcctgactttttaatgattgccattctaactggtgtgagatggtatctcattgtggttttgttttgcatttctctgatggccagtgatggtgagcattttttcatgtgttttttggctgcataaatgtcttcttttgagaagtgcctgttcatgtcctttgcccacttttcgatggggttgtttgtttttttcttgtaaatttgtttgagttcattgtagattctggatattagccctttgtcagatgagtaggttgcgaaaattttctcccattttgtaggttgcctgttcactctgatggtagtttcttttgctgtgcagaagctcttgagtttcattagatcccatttgtcaattttggcttttgttgccattgcttttggtgttttagacatgaagtccttccccatgcctatgtcctgaatggtattgcctaggttttcttctagggtttttatggttttaggtctaatgtttaagtctttaatccatcttgaattgatttttgtataagctgtaaggaagggatccagtttcagctttctacatatggctagccagttttcccagcaccatttattaaatagggaatcctttccccattgcttgtttttctcaggtttgtcaaagatcagatagttgtagatatgcggcgttatttctgagagctctgttttgttccattgatctatatctctgttttggtaccagtaccatgctgttttggttactgtagccttgtagtatagtttgaagtcaggtagtgtgatgcctccagctttgttcttttggcttaggattgacttggcgatgcaggctctcttttggttccatatgaactttaaagtagttttttccaattctgtgaagaaagtcactggtagcttgatggggatggcattgaatctgtaaattaccttgggcagtatggccattttcacgatattgattcttgctacccatgcgcatggaatgttcttccatttgtttgtatcctcttttatttccttgagcagtggtttgtagttctccctgaagaggtccttcacatcccttgtaagttggattcctaggtattttattctctttttagcaattgtgaataggagttcactcatgatttggctctctgtctgttgttggtgtataagaatgtttgtgatttttgtacattgattttgtatcctgagactttgctgaagttgcttatcagcttaaggagcttttgggctgagacagtggggttttctagatatacaatcatgtcgtctgcaaacagggacaatttgacttcctcttttcctaattgaataccctttatttccttctcctgcctaattgccctggccagaacttccaacactatgttgaataggagtggtgagagagggcatccctgtctgtgccagttttcaaagggaatgcttccagttttggcccattcagtatgatattggctgtgggtttgtcatagatagctcttattattttgagatacgtcccatcaatacctaatttattgagagtttttagcatgaagggttgttgaattttgtcaaaggccttttctgcatctattgagataatcatgtggtttttgtctttggctctgtttatatgctggattacatttattgatttccgtatattgaaccagccttgcatcccagggatgaagcccacttgatcatggtggataagctttttgatgtgctgctggatttggtttgccagtattttattgaggatttttgcatcaatgttcatcaaggatattggtctaaaattctctttttttgttgtgtctctacccggctttggtatcaggatgatgctggcctcataaaatgagttagggaggattccctctttttctattgattggaatagtttcagaaagaatggtaccagttcctccttgtacctctggtagaattcggctgtgaatccatctggtcctggactctttttggttggtaagctattgattattgccacaatttcagatcctgttattggtctattcagagattcaacttcttcctggtttagtcttgggagagtgtatgtgtcgaggaatttatccatttcttctagattttctagtttatttgcatagaggtgtttgtagtattctctgatggtagtttgtatttctgtgggatcggtggtgatatcccctttatcattttttattgcgtctatttgattcttctctctttttttctttattagtcttgctagcggtctatcaattttgttgatcctttcaaaaaaccagctcctggattcattaattttttgaagggttttttgtgtctctatttccttcagttctgctctgattttagttatttattgccttctgctagcttttgaatgtgtttgctcttgcttttctagttcttttaattgtgatgttagggtgtcaattttggatctttcctgctttctcttgtgggcatttagtgctataaatttccctctacacactgctttgaatgcgtccctgagattctggtatgttgtgtctttgttcttgttggtttcaaagaacatctttatttctgccttcatttcgttatgtacccagtagtcattcaggagcaggttgttcagtttccacgtagttgagcggttttgagtgagattcttaatcctgagttctagtttgattgcactgtggtctgagacatagtttgttataatttctgttcttttacatttgctgaggagggcttttcttccaagtatgtggtcaattttggaataggtgtggtgtggtgctgaaaaaaatgtatattctgttgatttggggtggagagttctgtagatgtctattaggtccgcttggtgcagagctgagttcaattcctgggtatccttgttgactttctgtctcgttgatctgtctaatgttgacagtggggtgttaaagtctcccattattaatgtgtgggagtctaagtctctttgtaggtcactcaggacttgctttatgaatctgggtgctcctgtattgggtgcatatatatttaggatagttagctcttcttgttgaattgatccctttaccattatgtaatggccttctttgtctcttttgatctttgttggtttaaagtctgttttatcagagactaggattgcaacccctgcctttttttgttttccatttgcttggtagatcttcctccatccttttrttttgagcctatgtgtgtctctgcacgtgagatgggtttcctgaatacagcacactgaagggtcttgactctttatccaatttgccagtctgtgtcttttaattggagcatttagtccatttacctttaaagttaatattgtcatgtgtgaatttgatcctgtcattatgatgttagctggttattttgctcgttagttgatgcagtttcttcctagtctcgatggtctttacattttggcatgattttgcagcggctggtaccggttgttcctttccatgtttagcgcttccttcaggagctcttttagggcaggcctggtggtgacaaaatctctcagcatttgcttgtctgtaaagtattttatttctccttcacttatgaagcttagtttggctggatatgaaattcggggttgaaaattctttctttaagaatgttgaatattggcccccactctcttctggcttgtagagtttctgccgagagatccgctgttagtctgatgggcttccctttgagggtaacccgacctttctctctggctgcccttaacattttttccttcatttcaactttggtgaatctgacaattatgtgtcttggagttgctcgtctcgaggagtatctttgtggtgttctctgtatttcctgaatctgaacgttggcctgccttgctagattggggaaattctcctggatagtatcctgcagagtgttttccaacttggttccattctccccgtcactttcaggtacaccaatcagacgtagatttggtcttttcacatagtcccatatttcttggaggcttttctggtttctttttattcttttttctctaaacttcccttctcacttcatttcattcatttcatcttccatcgctgataccctttcttccagttgatcgcatcggctcctgaggcttctgcattcttcacttagttctcgagccttgcttttcagctccatcagctcctttaagcacttctctgtattggttattctagttatacattcttctaaatttttttcaaagttttcaacttctttgcctttggtttgaatgtcctcccgtagctcggagcaatttgattgtctgaagccttcttctctcagctcgtcaaagttattctccatccagctttgttcctttgctggtgaggaactgcattcctttggaggaggagaggcgctctgctttttagagtttccagtttttctgctctgttttttccccatctttgtggttttatctacttttggtctttgatgatggtgatgtacagatgggtttttggtgtggatgtcctttctgtttgtcagttttccttctaacagacaggaccctcagctgcagatctgttggagtacccggccgtgtgaggtgtcagtgtgcccctgctggggggtgcctcccagttaggctgcttgggggtcaggggtcagggacccacttgaggaggcagtctgccccttctcagatctccagctgtgtgctgggagaaccactgctctcttcaaagctgtcagacagggacatttaagtctgcagaggttactgctgtctttttgtttgtctgtgccctgcccccagaggtggagcctacagaggcaggcaggcctccttgagctgtggtgggctccacccagttcgagcttcctggccgctttgtttacctaagcaaacctgggcaatggcgggcgcccctccgccagccttgctgctgctttgctgtttgatctcagactgctgtgctagcaatcagcgagactccgtgggcataggaccctccgagccaggtgcgggatataatctcctggtgtgccgttttttaagcccgtcagaaaagcgcagtatttgggtgggagtgacccgattttccaggtgctgtctgtcacccctttctttgactcgggaagggaactccctgaccccttgcgcttcccgagtgaggcaatgcctcaccctgctttggctcgcgcatggtgcgcgcacccactaacctgcgcccactgtctggcactccctagtgagatgaacccggtacctcagatggaaatgcagaaatcacccgtcttctgtgtcactcacgctgggagctgtagactggagctgttcctattcggccatcttggctcctccccctaattattgtcacttctatacattattttagatgctgtgtatgactcatctagttggacttttatattgtaaaattatcttcaattttaatcactgtctgcaaagcagaatgatctaaaaacgaattccaagtaaaatagtagagaagaaaaattcagaatgtagaccaaattgcttaaagatgcttaagggtttgtaaaaatatcccatgatgcattgcagttgccaattctggacagttatcagagatkcttattttcaaacattttcttgttaaccatatttctggccaagttggttttaggaaaatcacctggagttagaccatgagccttagcattagaggactgagaatatacactgaaggyacacaatagtgttggaaaaaacattatttgccaccttcaaagaataagagtagctcatgttcacaaaaatacttttttttgcaatgccctgatttaagtgctgacatgtaytaatttacttctacctcttaacagcatgttaaggtaattactgttagtggcacggtaacttaaccaaggtyccagccaataagtggcagaacctgaattacaaacccaagggggctgaccccagagcccactctttttaaaatgacatccttattgactgggcgtggtggctcacacctataatcccwgcactttgggaggccgatgcaggagkatcacttgagatcaggagtttgagaacagcctgaccaacacggtgataacctgtctctactaaaaatasaaaaaaattagctgggcgtggtggtgcatgcctgtaatcccygctacttgggaggctgaggcaggagaatcacttgaacctgggagacagaggttgcagtaagccaagatcatgccactgtattcctctagcctgggtgacagagtgagacttggtctcaaaaataaataaataaaaataattaacatccttattaaaatatgcttcacggcctggygaggtggctcacacctgtaatcccagcaatttaggaggctgaggcaggtggatcacaaggtcaggagatcaagaccatcctggctaacacagtaaaaatcccgtctctactaaaaatacagaaaaattagccaggcattgcaggctaactgtggcaggtgcctgtagtcccacattgcaggctaactgtggcaggtgcctgtagtcccagctactctggaggctgaggcaggagaatggcatgaacctgggaggtggagctttcagtgagccgagatcgtgccactgcacttcagcctgggcgacagagcaagactgcctctaaaaaaaaaaaagaaatatatatatatatatatatatatcacatgctacaaaatttacaaaattcactcctttaaagtaaagtacacaattcaataatttttagtatatttttatttatgtattattattattattttgagacaggttgtctctcacccaagctggattgcaatggcaagatcatgactcactgcagccttgacctcccaggctcaagcaatcttcccatctcagcttccctagtagctgggactacaggcacacccaccacacctggctaatttttaattttttttttttgtagagacaagatctcactatgttgcccaggctgctcttgaactcctggcctcaagagattctcctgcctcagcctcccagagtgctgggattacaggcatgagccacggcactaggccatttttagtatatttgtggtcttgtataaccatcattatcatcagattccagaacattttctctcccctctgccatacctattagcagtcactccccatttctccaactctggcaacctcgaatctactttctctctctatggatttgccagttctgatcatttcctataagtggagtcatgtaatatgtgaccttttgtgtctggcttccttcacttagcgtaacgtgttcaaggttcgtccgtgttgtagcatgtatcagtacctcattccctttcattgatgaatgatatttcattgtgtggataaaccaggttttatttatccattcatcagttgtacatttgggttgtttccatttttggctttcatgaataatgttgtwatgaacattcaggtaaaagtttttatgtgaacatatgttttttatttctcatgggcatatatttagagtggaatttctgggttgtatggtaactctatgtttaatttcttttgatgaagtgccaaactgttttccaaagcagctactccattctgtattcccactagcaatacacaaaagttccaacttcatattcttgcaaataacttttattttctgttttttttttttttttaattattattgtagccatcctaatgggtgtgaagtggtatttcatggtgggattaattttcatttctctaatgaccaatgacgttgaacatctttttgtgtttttcttggccctgtgtatatcttctttggcaaaatggttattcatatttttgtcccattttaaaattgacctacttttgtattgttgaattgtaactattctttatatgttctgcatataagctctctatcatatatgtgatttgtaaatattttctaccatccatgggctctcttttcactttcttaatggtgttctttgaagcactaaagaaattaatttttataaaatccaactttttaattatttctttggatgcttatacatttggtgtcatatctaagaaaccataacttgatccaaggtcacaaagatttgctcctctgttttgttctaagtgttttacaatcatagatcttacatctaggtctgggattcattttgagttaactttttatgtatgtatgaagtataaatagaaatggagaagagagaaaaataagagagcgaataagagagaaaactaaaatcatcttattgattatctcttgtacatggtaaattatttttttaatgttgtcttaaagattctttgtttcactcaggtctgagatttgaaaaagaaaaaaagtaaaaaagagattctctatttgtcttcagcttttgacagtttgaatatgatgtgtctaagtgtagatatcttaagtttatcctacttggagtttttgaactttttcaatgtacataataatatctttcattgaatttgggaaatttttggctatcgtttcttcaaatattctttctgctacttgctctctttcctcttcttctgggactcccattaggaaaatgttaatatacttcatcaactgcataagtaacatctcacctgtttctggggctttgattttgttttagttttttgcttctgttattcaaattggataatttcaattggcctaccttcaagttcattgattcttctttctgcctgcttaactctactgttgaaactagtgaatttttcattttggttattgtacttttcagttccagaatttctatttggttccttttcataatttctatcttttcattcgtattctctatttgatgagatataattctcatggtttcccttcagttctttgaacatatttataatggctaatttaagatctttgtcttgtaagtccaatgtcttagctttcttaataccaatttctcttggctgcttcctgtgtatgggctatacttttctgatcctttctgtgtcttataatttttgttgaaaactgaacatttaaaataatataatgtggcaattcttaaaatcagatttcctgttctctagcacctattgttgatgtttgctgttgttgttgtttttgctgctgctgctcgtttatttagtgaccttcttggactaattctatgaagtctgtttttcttgtcatgtatggccactgaagtgagctgagttagcttagtggtcatataacaattggacagagatttccttaaataccttgggccaaaagctccccagctttagccaagtagcgttgtgtgtgtgttggggaaagtctttaattaacccgcaggcagtttaaaattcttcattagccttcacttcctgtgtggacagagcctcaagatcaaccagagatgagagatgaggaccttcctggggcttttcttttgggcatgctcacagccctgcacatgtttgtggctatctatgtcagagtttttcaaagcctcctatggacatcttattccctgttttttctttcaaagtgttttggatagcccttttttagtctcaagtggtattgccccttcaggcattatgatgttaaacatttgcttctattttatttttatacattatatgaatagggctgattcagaatgagctgtgaatcagatcaaataaaaacaagccctgagaatggagcttttcagagagctgccaggcaagttaagcagtggcaatttggagagaaagagctttcggagtgttcaaaactcattttctctccttcattggtttctaggctgcaagtttgcaaagctactgaggctactggtttttaagactactgtggaggtggggtgagaataaggcaaattaaaactccacaaagtcactcttcttactgagatttatgtttgtttgtttttttccttgaataaatgcccctcagattgttgtttgcttcacttccagagttctggaaaggtcagctgtgatcatatttgcaagtgttctcattgctctatggaggagcagatttccagtagtccttactctgccactctggaggtgtttcccagagcccactcttaaccactacacaagtgcttcctaccacactgctaaggtgctttacattttgtaagaatatttttggcatctagtagagtcttcctgacatatatctgctgaaacacatattattgtatgtatatccttttatttctccatttctcccatacattacggggcatgatattgatcttttagaaaattatgtatgtagaaagccatctatggatttagtttcagcctaatgaaggaatgtaaaaaatatttgcttaaaaacaagaagggggcattgctctttgaaggttggaaatcactgccctacactctcctcccgttcctctcaggtacccatccattcctgctgctggaatgtctccaaagagcgcctgaagccctcattccactcaagtctcacttgagagtaaaccaaggggagtttgggggtaaaatgtcagaggtcattgtaataacttcttgggaaattaggcagaaagggaaaaaaagtgggaatcatttaataaaccacatagaaaacactccatatggcaatggaatcatgttctggttaatcataatttttgcctacaagagtcatcatatataccgttagaaggttactagttttaaagtaattagaaactaataaagtatgcaccgcctaggctatactgaatgtaatgtaattccttttggtaattaataatacctctaggaacacgttacaaaaataagagccatcagctgtagaatatcatattcataaatagtttataatgcaaaacagtaactttggtacctactgggtctattggttggaattcttttaacccttttcaataattatggagacacttgtccagaatttattatataaacttttttatacattagacttttacaaacaaatgctctcaaaattcaatattttcttcatgttcagtcaggatattaattcctagcttgctatgccagagtggtaaaagggggtagggcttcattttcaaaatgaacccagcaragggaacccagaagtgctcagaaagggctttctgctaactaatgatggcaaacgtggtctgtgtgatggggtggcatctactttctgaaaatttttaattttaatttttgttgttttcgttttgttttgttttataacttgtgttttatttttgccaaatttggtttcattccctgcctgttccatttggaggtactacactaaaaaaaaaataataaaacacgtaatcacaccatggggaaaaatgaaaggagaagaaaaaaagaaagctggataatcagcccctaattttctaaaaattgctattaacaaagctgctktacaattctcttgataaatatccaagaaatctgttcttggaagcttaagaagagagtggaaaggctgtactctcaggactaaggaaggactcactccctaaagactttgtggatggaaatttgttcagtactcctgtagtgtgtatgtgagtgaggacatctggactggtatctagccaggatgccctggtagaactgcatttagcgttgatgtcctttccgatgggttgcaacatccatttggttcatgcctgtgtctgagcacttattaatggttttgactatcactcctactacacatacacctcatagtttaatggtggaagctacagcacctgtccaagtgcacccygccatctgcaaccccctccattgaggtctcttgtgctatatcagactgtatttacacgtgacttctcagtgagacttgcaaaaccccttgccttcacaggacaagtaagaataaacacattcatttcttcttttttcttggcggtcagttgattcctacaacagcatcctttactgagctgggatgcccatggcgccctccatttatctcccatatagcattgctatgcaaatgaggccattcatgactggctacccagggcttccccaggtggctcccagccagagggatctgaagcagctgagcctcagagaggacaggggccctggcctagtctccacctgactggactgctggcctttgacatgacgccagttaacatccaaatgccccttgctggtttcagcactccaacaggctcaaacaatgaatagctgtattctgaaatagtgtcatgctcgcagctccatcaaagattcctgcagcatgcctctttcctctgaataattcctttctgtcatcttccttcattatatttcctaacaagtttttttctaagtccaggctttcatttccactttgaaatgtcttgttagacaagcctcagagtccaccaaattgttcccacttctttccaacaactcccaccccatcctatccccactgcccctgaaatggccagagcttaataatccaggatgtcctgtcattattgtcaacaatattgttgtctgtattcggaatgtattagcagaaccagagaggtagggctacacccatctgctacaaatacacaaatgatttgcaagatagacagtgcctttctttcaccccctgccagttttgctatgaaagaattcaaacccttggtttacagttgaagttggtccaagacatctcctccagggctttctcttgatcttatttgtgctctcccctgagccctaataaagctgcacaaacaaaattacaagcccatatctctttcttcccttttaagaactccttttctctgaaacatttctggacagatagattgtaaatgagatgaccctgtggactgtttaagcagttagttagccaagttaaggtcagtaaaggactccttgtttaaattaaccactttattttcttcaaacacatagcaccctgaagcccatgttggtctcagctgtgttctctgtccagctcttcaccaccccataggctcctatacctctggatatgaccttagccagaaccaagacagattttgaactactgtgctctactgggttttggtaaaataaatacataaataaataaatagtcctcagtgtttcggagggaacctaatacatgtttattatgcagtattttaaatgttgcagaaaaaataccaaagtaagaagtatcyattttctaactactcagaacatctgtaacatttccttaacccttctgtaatatgtctctttgtgtgtcgtatgcatgtttttaatgctgcataccaaagtaccaaagtaccacaacgtaacagcttaaaaaaacacaacttatcatcagacaattcctgtgggtcaggagtttggtcactggttgactgggtctctctgctcagggtctcagataactgcaatcgatcagtgttggctgggactgttgtcccatctaatgctcagagtcctcttccaaattcattgaggttcttgaaagaattcagttccttgcagctgtagaactcatagatgcttctatcttctttgaagccagcaggagaatgtctctgctgctttgaatccctgacttgctctgtctctgatctctagacccagacttaaaaggctcatctgatgaggccagacccacctgataatctaccttttaattaactcaaagtcaacagattagtaaacttaattacttctgcaaaatcctccttgacacataaagcaacatagtcacaggagtactagcctgttctgtttatagatttcacctacactcaggggagaaaattatacaaaattatgcaaaaggtagtgggagtcatttaaaattctgctctgcatgtgattttgaaacactaatatgccatggatgtctttcytgcctagtcaatatagatctgcatttttatggctgaatagcattctattctgtttcaaaatacttgatcacatgttggacagttaggctgcttccatgcttccactttccctttcttacaccatgatgaacattcttacataacacacttgtctttgcatttgtatgattatttcccgtgtacaaattcaaagcacatggatttactgaatcacaacataaactatgacgtcccatgtagggtcccccagcaggggatggtgctgctgttctagtgaagtactgcctttggtgaaggttctctgagtcctttgtaccaatactgctgaattattagcatccttgaaaggagttctaaaaattactagctgtcactgcacggaacacacaggaagaaacataaagcagagatgtgttcttcacttgtcatctccatcgttatcctcccaaaggttgttctcatcttgattaaacaagtctcaatgaaatgaggcctttattttgatttctatactgcttctatagaaagaggcaacaaggagatttagaatttttttactttaaagggacacggtaccttttgactgtatagtgagaacttaagtttcaaatgaaggctccgagaacataaaaaaccatgaatcttaaagagaaacaaacaagcaaargtttaataagaacttccttgctagatgtcctcatgatttatttagccaacacttactgagcacctcctaatgactgggccctgctctagtgctggagatgtgtagaagaataagaccaacagagctcccaaagkagatttatgcactctacaaatgcatgatggaattgcaagatgaaaacagaaaaactcttatggatctagataaagaagctttagaataaaaagtagcatttcaggaatcagttggtattttccaacctggagaatcagtagatgaaattaggaaaagtctgtacggaaggaataagtgtttgagatcaaatatacaacatgttgkctatagttaattatactatactatatatttcaaaattgccaggagagtaaatttcaaatgtttgcaccacaaaaataaatatgggaggtaakcgatatgttattaacttaattatcctgcaatgtgatttgattttatatatatatgtaaaatcatcactttgtaccctataatatatacaattatacaattattatgtgtctatttaaaaaattaaagatatgctaaaggaagttttccaacacaaagggaaatgacactactgtatattgaaaattagatcctctgacacgtatgaattgcagcaaaaatgctaaatatctgagaaaaatgctcacgcctgtaatcccagcactttaaaagactggggcaggaggatggcttgaggccaggagttcaataccagcctgggcaacatgagaccctgtctcaagaaaacaaaacaaaacaaaacaaaaaacaggaaaataaatgtctgtaaacattagcctctttcatggaggaacttgggatataaaaaactgagcatgcttaaatagaattgtgtaatgtcagccaaatggaaactcttgaggcacgggtggcttaggacacaattcccctagtcattcctgagtagagaggattgcatggtgaaagagatccccatggctgtggaggtagcaccctctcgttctcttcatgggctgtctgggagctgagccattagctttccacccattgatggaggcccagccctactgggagcatttgcttcctccccacctcacccactgcctgcaagttcctgaccctgttatgaaactcccaccctaaatacacagataacgtctcagccatgagtgaaactagaagagatcatgtgtaactaattagatgtcagagtgagagaaaagaaacttttccccgggtcctggtcatttgaaaagaaatattatcctcaaagaaaagtctttacttgagatctgaagtgcaaagcatatttatcttgttccaggctaaccttgccaaggatatttgaatttaaataaggctattctggagcctattaatctagggtgatggtgtagcagtgaaagccagggggtcactaaacacttcgggtcgtataggaagcaggacggcgtccattcagggttgcaaatgttttattgctgtttttccctgggtccttctgcctgatggggcaaccttcactgctctggagagaggctagcagagtcattgtctaacatacacagtgacctcccttccagcttccaagcaaagatggaggctctcaggtgggaactgacctcatgttcctgctcagagacctccacaccttcaccctaatccacatctgtacccttctctccctgcagaccctgccttgcttcccacatctgtccagggtgttgctctcagcctcatcctcttgcaaccttggtatttcagctcccttttatattcccactgtctctaccttcctccattcctccatgaacatgcctcagtctcttttaatttgaaaataaccgaaacagacttccctgcattgcattacatgctagcccctgccctatcttttcttctgtcttacaacctagatcacttttttttttttttttttagacagggtytcactctgtcttccaggatggagtgcagtggtgcaatcatggctcactgcagccttgatctcccgggctcaagtgatcctcccactcagcccctcaagtagctgagactacaggtcagctaacttctttaactttaatagagacagggtttcgccatgttgcccaggatggcctcaaactcctgggctcaagcagttctcctgcctcggcctcctaaaatgctgggattactggtgtgagccactgtagccagcctctaagtcactcttaaggaagaagctacctctttcttccctcctcattcatttgtcagctggctttgcccagccctcctccaccacccaccaatactcccgcaacctcctcctccgcttcatccaatccagagcatcacaagtgtagacaaaaatgcctcttaggcctcacctcctgggtttcccacaggcactcaagctcatcctgcccagaattgggctggtcatccacccatcaccaccagtcccaacacagactttcttctcttccttttttattcacagtcttggtaaacaaaaccatcatactacttggacaggcaaaagtcttccccaactcatccgagtccctcacatctccctaaacctgtgggttgtatccccaatggcttctctccctctccatggtgctggccacctgaatgcctttctggtccactattgcagttcttcaggggtgggggacagccggggaggactcagctcaatctccagccttgcctctccatccatcttccacgaacagagatttgcaaatttagatcttcttcttaaattattccaatggctttttatagcctaagaataaagcatgaatgtttartttgatatcaaaggatttcacaatcttatcctyacctatatcataggtcagtgttgaagagtgtggatttcagagctctatcactaactagctgtgacctcagcaaggttcttaaccttcctgggtttcagcttcctcccctgtaaactgggggtaattataatagtactgttctttttttttttttctgagatggagtctcgctctgtcgaccaggctggagtgcggtggggtgatctcagctcactactgcaagctccgcctcccgggttcacgccattctcctgcctcagcctcccgagtagctgggactacaggtgcccgccaccacgcccagctaatttttttgtatttttagtagagacggggtttcaccgtgttaaccaggatggtctcgatctcctgacctcgtgatctgcccgcctcggcctcccaaagtgctgggattacaggcgtgagccactgcgcccgaccaatagtactgttcttatagggtgctagggacatcagatgtgttaacatccatgagggttttagaacaccacttcgcactaaggaagtgttatatgtatttgttagtttcgtgcattgcctgccatcaccgttctcctatgaacctgaatgttcaaacacgctatgctccagccacaacacacagcagacagttccacaaacaaaccatgatggctatttcatgccgctgtaactttgttcttcctccttttcttgacctcctaaattcccatttatctttcgagcctcagctcaaacatcacttcccaaatacctggagactttgctccactgagactccatggcaccccaaatcaacacccgttttaccagggatcatttaaattaattatttttcaaagcctgagagttaccatttttgagcacttaacacatgccagtctgtgttcgaaatacatgtattagcttatttaagtctcacagcaaacctatgacagttttgataattggtttacaggtttgtcatttctcctagaagattaccctttatgggtaagaatctatgttttgatcatctctgagtctccagcacctaccaaggtgcctggtgtgtagtgggtacatagtgaaattaatatctcttgaaccaatcaaaaatgggctgcactcagagaaagatgggagcatgggcaaacagctgacatygaagggcgtctaggcacggaacccgtggtagttgaacctgaaattcatcagtgtcataaacaaagactgctgtaactacctcaccacattattaaayctttctttattactatatgaacattttctatagtgctgaggggttaatgtgctctcatttgattctgtactgtcatataatttcaggtcttttcaaggacataataatacaattcatgatggcattttattccatgctcttgcttccagggtcatattcaaatttctgagaagttttccatgacccttagcacttttaataaagggtaaagagagattcaccctgacaacgtattcttcttgttggacacgagatggaaattgtagagaattatagtcaggcataattgttgtagtttctacagtaatagtctaagaccacaaacacaagtattttttgcttaattgctacaaaggaatatgctttttctaaataggaactatattaaaaagttcaaaataaatatttcagttttggttaacttttcttccccaccctgtcggyacctagtaagttctgtttcgttagtsagcagaaaatggttaagattaaaactgttcaatgcactgattcaaatatctttgggtggccttgaagctgctcttagcagagggaaagagacatccagccatktgagtgtcctgagggatgccaatgagaatsaatctgcccagaaaacccaagtctagagccccaggatatctccaggagccctcagatttggcttaatccattctaataatctgtagatagcatatgcacaggatttggggtcacttttttttttttttgagatggagtctccctctgtcaccaggctgaagtgcagtggcacaatctcagctcactgtaacctccatatcccagattcaagcgattctcctgcctcagcctcccaagtagctggractacaggcacccgccaccacacccagctaatttttgtatttttagtagagacagggtttcatcatgttggcaaggctggtcttgatgtcttgaccttgtgactcacctgccttggcctcccaaattgctgggattacaggcatgagccactgtgcctggccgtcacttcttgatctcttggagcattgggtgtgatgggaagtttaacctttctgggcttgtgttttctaaggaactaccactgctggaatgaagcatggatgacaaggcctgaccttcctgttggatttggaggctggcaagctgtggacagcacccccyaggaaaatagcgatggtaaaactgtgtcctccctctgggaacttgcttcattgctgatytttgttttgcttttatgcttgcatttgatgtgtgggaaccacgcccattgggaggcaacatctgaagtgtgcttcctgggcacatgtacagtattagctaccttccaatcaggtttaatttcatttccattgtcagctttaccctgattattttacagattttagagaaagaatataaaacaacgtataattcatccattcttgctttgctaagcagttttgaagacaggagagaaaatatctgtaagcatttttactaggctataaaatatacttcagccctttgtggtatgcactggtaagatataaggcaggagagaaaatagagaactcgaaaaataattatagatcatcctttaaattgtttttccagaacctrgcctccttttatgtcatgtgatttcctccaaagcttcagtatgtgggtatttgtcttctaacttgccaactatgctaagcagctgcagctctgacctcccccagatttttataaaatcacatcataagcctccatctctctttaatatgataatataaagaatcagtagactgtggatattatgtttatttcctcaggtgttgatatatcgatgggcacacacaggaacatgcataaacattcaatggatattcatactgaaaccatattataatcctaggctttaaggaagaaagtttagcactttctggtgttctggtatatatatcatggggacattttacaggtgactaatagcagctaatctcttattaactatatagataggtggttaaaatttaaagcattttagaagagtaacataggccytctgacttcctaaatgcatggtgggcatggccaaaatgcacaggcaatgtccaaattctccagttaaacttgacatatgttcataatgtccaaaaacaaaagacaaaaagcaaaacaaacagcaacagcagcacaaccacagagcacacatcaacatttccaacatttcagataccacctgaacaagagataaatgctgtgtaagccacctgcttggcatcaacacatctgggtatgtgtctgtaggtggcagagtagatgcaggaatagtgttgccttgtatttatttccatggcttcaatttttggcttgagggggcatagccaatggaattctcttcagccttggaaagcatctgggctaaatcagcaatgaagttgggaacactggtctttacagagtcaccctcagtgccatgaatcttgcagtatctggacagaattggagatgacaaactcacayygcccttcctctgtgcaatgcaggcatgtatcrgtgtggccccgcctcggttcaagccatcaagcacrgccatgtctgcttccaatttgatgcaccttttgtttttgcagaggtaagcaggaagctggaggaaagtgctgtttttytccccaacctcttaacacatgaaagagtaagctaaaagttgttgtttctaagttttccaggtacatagcrtatgcttcgtgttgacaaaggtaactaggcattattccaacttccaggctattaatgctaaatgcagttcttgtttaacrtttttctttccttgatgttttgggattccctactcccaaaagtaaatgctttactaacattagcttagttctctgcacccattaagtatcaactgctccagagaaattatatgactaatggatctctcaactaacctcattggaagagatgggtcatgaattgaaatttcaggacatgccacttccctctgggactagtccagcaatccaggtaagacaaaatccacatacacacacccaaccatggtcttaccctggcctttgcaatctatgtcctgccatcccacaccatcacctgtggccagggagggagggttgagttgccaaaggaggaaggggagcctggaggctactctaagagaggaatacagcccacctacagggttgatgggaatgcctgggcaaaggctctgccatttcagaagaactaggcagggactggaagcagaacaggctgttaaaggatactcaaggagagctctgaaaatcaaattaaatgtaagagatgttgggtaaacgagaaggctgggctgccggcctaggaagacttgaaagactgagaggcaggacttccccagggtatatttgcaccagtaaatacactgaaataatgtctttcactttgcctaccattggatgctcttagcaaccttctaaaattgataattcttcccattttacagaaaataaaatcgaggcaaagagtgattaagtgactttctcacaaccatctagctaataaatagcagtgctaagatttgaagccaggcagatacctgaatgcayactggtaaccattgcactctagtactccaggaggaacaaatagttattattaatgtacaccaggcattgtactggggggaattctaaggttcragtctttaagaaacgtatttctagatgccaggtgacagggcacaaacacactgaacatgaaataacaacaatacttgtcaggtgggccatgtagagagcacagatctgcattcatatgatgcatgagttgggaagtagaggccaagaactgaagcaggatggcaaagaccacaagacaccatctaggaaggaagggcgacctgggaacagacagtgaggatgcctgtggaagtgtccccaggtagtaagagcagagaactgtgggaccacatgggaaggagggatgattaggcaaaatgattagaaagaagccagaggaagggaggagtgcaaagcagggggatgagttgagcatctgaaagctttgtgggggcagttgaaagctgtgcagactcactagaacgccaaggatgcatcaggggtgttggaaggtggaggctgaaggaacgcagtgcagaggacctccctgagagacttgctccttgtccctcctgtaagtgagggagagttttcactgggtgggaacttgggcaaggtgctgacagccttgtggaacacggattggaggggttgttatgaagttgtggggaacatctagagggctggtcatccctccaagccagagatggaaagggcatgagctagacaaatggcaataatgaggaaaagaggaggcaggactgagaaatgttaatatttagaaagcaaaacgaacatcaaaattcagacagcaagatcaggaatttgaaacacacaaaagaccagtgttcatctcatcgtacctgcygtggcagtttacagaagcctttggagaccaagcttactggacttggaattttatcccctcgttttcactttgggatttgaagatttccacaaacctcccagctgtcatttgatagtttatgatgctacgagagcccctaatgaggagatcactctgaaatccacaaagccttgttttcagctttttattacactttattgctgcaaagaaggagaagraggacctccctccacaagcaagctgcctaatagctgtaaatgcaaacactttttgctattattaaatatagatcggggtgttatgaatgtcatcaggatttgcagattataattactcctttctcacccactgcagaggcgtgtctgacagagggtacaatttgttgctttggcatgggctgcgctccaggggctgagccattttkaagagatgtttgagttgatgaaaagtgtatgaggaatcttttctcaagggtgcctgcagtgggaccccatggggagtgtcatatgagtcgatatgactcaggttcgagtctgtggctctctctgctctccctcgtccttgctgcatcagctcgccttctcttccctcccagcatgctgactttcttggtcattccttactcatttccaggcttgatcaagcatcatgttcattgactgttttttagtgttcccagggccttagtctccatgagtgaaagcagagcctaaaaagaagaggggtatgcctggaaaatgtcttaccttctgttccttttttctctcctcctccactttggaagttcaccctccacatttctgggtttctgccagggcttgaagcttatttctcttacccctcccttcccatgtcctccctgctgcagtgggttcctgtggatctgaagccccatctgcctatctccccagcttatggtggcctagggcttccaaataggtgagaggagatgagagctgttctaagcgtctggagtcgtattccaagattccatgttcacgaagccctcaggggttcttagtgaagaactctctccttcttgccaaagataactctcttctgtcctaacttctcattaactctgctgccctctttcacaccactccaccccaaactcactcacatacacacacacatgcatgcacacactcctgcctgccctcactggcgctgagatgattttgacaggagcaataactggctccctgggaccacagcaaccatctcatcactcaagaagctaagccctcctctgctgtgggccagcagttctcttatacaacgtgtggagatgttttcctgtagattattcattctcaattcaaacttatttattttgctactatcttatcagatgcagcctatttttttggcatctcctacttggctataaaataatccagtcatttattcaaatagcatacaaaactytggaattattttagctttccttcttaacctcccttatgcatcttgccaaaaataccttcccaaaattatcataaatccagccacttctacaatctctatcgttaccctctgagctctgtacaacactgagctccataaagttacctcctaactcctcctaactcatctccctgatccccctcttgctccttttctgtctattccccacagagcaagagaattattctttaaatgtaaatacaaacatcacactcctgccccaacccttctggtggagttccaccacccttacaataaaactgaacataaattcctacaagattccatggcttcccttccacttcatcccttgtttatttccctccagccatactgagatttttctcttcrgaaagcatccacacatcctcttgtgtcagcacttttagacatactgctccttttgctaggaaagctcccctcactatctttcactctgtgtaggaagaatgctttgcatgctttgttccctctctgcattcaagtctctgctctggtcacctcttcaaagaggccttcgctcacccaactscacctaaaatatcaccatctgccctgttgttttcatcctccaaccttagtgtgtactccatttctcccttctagaatatgagctccatgaaggtagaagctcttgtaaccgcattgctgagagcaggatctagggtccagtgccaggaaggcattcactgcctccatatgccctctgagaagcagcattttctctgcagagcctgcagacaaggttatctccacttggaaacaaataaacaaaccaaagcaaactctgtccagggtcctgaaagcaagagcacgtctctagcctcagtggtgaagagcatatcttctgccacctgtggacaaatgttcacattctatgggcccaggtggacatttgcagagagcagcccccaagcctgctttccaccccacctttactgagaagctagggccctgaccaatggtagaggctactatgtaggaagtgcctgtacttaagaggcaagggtgtggtgttgtgaaaaaaatatccaatttcatgcaccaatgcccagattttgtgtgatgataacccttcaagtgtagggatagaaaaaggggatcactaacattacattcaaaagaaggaagaaaaattagccgtaaatgtagggctttcacaagtagtaccaatctatccaccagcccgacaaggaaggtaggctcagagagattcagtaactcggagggaggagccaagatggctgaataggaacagctccagtctacagctcccagcatgagtgacgcagaagactggtgatttctgcatttccatctgaggtaccgggttcatctcactagggagtgccagacagtgggcacaggtcagtgggtgcrcgcaccgtgcgcgagccaaagcagggtgaggcattgcctcactcgggaagcacaaggggtcagggagttccctttcctagtcaaagaaaggggtgacggatggcacctggaaaatcgggtcactcacacccraatactgcgcttttccgacgggcttaaaaaacggcgcaccacgagattatatcccgcacctggctcggagggtcctacgcccacggagtctcgctgattgctagcacagcagtctgagatcaaactgcaaggcggcagcgaggctgggggaggggcgcccaccattgcccaggcttgcttaggtaaacaaagcagccaggaagctcgaactgggtggagcccaccacagctcaaggaggcctgcctgcctctgtaggctccacctctgggggcagggcacagacaaacaaaaagacagcagtaacctctgcagacttaaatgtccctgtctgacagctttgaagagagcactggttctcccagcatgcagctggagatctgagaaggggcagactgcctcctcaagtgggtccctgacccctgacccccgagcagcctaactgggaggcaccccccagcaggggmacactgacacctyacacrgcagggtatwccaacagacctgcagctgagggtcctgtctgttagaaggaaaactaacaaacagaaaggacatccacaccaaaaacccatctgtacatcaccatcatcaaagaccaaaagtagataaaaccacaaggatggggaaaaaacagagcagaaaaactggaaactctagaaagaagagcgcctctcctcctccaaaggaacgcagttcctcaccagcaaaggaacaaagctggayggagaacgactttgacgagctgagagamgaaggcttcagacgatcaaattactctgagctacgggaggacattcaaaccaaaggcaaagaagttgaaaactttgaaaaaaatttagaagaatgtataactagaataaccaatacagagaagtgcttaaaggagctgatggagctgaaaagcaaggctcaagacctacgtgaagaatgcagaagcctcaggagccgatgcgatcaactggaagaaagggtatcagcgatggaaaatgaaatgaawgmaatgaagcaagatgggaagtttagagaaaaaagaataaaaagaaaccagaaaagcctccaagaaatatgggactatgtgaaaagaccaaatctacgtctcactggtgtacctgaaagtgatggggagaatggaaccaagttggaaaacactctgcaggatattatccaggagaacttccccaatctagcaaggcaggccaacattcagattcaggaaatacagagaacgccacaaagatactcctcgagaagagcaactccaagacacataattgtcagattcaccaaagttgaaatgaaggaaaaaatgttaagggcagccagagagaaaggtcgggttaccctgaaagggaagcccatcagactaacagcggatctctcggcagaaactctacaagccagaagagagtgggggccaatattcaacattcttaaagaaaagaattttcaacccagaatttcatatycagccaaactaagcttcataagtgaaggagaaataaaatactttayagacaagcaaatgctgagagattttgtcaccaccaggcctgccctaaaagagctcctgaaggaagcgctaaacatggaaaggaacaaccggtaccagccgctgcaaaatcatgccaaaatgtaaagaccatcgagactaggaagaaactgcatcaactaacgagcaaaataaccagctaacatcataatgacaggatcaaattcacacatgacaatattaactttaaaggtaaatggactaaatgctccaattaaaagacacagactggcaaattggataaagagtcaagacccttcagtgtgctgtattcaggaaacccatctcacatgcagagacacacataggctcaaaataaaaggatggaggaagatctaccaagcaaatggaaaacaaaaaaaggcaggggttgcaatcctagtctctgataaaacagactttaaaccaacaaagatcaaaagagacaaagaaggccattacataatggtaaagggatcaattcaacaagaagagctaactatcctaaatatatatgcacccaatacaggagcacccagattcataaagcaagttcttagagacctacaaagagacttagattcccacacattaataatgggagactttaacaccccactgtcaacattagacagatcaacgagacagaaagtcaacaaggatacccaggaattgaactcagctctgcaccaagcggacctaatagacatctacagaactctccaccccaaatcaacagaatatacatttttttcagcaccacaccacacctattccaaaattgaccacatacttggaagtaaagctctcctcagcaaatgtaaaagaacacaaattataacaaactatctctcagaccacagtgcaatcaaactagaactcaggattaagaatctcactcaaaaccgctcaactacgtggaaactgaacaacctgctcctgaatgactactgggtacataacgaaatgaaggcagaaataaagatgttctttgaaaccaacgagaacaaagacacaacataccagaatctctgggacacattcaaagcagtgtgtagagggaaatttatagcactaaatgcccacaagagaaagcaggaaagatccaaaattgacaccctaacatcacaattaaaagaactagaaaagcaagagcaaacacattcaaaagctagcagaaggcaagaaataactaaaatcagagcagaactgaaggaatacagacacaaaaaacccttcaaaaaattagtgaatccaggagctggttttttgaaagaatcaacaaaactgatagaccgcaagcaagaccaataaagaaaaaaagagagaagaatcaaatagacacaataaaaaatgataaaggggatatcaccaccgatcccacagaaatacaaagtaccatcagagagtactacaaacacctctatgcaaataaactagaaaatatagaagaaatggataaattcctcgacacatacactctcccaagactaaaccaggaagaagttgaatctctgaatagaccaataacaggatctgaaattgtggcaataatcaatagcttaccaaccaaaaagagtccaggaccagatggattcacagccgaattctaccagaggtacaaggaggaactggtaccattccttctgaaactattccaatcaatagaaaaagagggaatcctccctaactcattttatgaggccagcatcattctgataccaaagccaggcagagacacaacaaaaaaaagagaattttagaccaatatccttgatgaacattgatgcaaaaatcctcaataaaatactggcaaaccaaatccagcagcacatcaaaaagcttattcaccatgatcaagtgggcttcatccctgggatgcaaggctggttcaatatacgcaaatcaataaatgtaatccagcatataaacagagccaaagacaaaaaccacatgattatctcaatagatgcagaaaaagcctttgacaaaattcaacaacccttcatgctaaaaactctcaataaattaggtattgatgggacgtatttcaaaataataagagctatctatgacaaacccacagccaatatcatactgaatgggcaaaaactggaagcattccctttgaaaactggcacaagacagggatgccctctctcaccactcctattcaacatagtgttggaaattctggccagggcaattaggcagaaggaaataaagggtattcaattaggaaaagaggaagtgaaattgtccctgtttgcagatgacatgattgtatatctagaaaaccccattgtctcagcccaaaagctccttaagctgataagcaacttcagcaaagtctcaggatacaaaatcaatgtacaaaaatcacaarcattcttatacaccaacaacagacaaacagagagccaaatcatgagtgaactccyattcacaattgcttcaaagagaataaaatacctaggaatccaacttacaagggatgtgaaggacctcttcaaggagaactacaaaccactgctcaaggaaataaaagaggatacaaacaaatggaagaayattccatgckcatgggtagsaagaatcaatatcgtgaaaatggccatactgcccaaggtaatttacagattcaatgccatccccatcaagctaccagtgactttcttcacagaattggaaaaaactactttaaagttcatatggaagcaaaaaaagagcctgcatcaccaagtcaatcctaagccaaaagaacaaagctggaggcatcacactacctgacttcaaactatactacaaggctacggtcaccaaaacagcatggtactggtaccaaaatagagatatagatcaatggaacagaacagagtcctcagaaataatgccgcatatctacaactatctgatctttgacaaacctgacaaaaacaagcaatggggaaaggattccctatttaataaatggtgctgggaaaactggctagccataggtggaaagctgaaactggatcccttccttacaccttatacaaaaatcaattcaagatggattaaagacttaaacgttagaccttataccataaaaaccctagaagaaaacctaggcattaccattcaggacataggcatgggcaaggacttcatgtctaaaacaccaaaagcaatggcaacaaaagccaaaattgacaaatgggatctaatgaaactcaagagcttctgcacagcaaaagaaactaccatcagagtgaacaggcaacctacagaatgggagaaaatttttgcaacctactcatctgacaaagggctaatatccagaatctacaatgaactcaaacaaatttacaagaaaaaaacaaacaaccccatcaaaaagtgggtgaaggacatgaacagacacttctcaaaagaagacatttatgcagccaaaaaacacatgaaaaaatgctcaccatcactggccatcagagaaatgcaaatcaaaaccacaatgagataccatctcacaccagttagaatggcaatcattaaaaagtcaggaaacaacaggtgctggagaggatgtggagaaataggaacacttttacactgttgatgagactgtaaactagttcaaccattgtggaagtcagtgtggtgattcctcagggatctagaactggaaataccatttgaaccagccatcccattactgggtatatacccaaaggactataaatcatgctgctataaagacacatgcacacatatgtttattgcggcattattcacaatagcaaagacttggaaccaacccaaatgtccaacaatgatagactggattaagaaaatgtggcacatatacaccatggaatactacgcagccataaaaaatgatgagttcatgtcctttgtagggacatggatgaaattggaaatcatcattctcagtaaactatctcaagaaccaaaaaccaaacaccgcatattctcactcataggtgggaattgaacaatgagatcacatcatcattctcagtaaactatctcaagaaccaaaaaccaaacaccgcatattctcactcataggtgggaattgaacaatgagatcacatggacacaggaaggggaatatcatcacactttggggactgttgtggggtggggggaggggggagggatagcatagggagatatacctaatgctagatgacgagttagtgggtgcagcgcaccagcatggcacatgtatacatatgtaactaacctgcacaatgtgcacatgtaccctagaacttaaagtataataaaaaaaaaaaaagagagagattcagtaactcatccagagccacacagcctaagtccaataatccttgccatacactctgaacttatctattgttctaccatagagcgtcaattgattttgggtggggccaatcattccatgcttttttaagctcctagatgattccctagtacaaccagaatagagaaccattccactacaggccgaaaccaaaaagaaagcttgctaatgtcgcttggaaagaataatttccctccacatcccaccccaacacacatatacaaaagccaccccatacaggtgtttctcgtctcctctctccgcaaaggacagtgctgttggtctgtcctgagatttyagcctacaggaatttctgaagccatattcaaggtgggggggcaggaatcagccactttcatattttgcttgtttccctggaaaaccacaagctgttataaggattgttattaagaagttatttatcattattgttgctacgatttgaaagtagagggggtcgctgtttgtacttacatggcttcctccagagggaatkcccgaattctcagacagctcatttaaagcttccaaaatgacaaatattccacaggtatctgctgcgtcctctcctgtcctgattcctgacttcacatttcagcctttcacaacatgtggctagcacccctgagttctggctgctctgctgaggggcagggccaccgtttatcaccctcagaaatctgagccgcaagtgtggaaccatctcaccactcaagctggggctcatgctcccgcagggtggtgtgggaaaggcggtgtgccgtgaaggccaagggccaggttatgggctgtcccagggcttgagctgcttctccagcagctcctagccatgaaaccacaaacactttgcctcccccttctgagtcttggtgccctcatccataatacggttacaatatatacctcacaggcttgttgttgtgaggttcaaactaaatcctttataaaatgtccctgaaacaytgtaggtatgcaacaaatgttggctatctcccccttagtagaaatccgacttcatgtgcactcagaacattctgtgagaaagtaaaattgctctctttaacctcaactttaaaacctagggatatatcttcaagtttccccattacctaatgatgactattatatttttactcaattttgaaatttacaagtcatgttcacatagatcttatctcactctggcctaaaatgctcccataaaattggcagaacaaatttaatcatttttattttatagaatcaggaactgaagttcatagagattaacatgcactttctacaaggacacacccactatcggaacccaggtttcttgcagcaaatctagtattcctctcaaatgccatctaggtttcaccttggctgttactttctagccaacccttgactccactgccccatgtgctcccaaagtatcttgtacttattctttcatggtacttatcgcactgtattgcagggcttctcaagcctgactatctaacagaattatgtgagactttttgtaaaatataatggatttagggcctcacgtgatttaggtcccacctccttaatcaggcgtctatttttgtttaaagttctccaggtgactctgatgcacagaatcatgcttactaaagcataaactctctaatggcagcaaccaaatctattttgttcatcattaggattctgaatccttaaacaatatctggcaatactattcaatattattatcaataacatttactgagcatttactctatgccagacactatgataagtaatgtgtgtgcatttgtttctgttaattctgccaatcgtcctatgaagaaggagttattatcaccctatttaaagagtgggtaactgaggcttggagaggagcttgggaaacatttagtaaatacatcaatgactattagcagtacaattcatgcttcctacctgcttccatgataataactggaaccttcaagaaagtgattataaaatatgtaataaaggactctggtacagtcagctttcaggcacacattagtcattgtctctagaaagtagaatagtaaagcagagccttgggagagcttgggggcagacagcatggccccaagacactatttctgagtcccacaaatagcacattttagttgctgaaccaatagaaaatagcctgaattcctcctagatcatctaatattattgttcaatttaaatacttttggcttcaagtagcagaactaatgtggctgaaacagatggggactgattttctcatataagaaatcctgaaataggtggtcctgatgcgggcttagccatttaacagcatcattaaggcccccaaatccccaaacgcctctcagctttctactctgccaccttctcattgtcagcagtgtttctgttcactgtctcacgatggccacagcagcttcaagcatcccttcacctgaaaacacctgaaaacagctgaaagcagaaggggaaggacaaactcatccatgtacctctctcctttttcaaaggggaaaaatgtttcccagaagccacctagcagacttcctcttcctcctggcagtaggtcacatagccacagttagcccaaaagaagtccagggaagcaagcgatgggcatggtggcatggcattgtcttctctcctrtgagaggtaggacttatcacaaggacagaggagggagaaaaatggttgcttcttagacartttattatctcagcctcaaataatctttatttaaagtactactaaatcaactagattcgcctttagaatattttcaaaacctgtttggccctatgatacgaatccartgttgttgaagaaaggggcatgtcagctccagagatctctagacgactgctctatggacagttaaagactttggcaacagcagacatgtgatgatggctaatgctctcctctcctgtttccaggtcaacagcgacctcatttacattacagctaagaaagatggcactcatgtggtggaaaatgtggatgccacccacattgggaaattaattgtgaccaaacaaattggaggagayggcatgatggatattactgatacttacaaattccaagaaggtaatttactaccactgaatgaagatttatttgcccaagtccattgagtacttattcattgtcactcagagatgagttccagagaatgcactggcatttgcagcatttggtagcaacagcagaagtataaactttcacrtgtgaaagacacgtcacatatgcaatttttcattgtagttttctttgctagcttgctttgggcagaattctcattcacstggcttgtaaaatgatttggtttaaagtcatacctaatttaacagaatatagaatatgttcttgctcacaagaaccttaattttaaataatcctattagaaaacactgtataactaatgtaattttagtccaataatagaaattaaaataactacttcacatttgtttagtactttaccaattatttccacatacattgttctattacattatcatggaagactacaacgtagayaatacaatattaataggacaatgcaatctctctaactcaggacaattaggtcgaaggccagtttcaattccaaaataatgtcatggtgggtttttgttaacttttattgcatagaatgtttcaaatggcactactgagtttaattctatctcaatcaatgcttagtgtccgstcyatgcctgcaattggtttggtgctggcgattccagcagtgagcagractcagttcctgtcctggtccragtgacaggattattgtgcagaggggtctttggaaacaataagtaggggcatttagtccaactgattcagaaaaagacttgagaagagaagtcgtggacctcggttaaagaagctggacaggggtttccagacagtgtgaacatgaccaaagttacagggcgtgcagcagcccggtatgtttagggggatcctgcaggctcagaatgcccagtgactgaagacaaagctgcccgaggccagcagtggccagaactggaggaccgtgagtgtcctgatggggaacatgcaacatattttgcaaatgattcactgccagaggttcttaggagtatttatttttagtaaatggataaaaatgacaagtaattagcatatacctaaatattcattggaatccatgaagtgctaaggagtgcagaatttattttaaatagtttagacagtctccctgctcttatttacaaaagtaatttgcactacaaagaagaarcttgctgaattgagaacacttgtgcatagtctcagaaagtcagaatttttgttatctgaactagtgaattttcactgtattttttaaatgcttcattttcctcttctgttggttatcatccattgcacaacacagatacaaaggtggtatttttttgtcatttggatttttccttaaaggaaaatttaaaacaatataagtgcaaataaaacaaaacaaacaagcaatgccctcttactgtagagttataagcaaaaaaaggtttggagaaacaaaaaagcaagttcatagaaaagttagctgcaacatccactcattcatacatacatccacacgacagctggctcttaccatctgccatcttccagtgctgtgtagagctggatacatgtacagccctgccttcccatgcagctggggagaaaagcagaaggcagccctcactgtgctgggtgagaattgctctggcacagggtggacgggtgctgccgggcacagagaaaggctctcagccaagaatcggcagttggggaagacctcgtggaggaagttagtgatgggctcactaagcccaaaggacacacaagaattggcagatgaagctggggaaagaggtccccaagaaaaggcagtaaggcaaggactgtggtgagaactctcgtatttggaagaagtcctgaccagacagagtagtgaagaaaagttgcacctacaggcagctaggggcagcaggaagcgagctgtccacatgacagatgtctcttggaaaccatggagccgagcacagytgccattagctgtcagcatggaggtgacagtgaaggccaactcaggaatgggacagaatcagatgccacgagaggaaagactaaaacccagtccacgaaacaggagtcaggggcttggctgggggtggataacaaattaaaacaaaatgtgtccgcactgcatgaggaagacatctgaggtccaggcctctagagtttagcaaggaggcaaggctgagggagagggacagtgtggaggtctggtccaactagaagaatccctaaatccacatagatggttgtaagcgacgactcatcctgcttcggggctggagtttgaccccaagtggatagtttcttaatcaagggtggcatacacatttcaractggaactttggaagtgaccaagtagaatgttgttttgagaagaacaccaagactgcatctgaatgtggcgggtagaaggattgatggccgccattggccactggcatgcagtgaggactcgtcatatccgtggctcagtacttaccaccctgattctcaccgttgaatctcttataatttctctgatccacaaatgctgagtgtagataccaaaatatggaaatgagtagaatcacaggaaacaaattattactagatttaggacttaactattttaatgaattaaatcatggaaagatcaggttcacttcaacttactaaagcttattattaactttataacttttttcaagatatataattaagaaacgataagactttgaaaatcagaatttctgaagacttctcctgtggcaatatatcttctttgataacagtgtcttgattccattccctctttgctccttcagttacttccagggtcactgttatttccacctctccctctctattttctccttccaatcagcatttaagcaggctcaaatatctgctgtgttaaaaacaaaaattacaaaaatctttttcaccactgtctcttcctcctcgcctccttgccgtcctggagygctgcctggacttgcgtcctgctgtgttccttctccactccttccgcgcacactctgtcctgatttctgctaccagcacttccttgaagttgttctcaaggttgccaagaccacccaattgtcacagggaagaaacattttgcagacttcagcttacttgaccttcctatacttcctggtgctgttgttcactccctttgcttgcaattctgtcttttctttgtttctacaatgttactttctcctggttccaccccctcctgcctgaccctcttttcctacctctttttgactataagcttttcccctttcttcacccttttcaaattccatttcattctaggcatctatccttgggctccattcccacccacctgatgttcttcccacatagctggtgttaatgttcacatatgtaccatcaccccatgtctgtgtctccaccgggactttacctaaatgtcctacagaaacctgacacggaacttcccaaatgacacctctcactctctccctcacctcaggtccgtttctcccactccccctactctggtgaagagaaccaccatccactcaaatttagctacttaagaatgagttaagcaacaaatcctctaaatgtcccctctgaaattgttctcgaatgcatcccctcccctccagctctgtagcctaaaaattaaatattatctggtgtgtacaactcttaatatagtgcctgacacataataagtgtccaataaaagtttcccctattactagtaattctgttattcctgccatactactgctattagtttgggctatgawtagttttctcctggaaaaatacttgctctagcttcccaattccacctcacctcctcaggccctccttccctcagtctagcccctgccttgctgccaaagtaatatctgaaatgtaaacctgagcctctcccagcactgcttaaaagccccacccccccccccctctccctgtggcctccagggcatccagtcctaactcacaaagcctcttgctaagtggcttttcggcacctggtcactgcacctcctgagcatgcccccacaggtattgtatgcagaggccagggacctgccagcagttcctccaacaagccaagccccccacctgcatccctggtcttgccctcgctccaaaaactccgagaggcctcccatgccccttcctttccccatgcactgcaggccaacctccgtcccagcatctgtggtgagcacctgtgtgctgccattgctcttcacgtgttccttctgcaccagtgagggaaagactgtttctcctctgtgcctagtgcctagcacggtgtttggaacattatggggtttccaacagcatgagatgatttgaatgaatggttactggggaggcactttcacagctaggcttagttgaacataaaatgtcctaaactggactattatgaagaggaaagttttgtctctggctgaaagcaaaatgcttctccaaacctcaatccttcagatcctctgtgccaggctgggtttcagggcctggggatgcagaggtggacaacatgtctctgttctcatggagcttgcattccagcaaggaagataatgtcacacagtaactagtactgtgacaaggaagaggaaataaaaccaggtatgtgttagggagagccgagaacactagggtttgaggacacattacacaaggtaagagggggaggacaggggaggtgacagtggagctaaagccagaagaatgagaggcttcgtccaacataaaagggctctcttattacatcctagttaatggaaagatatttttgactttgcacccagaggctgcagaagaatctcagaaaatataatctggctttggatatgtctctcactgcactaaaatgttgcctgtggccctgaattatgtaagatgccagagcacgcagcataactgtagagaaacaggaattactctgccaggctctgggaaagccgtgcagttgttttctcctctctgggcctgcgcttcctggaacagccccagcctgcttctgtttggcggtctccgctcacagaggacagtgcttccccagaaggaagctccaggttcctgcacccatggcaggctgtgaagttgcttgtggctggcttcaaggcttcttctcccattcacctcaccttggccagctcagctcctctctgatgtgttmctgatgctcgaatttscctcctgcattttgcctcaatgcatctctggcccgcatccaaagtgatcatcattaatgttctcttctcatggatctattggccagatgatttctgctaaaagatttcactgcacttcccttgtcctcactcctccttccctttttcttacctccctccgagtgctctagctgatgcttgtcctagaccaactgttcctggcacattcttgcagtcttgacaatcagggaaatcgttaatacacacacacactacacattcacattcgtatgcaatgccttctggcattttttctgtctttgcagagtagcttccatttattatatatctacttcctctaattcacctaataaacctaggatgtagacacccttattttacaaacaaggaaagtgatggtaataatagtgtctgtcttatagtgttgttatgaggattaaatgacacaatgcatcataagcacttatgccagtgcttggcacagagctagccctcagtgagggttctgatgattcattgacctctcagtcaccattgcattttattattaactagataaagtagaagacaatacctttaaactagcataattataaaagctaggattcttattttaaagtgatttttttttcactagccattctcaagcctagtttttacaagccaaggaatttgccttcatcttctcatctctatccttagggatacacaaagataaacccaaaggtatttaggatggaaaagaggatgatgaccatccctcacatctgcatgagccctgtttccaagccaaagccttttgtccaaggctctgtaaggaccgttctcccaccttcccagtgtctgaggcataagctccttctgaggcctgacttgtatctgtattttctgcctcatcacttagacaaagctatgtttttcttcttctggaggttaccctcctctttttcctcccttcatctccaccacaaccactttgcaaaccctgcacaaaacattttcctaaaagcagcacacacacctcgaactgcattagaacttaggtgcaccacygcctgtcaacagatgtccctcaaaaaactgccctccgtgtcagatgagtttgggaaaccttgtgtaaagaaaggcaaagaggtgtccttgctgctgggcttcacttagaacctctaatttgctaattaaggtggagaacatctccaggaggcgctggacaactagggcatctccaagggatctgaccggagcaccttgggcagggtcgcctttttaatgtcttgccagagcccagcatccttggggactgggggatgcaagttttggtagaaccttctgccatggcatgggtgttggggrcaatggcaattgagtgagatagggaagaacggggcaggagccctcaagggtcagctcagcaaacagcaagtgggacaggcccargtggaaggagagatgaggaagacaggtcttattggggggcaggtattcacaaatcagagagaaaagttacattgcaggaggtggaatggcaagaggcaattatttccaattattagaggtccccaaattctagccacatggctgggactaagaaaagcaagcaaactgacaccacagtttaagaaaagatagacattgccaattttacctcccaccccctgaaatagtggccccggagaaacccctttctggatagatcccaacactgtcacctcctaacttgcagcctaggctggtcactgactgtctggcaatctgactttgcagaatttataacataggaataatgacggcaccctcctcctggggaggtctgaagcttgtattatagaaacaccccaacaagtgcagtacacrgtgcatccattaatgtgactttctctctggtggattgtatttttgcctgtcattatctctggatctcccccaggtcaagaagaagagagattggccctagaaactgccctgatgtacrgagctaaaaagcccctcaacacagaaggtgtcatgaaatcaaggtccaacgttgacatggactttgaagtggaaaatgctgtgctgggaaaagacttcaagctctccatcaccttccggaavaacagccacaaccgttacaccatcayagcttatctctcagccaacatcaccttctacaccrgggtccygaaggcagarttcaagaaggagacgttcgacrtgacgctggagcccttgtcctgtaagctaacaatggtgtggttctttstgagactcgctgtctggcccctgtcttgctaggtgttaatgcccgttatagctttatatcaaagttaaagttccctccaagatctcagaagtgtgagcctcacagggagaacccactcattctgcaaaagcctccactttctttttttttatttttattttttgagatggaatctcgctctgacacccaggctggagtgcaatgmgaygatcttggttcactgcaacctttgcctcctgggttcaagcaatcctcctgcctcagcctcccgagtagctgggattacaggcacrtgccaccacrccaggcaaatttttgtatttttagtagagacgggrtttcactatgttggccaggctgatctcaaactcctgacctcaggtgatccacccacctcggcctgccaaagtgctggaattataggcgtcagccaccgcactcggcccaaaagcctccactttcatcctcacgtctcatgcacagaagtgaacattgaaaatttcaaagcctagagccccatgagttgtgagaattaaatgtaacttcttgctactcaaagtgtggtccatgagccagctgcatcagcattccccaggagtttgwaaaaaatgtagaatctcatgtcccaccccacaccctctgaatcaaaatccatgttttgacaagatcccaagcagactggagtgtacaggagagtttgtggagcatggatctaaatgatccatctcagaaacaggccctctgctggtgcctctcgcccaagttaggaaagtcttttgggggctgtccagaatgaatrgtgtgctttgctttcccattcaaaaagatacacgcgctgacataggccgcttcttaaaacgctgtctcctgtaatctcagcactttgggaggctgaggttagcggatcacctgaggttaggagttcgagaccagcctgactaacatggtgaaaacccatctctactaaaaatacaaaaattagcccggcgtggtggcaggcacctgtagtctcagctactcaggaggctgaggcaggagaattgctcgaacccgggaggcggaggttgcagtgagctgagatcgtgccactgccctccagcctgggtgactgagcgatactccgtctcaaaaaaaaaaaaaaaaraaaagaatggaggctggaaacaaagctgtgtcatctaggaggggcctaggaagaggttttctgcctctgccatctcttgtggggcctctttctcgtccttgcatgcacatccttccaagcattttcatcactgtaaaaactcagaatattttaagcagatcagggtccacgtgctacagcttgccttggggattacaatctcaaaaaatcacatttcctaggatgttcgtatttggtgggcacaacagttgaccacacgatgggcaacacaagtccattggaagaaactggtctctaggcagagaatgagttagagcaggttgcaaaggacctcgatactttggggcaccaatttctgttggcctgacatggggcactgaagagaaaagtgtacaaataataattttgacaaagcaaaggcaagcaaaactaatacgctcccctgggatggtcaagccacaagtctgaattgctctcaagctctctggattttgtggctgtcacagatcatggtccccttactgaggttttggaaaatattcccagaaaaatgagaaactattttttaaaatcctaattccaaggaacttactcaaatttgaaggaagcaaatctccccagcttcagtaatggagctaacaattaagaaatcactatagtggggccaggcatggtggctcatgcctgtaatcccagcagtttgggaggctgaggcgggtggatcaactgaggtcaggagctcgagaccagcctggccaacatggtgaaagctcatctctactaaaaatacaaaaaattagccaggcgttgtggcaggtgcctgtaatcccagctacttgggaggctaagacaggagaatcacctgaactcaggaggtggaggttgcagtgagccaagatcgtgccactgcactccagcctgggggacagagcaagacttcatctcaaaaaaaaaaaacactrtagtgttttctttggaaactaaaagctttggcacttttcctattcctagggtagtaaaggtaattttcatggaaaagaatagtcagtgtaaaggactgaagaggacaacagtcatggggattgtttaaaacaggcagccacatttgatttcagagagttttgcaaatagacaattctggatgtaagcgatgactgtgtcacctaccagctgtgtttcctgagcaaggtacttaagcactctgagctgtctctcctcatcygcaaaggggaaaaacagcacacacaccccggggttcttgattcattcccctaacctttatttagtgcttgcaagtccaggttctgttttatgctggagacacagcaatgcctattctkactgaatttctgatctcatgggggaaccaaacaaacaagtgaatctatagtatagttatatgggtaatagaaaaatacaaagcaggttaaggaaaacggggagtacctgtggagatggtcagaaaaaaaaccctctctaatggggtgacatttaacagagacctgagtgaaggtcagaagtgagcattccagccagaagaaactgtatgtgcaaaggccctggggccagagcatgtctgatgtgttcaatgagcaggaaggagccagaatcaggaacaaaggtggcaagggggcagtgctgggtgcagaccatataaagaattgtaggcctttataaggcctttggtttttattttgagtgagctgaggagcctttagagagttttgagcagaaatgtggcataatctaasttaggttttgaaaagaccactggctgctgtgttgagaagagactaaagaggaagtagggcggaaggttagagactggtaggatgcttctgcaatcactccactgaaaggggttgatagcagtgatggaagcagcgagaaccagtccgatctgggcatgtgctgaaggtggagcccgcctgattggctgagagactggatatgtggtgtgagagaaggarggtatggaggaagccaaatgagtgatgaatgtgaaatgtktgccacatggtagaatcttagtaaatggtaacttccaacatgtttacatttggggaaactgaagctcgagagatgagtcgatgtgttcaagcccccacacagcaatgagaggcaaagcagataatagagtagacagataatagcagtgacagtgagccagttcagggtaaacttggccccaagtgggccaggtcccttccttgtgctcccattacctggagtctagcacagatccttagacaaagaaccaaatgccagcccttttcccacctcacaagtgtcctgtctcataatctccttccccttccctctttaatccaattaaagaatgagcttgtatgggtgagtagaatgatatcattctctcagtcatcgacctagggacagctgaccaaacctatgcctgagtccataggaacacatctcccattcgcttggccagccccaggttgtcctgaataacttgaagggaactggagactctttgttcctttgccctgcaggcaggtggtattaactgtgaccaataaattgtatattgaaatataaattaaattgcagtgtattgcaaaaagccacataacttcaggccttgatcaagcattcttagatgcctctgctgcaaagaaagctttccaagtagaatgggaggcatactttccagattgatgattaaagggaatgtgtgtgctggaatcagcttgggagatctgaataacttaaacctctccgtaccttcaaaggtgctatcatttccacttggctatatttagttttctttgctttttggaaaagagatgaggcagctccagtctgtgtctcccttggctttccccagacaccgtaaatgatattggcagcatcccagccctaccrctcatagagcgaaaacctattcctccttctcctgccacgtttaataaactttatctagaacaatttcttgtgcagtggcaaaacacagcacttacataacatactatttcagaagcactgttctcttgggctctgaagcacagcctggtttctttagtgctatgatttagggagtgttctacctcagagaagaaaggggtcctgatactgagattataaaggtagcaagagcctctgtaaagaaatcatatcccattagccaaaagaaatccagtggtcaaacatagtcctctagaaatagtcagargaagtcattttattattgttattactggaaacagctagaggcaaaaggcatcttcttcgaggccttccaccttgccacttcatccattctatctagagacacgataaactgaccatttgtgctcatctgaggctgtaaccaatagagggccagaacctcactcatctaaacaattawttgcaaggggagccatggaggaagcagggtccaggcttaggtccaaagacagcaatacgagagcgggtcattccaaaaggcaggacctgggggccaaggtcaaggcaaggtcatagctttaaagagtcagctctaaatggaatagctctgccccaggaatcaagccaacaaagctagctctttagcgcttgcccaaaataggccaatacattctaataatccacctgccctatgcggggtttcttggtttcagcaccattgacattatgggctggatactttgttgtgggactatcctgtgcattgtaggatgtttaactgcatttttggcccctatccaccagattccagtagtaacccaccctccaccccagttgtgacaatcaaaaagttctccagacattgccaaatgtcccctggggataacattgcctcctattgacaactactagtctaggatgaccaacctttctagttttccagggattgatggggttctcaggatgcaggcctttcaatttaaaacccaggtagttctcagtccaccctaactctgccctaacttaccccttctgctgttagaacctcctgtctctcagagtatctcacacttcaataggcattgtctggggtcttattcaaatgcagatcctgacttcactggtgcagtaagaagtcagagaatctgcatctgtaacaagctcccaggtgatgatggtgctgctggtgtgcagaccgcaggaggaacagcaaagacctggactggaaagccatcccttccactggaacccaggctgtctgcagggctgattctacagggatgcccctggttgttggagtggcccttctcaaccctggctgcacatcagagtcagctgcagagctgttaaaaatacagatgtctaggtcctccaaggctctgatttaattggcctggaatgagagccagcttggtaggtctttaagggtccccaggtgattgtgatatagagccatgactgagaactcttcaatcagaagtcctggaagcaaggcacagcacttacgcatctgyaaagagacttccaaatagaagtgctgcccaagacagaggctttcccagcctcttggtcttcaaggtccagagcaagctgctgcagatccatcgcaggtgtgagagttcctccacagatgatgggcatggctcaatgcacccacaccttcgagccagtggggagtcaggggccctgccctctgctctggtgcatgcccatccacaggcaccccaccctgctgcaaaactgctgttcagtacagcaggctaaaatgaattaccctctgtgctcaaactgttggccatgaagctgtttccttcaataacttccacaggaaggggaagtctttggcaaaagccagaaactgagaaggaaagcagtaaagacattcagttctgtgaaggttcatagagtctgttctctgtggctggggatggaggaatgagtcacccattcacctgcggagtctgccagctgtcggcacatacaggcatctggctccaaccaggtagcagtgggtgcacacctgggctcagcctacagaaaaactgcccattgctctctagaatcctggacagtgggaaatgggagttagagagaaagtgagccagagccacaagatagaactcaccatcctcagcccagatggtaattggaggggagccaggaccactctccatcttccaaatgccattctcattggcttgtccccaggacctagaaatctgacatcagtgactggtttccattgagaaaacaattgtttggcacagaggtcttctaaatcacaaacagaggttcggagatagttgaatgcctttggtagaaactggtttcaacagcttccttctcttaaatagaaaaatcatatcagattggagagaaaatgtggaatgctacagagaaaatgtgtaggtagttgacaatttagtctgagtgtggcccatggcctaggtgagacacttcttatttgacaagggatcctatgtggaatgggggccttggacttcagcaccccacatgttccattttgggatgatcccrgcccaaatcaaagccaccattaaaacccattggtccttctttgccatgaaaatcacatcttttccatggcatttcttttacaacagcaaaagaactgtttggaaggtttgacacattttctccagtgagacttcaatgaatattaaatttccagcacattctttacctaagaagcaggacagcttatccccaattgactctttgttccacttgccccttacctttgctgtgttcctggtggcttccaggctaatgtgggaggggtagggaaacttggagaaaagtaaagcagaccctgtctcaagtcttgatgccaggcctgtgtgtgttttctcctactagtcaagaaagaggcggtgcwgatccaagccggcgagtacatgggtcagctgctggaacaagcgtccctgcacttctttgtcacagctcgcatcaatgagaccagggatgttctggccaagcaaaagtccaccgtgctaaccatccctgagatcatcatcaaggtcagtcttagcgtctcatcctggaacagagacaaaggcacgcagacttagtgttcatgtgtgcatatgygtgcttgtatgtgtgtgtgtgtgtgaatgaatgtcctgctcaaaaaaaaaaaaaaaaaaaataccagtgctaggatcctcttgttctttgaaagaagtaaactgccctatatatagacacatacatataacactttcctctcctctccagatttaaatatatagatgtggctgcagatataaatataacctgtgggtataaacacacttgtggaggaagataaagatgtgtaatggctacagatacttagaactttcagtgtctccagaataaagtgggtcaggcatgctataagaggtagataaactgcctgcaacattttggacagtaatattgtttatggaggtataattgtggatagtagattgcacagatcaaaatatacagcttgatgatgattttgtatgtgcgtgtgccttgcaaccacaagccagatgaagaaatggaggatttccaacacccctagaaggttccctsttgccttttacagccaataaccccctagactatcaccaagatagtaacttttctgacttttatcaccataggtttgttttgcccatttgaccagtagttttcatgatgcctctccagtgatcaccagaaatctctgcccaaatggctcaagagacttggcagaggaaggccgagggttgatgakagtggaagataaatgtgggagcctctgtgctcctacttctcaggcccacagctgtagcttctgggggcatctgtggttgcatccatgagacrccttyctgccctggaagcaggaacccaggcttctggcagtgaccctgaggagtgacatctcatgcagcccttatccaggtcttagagcccttccctagtctctggagaacaatcttcttgaagtgattaagagcaattagcacagatcctgctaaactacattgctctaaagtggtagataaatcaaagctttataaagttgatcacattttaatggtcctagaggtgggcagggtgagggtaggtagtccttgcttctcgtgaatcctttgctgtgagtcatttggaaagccaatgactgctgtgcagcattcagaatggcagtgtttcttggrtaactactgggctccagacgctgttcttaaagcactttacatggttgcattttcaaccaccaacaaccccacaaggtaaagagtactggcatyactttacagatgagaaaactgaagcacagagaggttctataactcctccaaggccatacagccagcaaatggcggagctgggcttccaaccccagcaggctggctgcaaaagcagggctgggaaccagctccttcaactgaacgttcttatggtctggtcctgtgtaattgacacagtgagccaccccaaggcaagtcccacccaaactcacgggcatgtaatgcccatcagggagcagaacaccaggcccttcttttctacaaaggcctacattgtcatgtctctttgtttccttcgcctctgtcatggcccacaggcccaccatggcgttgtgtgcacaggacgcctgaaaagaatgaaaacgaggctgtgcagggttggcaggcaaagggagaaacaaatgcaaaatggagaggtggggattagggttgctgcagaggtaccatcatccatgagaacgtgaagttaatagcttaaggtgcaggatgccctaaccccgaagctgttcttcacagctggctcttcctatagacatgtgggaccccctgctgcaggcctgtcccagctgcttggtggaagcagcttttgctacccttctgggctrttgcgcaggtttcatttatgagctcaaccctgaaccttccctgacagcagcraggcctgtgtgcgtacctaattatgaagtgacggcctgtccctgtgaaggtctcaggagagaggcttcccaagctgtgaagtgctcaaaccacagcagaaaatagaatttaattgcaccactgataataaaccggatgkatgaaggaaactgataactttcatcttttaggcactattaatttgcaggattatttgttagttatcttctgggtttacttaaagagcagtttaattccccagggcacaatcagaataccttatcccacaagttagcagacctgggcatgtagagagtactttaaatggagagttrtattgttttgtgtttccttccacaaagsaaccagagatgctgttcctggaggaaacttatttagaggtagggacatttgatagggaagagagcatgagagagatggagattctggcttctgtccatgccaagtttgttcaaaaaggtggaatggggcatcatcccataaactgtcctttaaccattagcccaactaactccaaggataacctaaatccaaatggagtagaagtgctcctgggtaaagcactcacaccctaaggaccacccaggagtcacggagctgtgagaggccctgagtgcagaagctccggcctgtggactggggacctgcctagcctcctggagaggtgaaatgcagagtcatagcaggggagggaaggagggaggggaagggagggagaggagagaagaacagaggggagaggagagaacagaggagaaaaggatggagggaggggaggggaggggaagatggagaggagaaaaagaggaaagaaaagaggaaggcacaggaggggagaggagagaacagaagagaagaggaagggacaagagggaaaaaggagcgagaatgggggggagaagagaaaaacggggagaggagagtaataagaaaacttcaagttgaaatattccaaaggaggcctagggagaggggtcagataaattgtataaaacacaactcaattaagagttattttttctccttccttccttccttcctttcctgtctttctatttttattttagatttgagggtacatatgaaggtttgttatgtagataaacacgtgtcacaggggtttgctgtacatattgttacatcacccaggtactaagcccggtacccagtagttatcttttctgctcctctccctcctcccatcctccccactccagtagaccccagtgtctgtttgtttccttctgtgtgttcgtaagttctcctcatttagctcccacctataagtgagaacatgcggtattacgttttctgttcctgcattagtttcttaagaattatagcctccatgggctttttttttcatatgcttgttggccatatctatgttcatgtcccttgcccactttttaatggggttgtttggtttttttcctgtaaacatgttcaagttccttatagatgctggttattggcaacatcaccaatcatcagagaaatgcaaatcaaagccaccatgagataccatctcataccagtcagaatagctataattaaaaagtcaaaaaataactggtactcgtggggttgtggagaaaaaggaacacttatatacggttggtgggagtgtaaactagttcaatcattgtggaaaacagtgtggccattcctgaaagagctaaacacagaactaccatttgacccagcaatcccattactgcgtagatacccaaaggaatataaatcattctatcataaagatacatgcacatatatgtttattgcagcactattcacaatagcacacacatggaatcaacctaaatgcccatcaatggtagactggacacaatgcagccatagctgtaaaaaaggatgaggtcatgtccttcgcaggaacacgaatggagccagagaccattatcttagcaaactaacacaggaagagaaaaccgaatactgcacgttctcacttataagtgggagctaaaagatgggaacatgtggatatatagagggaaacaacacacacagggtcctattggagggtgcagggtgcggcgtgggaggagggagaggatcaggaaaaataactaatggctactaggtttaatatctttgtgacaaaataatctgtacaaccctcatgacatgagtttacctatataacaaacctgcacatgtacccctgaacttaaaataaaaggttttttaaaaatgaggacttggaaagggagctaaatgcagtaaaagtacgaaaccacaatggctcagaggtccagaattacataggatatgtttctctaaattctaagaaaacgctcacaccctttttcaacctctttgagcctggatggacacacaactgactgagcctcaaggttgctgtgggcaaatgtgccaggcacagggtgaaattatgtgagagacagagaggagaccacagcccttcctgctcagctcagtcaagataagggttgggaccagcccctggtgattatgatgacagcagctatgatttattaagcactacattattaaacgcctctcttctatgatcttatttaaccctctataccatcctacaaggaggacgttactataaccctattttactgattagaaaactgagaggaccagagaaggcagtgccttgtagcacagtggtcagaacatgggctctggaaccaaatcatctgagtttaaagcttgttttctgaacatcataactgtgtaaacctggacagatcatttcacctctgttggcttctgcattctcatctgtaagtcaaaagcaatggtaactctcctcctggggtccttgtgagttttttatgagtcattggatgcccgagtcacagtgcacacctacatatgttggttgctgctattattgccattattgctgtttattagtaactggcccgtgatcacgtgcctgttgagggaaggagagacacttctggcccaggtcttcctgacttggaagcctgtgctggcagccgctgggctacaatggaactatcacaaaaagcagaggtggtcattgactttgcagagagttttgtattcaagggaggagagatcacacacacttgagtggtgtgggacatcaagaattaagactgtagaaagatgaatggtctccaatgaacagataacgttcaaccagtagagatggatggagagaccccttcagatactaggaagaaaatgttagcaagggctagagggraggtggacggcagtatgtagagcagtgagaagcgtgccttggctggggtggaggctgggagcagggatgagtaagggtaacctgaaaaagatagcttgaggctatgtggaggggagtctacaattttggatgagagctttatcatcgactctctgaacaaagaggcttcaagggagtttctagagtgggaatgtaacatgattgtcaactctgctctcccacaagtcggagccgctttttcttcctcccttctcttcaaagcctttgcccaaagcattgtcttctccaggaagtacccaactcagccttggaactggagtttcctaaaagctagtttccagctgttcttacctgattcccctttagatcaaatctaggccaatctggaacaatactgggctcacatgtctgaatccaagtcaccgtcaaccaaagcaggccagtggcttcctgtttgtgcatcccagtggacccagtcgtggattttactggtccctgtggtgataaagatggggcctgggctcaatagtgctcccagtcaaccattcccagcacccaccatgtgtgagtcagagtgtgtgatcctcacatggaaacaggcagagagagacagtcattaaactttaatgagcacacgtctctttccccatgctatcaaaatattttgatgagaaaagaaaatttcattacaatcagacatagaatttttctctgccttcccatgtgttgcttgttctctctctctctctctctctctctctcacacacacacacacacacacacacacatcctctctctgaacttcagtatcccctttgcaaagtgaatacactatgattatactgctccttctattaagtacagtcacatataaaacactgcactggggggattgacatctgtagcaatgtttgtgagaatgcatggcccacgtccagacctagtagctgttggtaaatgttctttctcctctgtagtcccatcaatgcatgggggttgcttagggcagcatgtgggccactggcctgaagtgggccagtggcctgagtgtggccctcacctagtggcatggaatctcttgaatctctggtcaccaggtgttgagtgtatgcagcattccctgtggaatggggccttcctcatgcagggaggcccgccttggagatcctggagtaaggcctaggggagagaggagacactcacatgttcctccaatgatctctactcagtacctgccattctaaagcagctcaggagccagcacttgtgtggtattatcatgtggaaaaagtcctgcagcctttgcaggatgtcaggaagcaccaatagaactaattttctcatgtgaactaggaacaattttgctaggagaaaacataaccattttttatgtgtgtgatttttaaagttacaagcataagcaaacagatgtctccaaatttttcaaaaaaaaaaaaagcttttaaaatgaggacaattgactgtttccaagagtttttaaaagtaagcgtttgctctgtatttattttgtccattagctgaaagactttctagtttttatttatctctttatttagtcactcttgcattcatccattcttcatatagttatttggtgcccactctgtaaataaattgtagcaaatgcctagagctttcaaaaccattatcagagaggccgggtgcagtggctcacacctgtaatcccagcactttggaaggccaaggtggstggatcacttgaggtcaggagtttgggatgaacctgaccaacatggtgaaaccctgtttctactaaaaataaaaaattagccaggctgtagtggtgcgtgcctgtaaccccagctactcaggaagttgaggcaggagaatcacttgaatccaggaagcagaagctgcagtgagccgagatcccgccactgcactccagcctgggtgacagagcaagactcaaaaaacaaaacaaaacaaaagcaaaacattatcagagaaaaattcaacagtgagaacattttctttctttccttttttttttttagatggagtctcactctgtcccccaggctagagtgcagtggtgtgatctcggctcactgcaaccttcgtctcctgggttcaagcaattatcctacctcagtctcccaagtagctgggattacaggcgcccaccaccacgcccagataatttttgcatttttagtagagacagggtttcaccacgttggccaggctggtctcgaactcctgacctcaggtgatccacccaccttggcctcccaaagtgctgggattacaggcgtgagccactgcgcccggccaacagtgagaacatttttgttgcatttttctgaaatggggaaaggttgcgccactttctttcagcactggcccacctggaacagctccaggagtgcagttgctctgttttaacctgagctaaccagcacttacacagagcctggggtgctcctcttgcaaagacagtgtacatggggcctgtgaaagakgcttaacccacagaaatcgacttcaacaagcagaatatctgcatgaccagcactgattggtggggaattgtatagataacacaagatccatgggaagtatcactgttgaccccggagaggaggcagggaccttcctctgggcggcttccctccaggccagcactcacccctgtgcagattgtgcccatctgcaggtgggaaggagacagtgaggggacccagtccagcccactcgccaaccatcaagccctgcagcctggcatggagccacatccccccaaaaaagggggttcccttttccactttgcacagttgcatcctggctccagccccatgtccagatctcttccaacttgggacactagcttgttttttcttaacaaccatcctaatgttgtgttctaactggagcttttcatgagatgcccacaatttttaccgaggttaacagtagaatcctcttcagtctccctacggctcacaccctggaaacccaccgggatggaccaaggaagggtgggtggctgtggtggctgctgatctcactcctcccacatcccattcatacaactttatcccagaggacacattaaaattggggaaaccactgggcacggtggctcaagcctgtaatcccagcactttgggaggccgaggtgggtggatcacgaggtcaggagatcgagaccatcctggctaacacggtgaaaccccatctctactaaaagtacaaaaaattaggcaggcatagtggcgggcacctgtagtccctgctactcgggaggctgaggcaggagaatggcgtgaacctgggaggcagagcttgcagtgagctgagatcacaccactgcactccagcctgggcaacagagcaagactccgtctcgaaaaaaaaaaaaagaaagaaaaaaaggggaaaccacttgagatataatgagtgccccaaacaaagtacatgacagtgactggctacactgtgagacttaactgtagtttcatttagtgctgtaaatatcacaaacttcattaaggtggaaaatgggaacagactatgtgttctaattattgctgaaccctgaccattttcccctccatgtccacaaccgagcacgttctctctccagcctcctgyrctctctgtggctccatcgcactctcgtcaccaagattcacccctgcccacacccacacccttcatggggaggccggggatgggaaccaggaggtgggcttcttcacctctcccctttgtggctctcttctctaacccctgagaaaccgaatccacgtcattctccatagaagaccctataggtgaggaggttctcagggtcaccctggcaacatgttctccctttaaacctcatatttcattaatgctagtatgtgtcagatgctctgttgtatgatattacattgagtcaccccactaactgcataagaagctgaggcccagagaagtcaagcgacttgtctaaaaactcaaagtggcagccccggtcttcagcccctgcatccagcttgctctcccttcagcttggcctggaatagcaccactgtgtgcatcccagtcacctcagttatgtccgtgacactgtttcaggttatttgtggagtaaatcagaggtatctacctatgagtcctgagggactctgagcaaggaaagcctgcttaccccaggggaccctaggaggggacaccttcagccctgctcccatagctgactctcsatcccctcgtggctactttcacagaggattgtggccgtgggaccaaaccgtgggtgcccttagccaggatagatgatcgtaaactatgtctatgagtgagccctcctcatcgaaggtgttcatttccatctctstcttcaggacagctacagaacagtrcacattttagaatgaaaatgaggagtcactggtaactgcggtacctaaaacataatttgctctgtgcatttcatgtttgctatttttttgaatcttaaaaagagacacacatgagaataacsaatctcacattccagtcctgtaatcccagtatgtttgggctactgattctctttttaaaagtggcatctytcatttttaaaagagaaaatcctagatagtgactcctattatcatcaagtaatatatatcaaggccccaaggctamcttgtcacattttactctggcatagaaatctaattccttctctataaagtcaaaaagagagaggtgagttatagatgttttctaatttagttyagggtcaacttataatcctcgtcctcaactgatggtttagcgataacttaaaaggtgatgctgcaaatgattctttgctggatttcagaaaataaagaagctattccagcaaaaaaaaaagtttctatttttacctstattctgtcagggatcacagtatakgtagttttgaagatgaawgttttagagtcagaaagacctggatttatatccaacttccgccagattcctaactctgtaggctttttatttatcttctaaatttcaatttcacgtaaacagaatgggattaataatcatgtctacccccaagaccatagggctgtagagaagattaaataaggtagtgtaagtaaaytgatgaacagaatgcctgcattactaagtaaacactaactaaataaatgtaagttacttgttattattgttgtcattaaccagagtcaggatcacgtgttgctgagcaacggctatggccccagactgtctacatttgaatctctcctaccctacttactaatggtgtgaacttgagcaagttacttaactcctctgtgcctcagtttcctcatctataaaatgaagactcctaatatttacctcttagtgttgggaggattaagtgagttgatagaactttctagggtaatgggaacattttaaatctgctccatccaatgcagtagccacgagccatatgaggcttttgagtccttgaaagatggctcgtgcaactgaggaactgaattttttacatttcacttaattttaattaatttaattataaatagccctaggtggctagtggctactatattggaaaaatatagactgagaacatttcctaaccaccctagaaccattagcattggtcagtaagtgttcatctaagtgtcagctaaaagcaggggcagtgcctgtggtgatgagcagagtttgcaaacaagaaattgcccattatcaaaaatgatcacaggccaagggggagggaaaaatacagtttccagaaatacgtgcaatacatgattgaaagtacttgaaataagagctgttaggtgtgctaataaatcatgtatttcaaattgccaacctcacttattgttactctttctcaaactttttccttcatttcagtttcaattttgaatacagttatgtatttttaaagcatatgcttagtggaagatatcttgtgatttctaaaaaagtaatttctttccaaaaagtttatataagagaaagagagtatgtgtgtgttagtaactttcytgtttaccaaagaatcagagtagcagctcattatcatgaattagtataaaggacaggaatgtcaatatcagtaagtgatatgtaacttgaaaaagcatactacgggttgatttttttaaaacagagagagatattttcaatagaatattgagaaaaacttaaggccatcaagtatatgcaaaagcatttgacgtcaccaagtaagacatatgctttattcttttctctggcccaagtaatgaatactcttctctaaagcaaatacacataaaagtttcttcttgaactaaccttctctaaattgcctgaaggctccctttatttaaggttttatgagagcaagaaaatgaaaaatatgactgygaaaatgaaatgaaaatatgactatgcagatatggaattatgctttcagcaataaggaaaagggagctttgcagattcctaaaataatgtgatgcaaacagatattttctccccaaatagtcattgttctcagcattttgtaggtaccatarcatggtgcatcactgaaatcaacacataacgtgaaaacactatgtgttggcagcattttcctcaaaagaagcaaggagagggagacacctycagttacatttcccaagcagaacacastgatgtcgagcattgggtaggtttttacatttagtttggtttgagtgtctaaggctcattatcatcagtagtcagggacaggaagtttacattctcggtgcaggagacaagtgtcagaaaagggacactggtctttgttaattgcaaaagaaacacactacaaccagagaagggcttctcctctcacccctccccatccttctccctgctccccactccagcatcagggaaatctgggcagaattgatacacccatgccagcatctaattacagagacaatactggaagcaaactgattaggcatgacatatgaaattacctgagaaggtttaatgtcctgaacatattcagatctgaagcctatctatgatggcccarttgcatgggccagtttctcaaatactaagcattccttctcactgtcatcagtgacctggaagggtgtatttcactttccacagcgtaggaggcttcatgtagagccagtctactggtatggraagggttcttaatctagggttcaygggcccctagaaaaccatgtatggacttcataggtctatagtrcatcccctaaaaatacatgccyatattgtatatatcttgtatttgtcactgtgtatgtctgtgtagaggaaaggtcagtagctactatcagatatacttttgaaggggcttatgcccatccttatatagcataccatggagaagacagatggctccaaaatattttttccagaaagaatawagtgatcatagcaaacacttttgccaataatgtctctgtggcagctccatcttcttcagtttagagagcttttgtaaatgctatctttattttgtattttttaaatccaaagatgtttttgaaatgtttcttaatgcaggaaaaaatatattggacacacttgagaatgaaatcagggacaccatgtaaagtattctgawgtattgctacaccttcaatatctaaattgattgaggcagggcctctgggaagaaagtgaaaaattcagtctgtcttccacatgttttgtctataccagtggtttccaactggagggcaattttgcttactaaggaatatttggcaattgctggagacacttttggttgtgatggctggggtgcggggctgctcctggcatgcagtgggtagacaccagggatgttgcttaacatcgtacmtggcacaggacagctctgcaacaaagatgcatccagcccgatatgtcagtagtgttgatgctgagaagccctgatctagatcatgattastgtttttgccacagccttcaaaccaggcttctctctccacaccccatgtgccagccagcctaaaagtaacttctggttcatgttctagtttgcctgtcattgaaccagtctcctccccattaggccttatccattctcagtcttgtcagtgtggcttcaaatccaatgttgctcccaccggtttgaaaatctcccttactttctgactgccgttttttttttttttttttggacgtcagtacgaaacagttttggttgtcttgttattgctgagttgttggcttttccagctcctctgacctcagagtagcactctatcttagagttcaagatctccagttagacagactttaacttcaatcccaccttggtcatttggcagcttcaaatcctcattcaagttacctattttcctgaaccacagttttctcttttataaaatgaaatgcctggcaccagtgatcctgccctagaaaacctccttcttcttaagggaataactattattatagtctgatcgagctgatacaaatatagcccttgtgttgygaggcttatgtgagaatatatgtgaattatggttgtcagctggggctggttctttgtaatcaacaggggtgcctcaaataaatgaattacaggatccacccattaccagactgaggattgctggttaaagtgctggactccctgcctggcacacgatccatgctgtctaggtgcacctgctgttgttgctaccatgaccatcgtctgccyctctcctagttcccctgaayccagctctccaccactgccctccaggagatgcggatttaaatgtaacaaagtttagggagttggctgaaagtttcgtttttcttatagacttaagaaatcccatagccataaatttagtcacaaagcatggcttgatgagtaaagccataagagtgtattcttcttttaatcgatatataataattgtacatatttatggggtacatgtgatttttcaattcatgcatacagtgtgtaatgatcagatcaggaagattttattcttgactgtagcataagtaagcaagggtcctcttctctgggcaatgtccttcctctttacgtccattcttaaaaacgsctcatttccatatattttctcccatattatatagtggctaaagraacatggaatagtaatggctgtgttgtcatctggaagatccagacatccagtaaattccatttytgagccattgacttaatttaataaatatttactggacattggtattgaagtactaagtattggagttaaaagtgggctgaaatataaggtgaataagacaaactacccagagcattgctaccctaaaaagcatcaactgtaatgcattgggcctttgccatgtgccttgcaatatgtttgccgttttatgagcatttttcattccaaacctttcttgcaagggaagaactattattcttatcttattcccaagttacttagagcttatacagatccatycatttggtatacatagctcctaaacaaacaaacaagtcttatagccacctggcattttgcggcacattgcgtttatgttggaaaagcatatggttctraagtgtgtggcatacagtaaacacagcttaaggtatagtaataataagagcattctacatagatcgccccataaaagtgtcagcccattttaaagacaagaaaactgagtctcagaaagcctaaatcacctgagtccccactgttaataagtgttgaacctggcactgagctctggctgtctcctgtggtgttcttccaaatacctgatacttctgagagtcataatagatcaactcaccaacaaataaccttttattttcctggactctggtactgtggctgtagaagaaaaatctcctttccttattttagtatccaggttcctcttcatgttcaacagtaaggactccatccttggcatatttcttgcgaatgtgtctaaaactaagaaggcacatgtgccctgaagcattttctacttcttaaactcaggaatcccctttgttccagcaggaaacttgatgcctatccagaagcaaagttcacttggccgccctcaccgtggaaacgtgttgccacaccaaatgaacwtccccctcctgctgtcaaagagcagtcagtggccaccgctattgacctgagctctaattagkctggttttataatgaggaaaagagtgygattctaattagtaaatttccatctctttctcaataggtatcctccagtcaaagcaatcagctatcctcatcacactggttccattgccaaaaaaataactgtatcataaaactctagtaaaagtgatgatggttaagacaacaagagagcagaacgaggttttatttgstgctaatgacctgcattctctctcttaggtccgtggcactcaggtagttggttctgacatgactgtgacarttsagtttaccaatcctttaaaagaaacccygygaaatgtctgggtacaccyggatggtcctggagtaacaagaccaatgaagaagatgttccggtaaaccttgggttggggagaccgggcaggcagtgcagrgctgtgggaagctttctctgtgtgtgtcttttccaaacatagatctgctccccartgaaaatgtcttggaagctgcctcctccttgccgaccatttctgtagggcgtggagtaaaactagggttggtttgaccagcactttcatcatttaatccttaaagacaccctacgatgtagatactgctattrtctcccttctgtagctgaggaatttgaggctttgagaggttgactggttacacaggttcagttacacagtttatgaaaacagagccaagattcagactcaggctggtgaattccagaacccaagtttgaaccactttgctgtactacctactcacgtatggtctcttctcatctttattgagctcctaccacgtgtcagatattatgctgagagatacccccttttcatgggtgctttgtctccagcctcacctcacagattttaccatcccaatcagtgtctacaactgttggattcaggtttttttttagttgagcctaaagagctctagatggttccccattcaggggaccaaagacaaccccaggttctgtaatgatatgaatgaaactcagcctcttccacacacaggccacttcaaattgtgcttgacaggtctcagtttctgtgacttctactaacaaagagtgtgacccaacaagataacccattccatggtcaggtarctctaacagtaaggaaacakgtttttctaccatttgatcctgccaatgatcctaattctgccatctggactgacagaaagtaaggcccatctcttttccatctgatggtttgcaaatgtttgcaaacagctgtctcatcttccttgaatcttttctacctggggacaaatatctgtcctgactttatttycctctcctctaacatggtttcagctctctctctctctctcccacacattccaatttgtcactactcctcttaaagtgtgacacccagaatggatcccaatctttgaggtttattactttcatttctaccacagataagtccttgtcagcatcaatcaatctagcacatttcctgtggagtgaccttctaaggcatagaaagggaggtagaggactttggaaactgcctcatgaccagatatgtcaagaattttcccgacaccctttatggaagcgaccccactctggaatctgtgggataaatgcaaggcctcacttataccctctggggcaactttattgcccataaagggctctccgcatttctttcaaattacaatgctcrtagcttctgcatctcatcatttaagagatgccttattgcagatgcaataaacaacagagaaaataatcttagtgcttttgaaacaacgcaagcacaaaacatagcaaccttcctgtgctaacaggaaagttacaggaaaaaaaaataagtaaattagtaatcaaccccagctacatagagaggtcagcagccatacccctgctttcgtcagaaacgacagtctcactcacccattctcgcaccttcccactcaaatcagatgcaagaatcgttcaggcaaagtgaaacacgtttcctcttccatacagccccctgctgtatccaactttttccttcccagacagtaaacccacaarctttatctgagtgtacyggaaacttctctatctttacaccttggctatccccctagaattccaccttggtcaaggccaacacatgaaaaaagacactgtgtgtcttagacaaaagatgaattattacacagtgaattattacacagtgcaatgacccactatttgggaggcctcaggctcaaaataggttaaatctccagatggtttgtttattgttaatgtctgacattggagtggagcaaagtggagtgaatcgggaraaaggatggataaggccagtcccttcttggacacagatgtcctgcccacacactggcttaaggtactrttagtagttactgcaacacgtaagtctaggcagacaagtagatagacagagagctagctgctcttagtcagtttgagctgctgtaacagaaatgccatagactgggtggcttatacaacaaacatttatatctcacacttctggagtctgggaagtctgaggacaaggtgccgaccaattcggttcctgatgagggctcccttcccagcttgcagatggctgtcttttcactgtgtcctcacatggggcagagagagggagggcaagttctctggcacctcttcttcgaagggcactaatcccatcatgagccccaccctcatgacctattctaatttagttacctccccaaagctccatcgctaaatggtatcacactggagtttgggtttcaacaaatgaatgtgtgaggaccacaaacatttagtccgtaacagtcctcaatctctctttttaagttttttttactgacacattgtaattstacatatttatgtggggcaatttgatgtttcgatacatatatatgttgtataatgatcaaatcggagtatttagtgtatccatcaccccatgcatttatcatttctttgtggtgagaacattcaaaagcctgtcttctagctcttttgtaatatacaatacctactgttaatcatagttaccttatcatgcaatagaacaccagaacttattcctcctatttaattgtcactttgttctcattggccaacctcttcccatcttccccttcatgttctcctcctcagtctctggtaaccactgttctgctctttgcttctatggtataataatttttttttttttagtgtctacatgtgagtgaaatcatgtagtatttgtctttccatgtctggtttatttcacttaccatgatgcccttcctccaagtctaattcatgttgttacaaatggcaggattttattctttttatggctgaatagttacagaaacccagcttcagggtggaatatctcccagacaagagaagctttatttctcagagacagtcaaaacttgggctaaaaatcatgacatagaaaacatttgttatctaagatgggcttacaacttggagcaagtgccactttctctgtttactcctcactccagcacacaccttcacaaccaagacctgagccagtccgtgcccacttccatatggtcagataattagaagcactccactgtgccctatgttgccaagatctgatctaggagcgccagatccatgtaacaacttggacgcctagaaagtgcaattccacaaaaccaaaatcctttgcaagaccgtatttctttctagaatacagctcttaaatagttggggaatcaccacccccactcattcacccacaccctgccagatgtggtgtctagaaggcaggggttattgaacccaaagcagagggcctggaaggtgaggagctggtaaacagggaattggagccaggaacaaagaaggcggtgctgtgtctcacccctcactcgcagtgagccaactctactctgaaatggtttatcttcctgctcttcccccactgcctccggcctgtctcagatgtgcagaggttccacctccacagactcttaactttctgcacttgatgcttccagagcgtcaaataatttatcttccagatttattttgctctttagaaaatgatccagttcaatatgttatttcaagagaaaaactcccccactttgtgatttgggcttaaactttaagtttctcaaataggacagaagctaaggtctagamgcacagaggacaaaccatgggcagttgcagtttattgtaataataatctyatttgcctgcgtgcattcaagatgataaatggccggtatctcctgatggctcagcacgttactgagaatcgtttatcacaacatccatccccagaaaataggattactccaacattgctccacttatcaaaatacttttttctctgttatgaatttatctgtatgtaaaatagcatgcatacgtatcttcatgtatgagtattttcatgtatgagttttttcgtatgtacacatcattatgccggatggttttatgagtaagagaaaatgataagagggggctaaatacttagcttctatttgaggtggttatctacagtacatggtctcaggtcgggtccttaaccagggccactgtttcacaaagtgcttctgattgatcacttgggggaaccagaggagagagaatgaatggatacaggtaacaatagcacagctgttgagaaataaatatcccaaacttatattggtattgaattgagcactgagaattttctctctgcatacaggcaggagaaactttcctaaattatcttgcaaagagttcaatgaatcctccatgaacacttccaggacactcttattactaagtcaaaaagtatctttcctgcttgagaaataaaacctatgaaaaagtaagcacaatggtcagaaaaagccttttcttcttttctttttttatttctataggtttttggggaacagttggtgtttggttacatgaataagttctttggtggtggtttctgagacatttggtcacccatcacctaagcagtatatactgtaaccattttgtagtcttttatccctcccacctttcccctgagtccccaaagaccattgcgtcattgttcattgttatgcctttgcatcctcatagcttagctccagcttatgagtgagaacataggatgtttggttttccattcctgagttacttcacttagaatactggtctccagtttcatctaggtcactgtgaattccattgtttcattcctttttatggctgagtagtattccatggtatatgcataccacaatttctttattcactcattgatgggcatttgggctggttccatatttttgcaattgcacactgtgctgctataaatatgtgtgtgcaaatatcttagaaaaagccttttcttatagaacatatggtgtacacttttatgaagtgcagtgaagaggagcagaaagagtatgaatatgggactcagaaaaacccgggttcaaatttcatctctgcccatttaccaattatgtgatcttgaaaaagggacttcactggttaccttccatttttcttgatcataaaatctgctgaatagtatctgcctcaaagaactgtcatacatataaaacctgaatataatctcccaaggtttataggggaggctatatgtgaagcaccccagagaacactaaatctcaccaaccctgattagtctcagtctgcactgatgtgggcttgttcgtgacactcaggaagacttcagggcaaaggctgggaggaagaggagaacactagaaccatgaaaggctatgtcattagccgcatacattagggcattggcaacaaatggtagcagaaagttgcataggtggaggggcccaatttggtggttgaaataggaatttgaattacagaacatgaagattctcaaagtcaaatggcagcaggcagggctatattccagatgctgagcctgggmacaaggtctatcccaagggagttggcaaaagctaattcgagtgtcagggcctcagcaaaggcagctgggggattcayataggactgtaattccaggaggaaactagtggcaaaaactgagctgaggctcagaagatcagtcacatagataaggctactatggagggcttggrgacaagctagagttcagytgattaatggttggatgggaatcagcccagctcctgatggccactgggaggctggcggatgcatcccagtggaaggaaccatgacccaataagactgtcagtgacaggttctgcagagctttatgtgggggcctcatttggggcataacttgctgaatcagccagtgagagtcttcagtgtcctaagcaccaactgagagaaagaaagcaagtgacttaggcaagagttttcattgcttcctgatcaaagtggaaagctggatcttccaacctctcctctcttttccatcctttcagtgaaatccggcccaactccaccgtgcagtgggaagaagtgtgccggccctgggtctctgggcatcggaagctgatagccagcatgagcagtgactccctgagacatgtgtatggcgagctggaygtgcagattcaaagacgaccttccatgtgaatgcacaggaagctgagatgaaccctggcatttggcctcttgtagtcttggctaaggaaattctaacgcaaaaatagctcttgctttgrcttaggtgtgaagacccagacakgactgcagagggcyccagagtggagatcccacatatttcaaaaacatrcttttccaaacccaggctattcggcaaggaagttagtttttaatctctccaccttccaaaragtgctaagcattagctttaattaagctctcatagctcataagagtaacagtcatcatttatcatcacaaatggctacatctccaaatatcagtgggctctcttaccagggagatttgctcaatacctggcctcatttaaaacaagacttcagattccccactcagccttttgggaataatagcacatgatttgggctctagaattccagtcccctttctcrgggtcaggttctaccctccatgtgagaatatttttcccaggactagagcacaacataatttttatttttggcaaagccagaaaaagatctttcattttgcacctgcagccaagcaaatgcctgccaaattttagatttaccwtgttagaagaggtggccccatattaacaaattgcatttgtgggaaacttaaccacctacaaggagataagaaagcaggtgcaacactcaagtctattgaataatgtagttttgtgatgcattttatagaatgtgtcacactgtggcctgatcagcagragccaatatcccttactttaaccctttctgggatgcaatactaggaagtaaagtgaagaatttatctctttagttagtgattatatttcacccatctctcaggaatcatctcctttgcagaatgatgcaggttcaggtcccctttcagagatataataagcccaacaagttgaagaagctggcggatctagtgaccagatatatagaaggactgcagccactgattctctcttgtccttcacatcacccatkttgagacctcagcttggcactcaggtgctgaagggtaatatggactcagscttgcaaatagccagtgctagytctgacccaaccacagaggatgctgacatcatttgtattatgttccaaggctactacagagaaggctgcctgctatgtatttgcaaggctgatttatggtcagaatttccctctgatatgtctagggtgtgatttaggtcagtagactgtgattcttagcaaaaaatgaacagtgataagtatacwgggggcaaaatcagaatggaatgctctggtctatataaccacatttctaagcctttgagactgttcctgagccttcagcactaacctatgagggtgagctggtcccctctatatatacatcatacttaactttaytaagtaatctcacagcatttgccaagtctcccaatatccaattttaaaatgaaatgcattttgctagacagttaaactggcttaacttagtatattattattaattacaatgtaatagaagcttaaaataaagttaaactgattatatttgcatctgtgcagaagtgaatgcttttaattttcaatataacacactactaatcacaacttcttgagaaaccatccttcctccgcagtagacaacccaccctggataggaaaacaacaagcatttatcctctaaagaaaatgactctaacaggtgttaatgtcacagttttcttcacctctctctttctacattttattaactatattcactgaaggatcaagttgcatattagttcaaaaaccagcttccagaaactataaaatctctgtagatattttctcataaataatcttatgaaccattatggtgaatcagtggatagccagcatggagacctagcataacgaacacatgttatggtcttatgataatcacgtataggagatcctatattcatggcagacatcactgaacaattgtagctcagataagacctcagaatctttctcatttccaggtagcaactagcaattgattttaaactggcacacaatcaatagcttaccaatgaaaaagagtccaggaccagatggattcacagccgaattctaccagaggtacaaggaggaactggtaccattccttctgaaactattccaatcaatagaaaaagagggaatcctccctaactcattttatgaggccagcatcatcctgataccaaagctgggcagagacacaaccaaaaaagagaattttagaccaatatccttgatgaacattgatgcaaaaatcctcaataaaatactggcaaaccgaatccagcagcacatcaaaaagcttatccaccatgatcaagtgggcttcatccctgggatgcaaggctggttcaatatacacaaatcaataaatgtaatccagcatataaacagagccaaagacaaaaaccacatgattatctcaatagatgcagaaaaggcctttgacaaaattcaacaacccttcatgctaaaaactctcaataaattaggtattgatgggacgtatctcaaaataataagagctatctatgacaaacccacagccaatatcatactgaatgggccaaaactggaagcattccctttgaaaactggcacagacagggatgccctctctcaccactcctattcaacatagggttggaagttctggccagggcaattaggcaggagaaggaaataaagggtattcaattaggaaaagaggaagtcaaattgtccctgtttgcagacgacatgattgtatatctagaaaaccccactgtctcagcccaaaagctccttaagctgataagcaacttcagcaaagtctcaggatacaaaatcaatgtacaaaaatcacaaacattcttatacaccaacaacagacagagagccaaatcatgagtgaactcctattcacaattgctaaaaagagaataaaatacctaggaatccaacttacaagggatgtgaaggacctcttcagggagaactacaaaccactgctcaaggaaataaaagaggatacaaacaaatggaagaacattccatgcgcatgggtagcaagaatcaatatcgtgaaaatggccatactgcccaaggtaatttacagattcaatgccatccccatcaagctaccagtgactttcttcacagaattggaaaaaactactttaaagttcatatggaaccaaaagagagcctgcatcgccaagtcaatcctaagccaaaagaacaaagctggaggcatcacactacctgacttcaaactatactacaaggctacagtaaccaaaacagcatggtactggtaccaaaacagagatatagatcaatggaacaaaacagagctctcagaaataacgccgcatatctacaactatctgatctttgacaaacctgagaaaaacaagcaatggggaaaggattccctatttaataaatggtgctgggaaaactggctagccatatgtagaaagctgaaactggatcccttccttacagcttatacaaaaatcaattcaagatggattaaagacttaaacattagacctaaaaccataaaaaccctagaagaaaacctaggcaataccattcaggacataggcatggggaaggacttcatgtctaaaacaccaaaagcaatggcaacaaaagccaaaattgacaaatgggatctaatgaaactcaagagcttctgcacagcaaaagaaactaccatcagagtgaacaggcaacctacaaaatgggagaaaattttcgcaacctactcatctgacaaagggctaatatccagaatctacaatgaactcaaacaaatttacaagaaaaaaacaaacaaccccatcgaaaagtgggcaaaggacatgaacaggcacttctcaaaagaagacatttatgcagccaaaaaacacatgaaaaaatgctcaccatcactggccatcagagaaatgcaaatcaaaaccacaatgagataccatctcacaccagttagaatggcgatcattaaaaagtcaggaaacaacaggtgctggagaggatgtggagaaataggaacacttttacactattggtgggactgtaaactagttcaaccattgtggaagtcagtgtggcgattcctcagggatctagaaccagaaataccatttgacccagccatcccattacttggtatatacccaaaggactataaatcatgctgctataaagacacatgcacacgtatgtttattgcggcactattcacaatagcaaagacttggaaccaacccaaatgtccaacaatgatagactggattaagaaaatgtggcacatatacaccatggaatactatgcagccataaaaaaggatgagttcatgtcctttgtagggacatggatgaaattggaaatcatcattctcagtaaactatcgcaagaacaaaaaaccaaacactgcatattctcactcataggtgggaattgaacaatgagggcacatggacacaggaaggggaacatcacactccggggactgttgtggggtggggggatgggggagggatagcattgggagatatacctaatgctagatgacgagttagtgggcgcagcgcaccagcatggcacatgtatacatgtgtaactaacctgcacaatgcacacatgtaccctaaaacttataaataataataataaaaactgagaaaaaaaaacattaacaactggtgaatgtaagtgaaggatatgtgagtacttattgcactgctcttgcaaatctatagaactaaaattttaaaaaataaaaatttgcaaaataaaagaaagaaaaaaagaaactggcacgcaagatggaacctgtttgtcatgcttacccttagagccagcccattccctttgatagctaggatttcatacatattaatgctatggctctaagagttatgatttagcaatgataacaagcaatgtgtctcaggtagcagcaggactgtgagttctaactctccctgagtctctacctgtgctagtcctcagtgtttttaaacaaatccttattggtgtttgggacttcaaagacaaaagaggggaaacataagaaacataaatatttctgtttctcctgggggatatctcaaacaacctcaacaacaacacatataagatgatagatagatagatagatagatagatagatagatagatagatagatagatagatatagatagatatagatagattgttttgcaaatatttcacctcatcagccctgtgacagaagtaaatataactatctccataattaagaacctaattgagcctaggaagccatctatcatggcaaatcaatctcggggtggcagtgagcagtgaaacaactctggtttcagagtcaccatttgctgtacactgtttaaatcttttgttgcctccttagagttttaagaatgctggcttaagaccaacttcaggatgctttgaagagctgcagtagaacaacaaataaaaatatgtataaatttgtattagaaatgtcatgggaaattgagtttgtgctagactcattggcaatcaaaagtcacaaaatcccagggggaaagtcactgcctatgaacattcgtccaatgttattacaaagttaatcgtcagcgaacccaaccatcaattaattcaccttttcgacaatccagccatcccctgacatccagacaaccatctagccttccaagccatctatccatcctttttttccaacaatccacccgtgcacacatcaggtatcactttagagaacagggatgcaaagataaaaattccatggttcctgcccagaaagagttcataaagcagaggagtagcaagatatttaaacagataatccacaaccaaataatagagctatgcccagggtgccataggaatgaagacagaaagatgtctaaagaagccttcctcaatgtgcccaggaatcaaggaggaaaggttcagattgaatcttgaaaaaataataggtaagttggagaccatttaacaaagaggagctcgtgtaacaacatagagagaagaccatgaacatggcccccaactggcttgagatggagagatggtaagtgtccagtgagaagaggtggggccgaaaacgcaggaatgggtcagagttggagcacttcccgaaatgagaatttgtttattctcgtctgtattgtagagtagaactaagagaggctgctaggaacaaactagatacaaaactaaaagttatgcgtggctcaaggagtgacagggccaagaaagtagggggtggaatgccctaactcaggccagtgaagaaggtgtcagaatgggggtgtggccacagttggattcaaggaagggaaatgagacatacgaggctcaagtggataaagtgggagagatagcatgtagagacagagagctgtctatgtcagaaactatagaagtgtagacagacaagttccttctagggcagccaagtaaaatcaccatgagcaggtagcgctgaagacccagaatcttgcccctcaggtcatgcttatgtctgtctttgaggcaaaattctctccaacccagtatcgaaaagaaatgaactgcttctagagacattccttcacaccttaaggcaagttcgtccttctgttctcaccaccccaactcattcagactcaagtttgccttcccaagcaccttcctttctacataagaatgaaacaaacaaaaagccttttagtgtgtctgtaagaaattactttgtcgaaacaaacaaataaatgagaaacaaagcgcctcagttgcatcgggaaaagggacagggaaactgtgttcacctcaattgccaggaattatacacagcattttctagctctaaagacaatgaacatttttaaaagatacttggtaaactagctgttgatactactcatgaactcccattcattttcacactaatcattgttctaggacttacataattacctaagtaacgtttcaatagtcccaaaactaacataaggggtcctaatgagcatttcctattagtaaacagcatgtacctataaacgaagaggattctttcctctcttttctgatttgagcaagtttagacagtgggaaggtacaatatgaaaaatatgttaccaccagatttaggatttgttataaaggtggcagattttaaatgaccataaaatgattgtcactctttccattgagaaatggggaccacattccctctcctgcccttgattttaggtgggccgtgactgctttgaaagaatgtgataaaagcaatgctgccagttctcagctccaagccttggaaaactggcagtttccacttattttctcttgaaatcctcttcgtagaagccctgagcttctgcctaaaggctcaactactctgagactcccatgctggagaagccacgggtatacacacttcaaccctgctctgagctcagccttccagcgacctccgccaaggcaccagacctgataatgaggccatcctgggcgctccagatcagccc

SEQ ID NO: 94905 - DNA, 118660 bp, Homo sapiens
  misc_feature (1)...(118660): n = A,T,C or G
ttgacttggcaaatgcctttttctccattcctgtctataaggctcaccagaagcaacttgccttcagctggcaaggccagaaatatacctttactcttctacctcaggggaatatcaactctccggcttagtgtcataattttatttggagagatcttgattgctttttgcttctgcaagatatcacactggtccattacattgatgacattatgctgaatggatcaagtgagcaagaagtaacaaacacactggacttattggtgagacatttgtgtgccacaggatgggaaataaatccaactaaaattcagggatcttctacctcagtaaaatttctaggggtccagtggtgtggggactgtcgagatgttccttctaaggtgaaggataagttgctgcatttggcccctcctactaccaagaaagaggcacaacacctaacgggcctatttggatttcggaggaaatacattccttatttgggtgtgttactctgtcccatttatcaagtgacccgaaaggctgccagttttcagtggcgtccagaacaggagaaggctctgcaacaggtccaggctgctatgcaagctgctctgccacttgggccatatgacccagcaggtccaatggtgcttgagatagcagtggcagatacagaggctgtttggggccattggtaggtctcataggtgaatcacagtggaggcctctaggattgtggagcaaagccctgacatattctccagataactactctccttttgagagacagcttgtggcctgttactgggctttggtggaaactgaatgtttgactatgggtcatcaagtcattatgtgacctcaactgcctatcatgaactgtgtgctttctgacccatctggccataaagtgagtcatgcacagcagcattccatcagcaaatggaagtggtatatttgtcatagggcttgagcaggtcctgaaggcgcaagtaagttacatgaggaagtggctcaaatgcccatggtccccattcctgccaccctgccttctgtcccccagcctgcactgatggcctcatggggcgttccctatgatcagttgacagaggaagagaaaatcagggcctggttcatagatggttctacatgatatgtaggcaccacccgaaagtggayagctgcagcactacagccccttcctaggacatccctgaaggacagcaatgaagggaaatcttcccaatgggcggaacttcgagcagcgcacctggctgtgcactttgcatggaaggagaaatggccagatgtgcaataatacactgattcatgggctgtagccactggtttggcttaatggccagggacttgtaagaagcatgattggaaaattggtgacaaagacatttggggaagaggtatgtggatggacctctctgagtggtcaaaaactgtgaagatacttatatcccatgtgagtgctcaccaacgggtgacctcagtggaggaggattttaataatcaaggggataggatgaaccattctgttaacagcactcagcctctttccccagccacccctgtcattgcccaatgggcccatgaacaaagtggccatgatggcagggatggaggttatgcatgggatcagcaacatggacttccactcatgaaggctgacctggctatggccaccaatgagtgcccaatttgccagcagcagagaccaacactgagcccgcaatatgacaccattcctcaggagatcagccagctacctggtggcaggttgattatattggacctcttgcatcatggaaagggcagaggtttgtcctcactggaatagacatttactctggatatgggtttgcctatcctgcatgcaatgtttctgccaagactaccatccgtggactcacggaatgccttatccaccattatggtattccacacagctttgcctctgaccaaggcattcactttaccactaaagaagtgtggcagtgggttcatgctcatggaattcactggtcttaccatgttccccatcatcctgaagcagccgggttgacagaacagtggaacgaccttttgaaatcacaactacaatgccgactaggtgacaatagtttgcagggctggggcaaagatttccagaagaccgtgtaggctctgaatcagcatccaatatatggtactgtttctcccgtagccaggaatcacgggtccaggaatcaaggggtggaagtggaagtggcaccactcaccatcacccctagtgatccactagcaacatttttgcttcctgtttctatggcattacattctgctggtctagaggtcttagttccagagggagaaacgctgccaccaggagacaaaacaattccattaaactataagttaagattgccacctggacactttgggctcctcctacctctaagttaacagactaagaagggagttacaatgttagctggggtgactgacccagactatcaagatgaaatcaatcagtctactactccacagtggaggtaagaaagagtacacatggaacacaggagatccattagttcgtctcttagtattaccctgtgattaaggtcaatgggaaactacaacagcccaatccaggcaggactacaaatggcccagacccttcaggaatgaaggtttgggtcactccaccaggaaaaaaaaaccaccacctgttcaggtacttgctgaaggcaaagggaatacagaatgggtagtagaaaaaggtagtcatcaataccagctatgagcacatgaccagctgcagaaacgaggactgtaattgtcatgagaatttcctccttcttttgttaaaaacatgtttgtgcatgcatacacttgtactaagaaaatatcttcattttatttccttttcctttatcatgtgatatgagattcactgacttcatatcagcatttaagtattgttaactttatgtaatagtatgtgagttggggactgcatttccagttgtacaaaggacagttcagttatgttagacataattatgaccttattattgtcttatttgaagattatgaatgatctcaggaggtgtgtatgggttcaagttgtcaaggggtggacttgtgatggttaatactgagggtcaacttgattggattgaaagatgcaatattgatcattgtcaggttgttacccaaggagattaacatttgagtcagtgggctggggaaggcagatccacccttaattgagttggcaccacctaaaccgctaacagggaatataaagcaggcagaaaaacgtgaagaggcaagataggcctagcctcccagcctacatctttctcttgtgctggatgcttcctgcccttgaacatcggactccaagttgttcagttttgggacttagactggctctccttgctcctcagcttgcaggcagcctattgtaggaccttgtgattgtgtaagttaatacttaataaactcccattcatatgtatatatcctattagttctgtccctctaagggaaccctgactaatacagaggatcattgtctttatccattatttcagtagaaaatgaaaagtggtgatattaaaatgatatcatttcttctttatttattagtggtacttctgtaaagagaaacttctctttatcaattttttgggtcccagacagtccagggaaagcagagtaaatgcttaattcatcccctttatttaccagttttcaaaataatgagttggtttcctagcattctctaagagtgacaataattttttttaaaatcatcatcattacaaacacctagatttaaacatatttgatatgttttaatattttgtagttctagtccatttagtgctttaattctcccatctttgacatggaaaaatttctttaaattggtttctgagtccttttgacataatccgagtagcttttgacagttttttgttatgtttcctgtttgatgtttctggctcatttgcatgacccatatctggaatcatgaatttggatggacagtatcaatgtaaacttatgatatattttaccttaaaaaaagtcttttactagaaataaggtcaaactcacagcagtgagcactcctagagccagatcgttatatctaaataccatttccctctaataagaaccagaactcagagcaatggctaacttcagatgtggccctattttctcatatgaagcttgagatcttcttccaagctcattcctgttattggcagaatttgaaattatattgaaattcagttctatgtatgaaccccagattgaaaattccctagaaaaaaagctgaagggaaccattcacattttaagtagtcaagtaacaagatcagatttctgtttcagaaataccgctctgacagcaggtgcaagaatggggtgtgtggcggggatgtggagagcggctgcacagctgggaggatgtccagtgaacgggcttaatgataactcaggctggatataggggaggcctaatttaagacagtagcagtggggtaaatagatggagggctgatttgctagtcactaacaggcagcagcctcaggtcttggtgatgggggctgatttgctagtcactaacaggcagcagcagcagcctcaggtcttggtgatgggggctaatttgctagtcactaacaggcagcagtctcaggtcttggtgatgggcggggtcaggggcggagggcggctgtgtcacaggggggcagagctgcaagcaactcttttggtgccaggggcaagctgcggaaaagagaactcagagttatggggggtgtggggaagataactcctggaggaaactctgtcatgcccccagcccatcctcctacgaactagccctggaataattaggtgaatttgaaaatgtcctccgtaggcgggagttctattcggggttacctgcggcctccccggtcctggatttcagtcctctaggtatttcctgagtagctcttaataatacagaagcccctttccggtgtaggtcggtaagaagcactgcacagaaatctgatgcgaagtggggtctcctagcggagagggaggcaccttataagtaatcactaatccaggttgagatattaattattgatgtcaagaaatcgggcttttattatatctttttaaaaactgtgtcttgaggccaggcgctgtcgctcacgcctggaatcccagcactttgggaagctgaggcgggcggatcatgaggtcaggaattcgagaccagcctggccaacatagtgaaaccccgtctctactaaaaatacaaaaattagccgggcgtggtggcacacgcctgtagtcccagctactcgggaggctgaggcaggagaatcgcttgaacccgggaggcagaggttgcggtgagccgagatcctactactgcactccagcctgggcgacagagcaagactccgtctcaaaaaaagaaaaaaaattgtgtcttgagtagaattttaatgtggagaatgagctgttcggtaaatcaattcttccctttgcaaagctgtaaaacatttaaaacatttggccagggtgacatgggcacagaaggggcagacaggaggtcggcagccaggtctgtggaggagtagccagaggtgcargaggccgcgtcagcgtcctcccaatcagcctctgctgagggagtgccgcgcgcggcgagccgcgcactccccttgcctttctcccggcggctggtactcgctcttagagatctgcgttagctcagagctaggctcggtgccgcagaggcacctgaggttccacgactgcattccaggccccgccccttcatcgggatctggaaggaggagcgccgtgcgcgcccgcgccggcgcgagcgttgaagctccgcccccagcttctacctccggttctatcccggcgtttcgcccttccccacagacctctgccccggacccatttccgaggcgcgccgcatgcgccgcgcaacccakgccacgagcacgggcgcgtgckyaagtcagcgcgcgcccgctccgacgcsaggaggccccgccctccagccccgccccgctcgctggcctgccctcctcttgctaccytcccggcgcagagaaccccggctgctcagcgcgctccgcggtcatggagatccccgggagcytgtgcaagaaagtcaarctgagcaataacgcgcagaactgggtaagctggggacgaaggcgagacggcgaggagcggaggggctgtgggagcagctcgttccggrgccgccgcctctctcccgcctcctccgcatccatccttccagsagcgcggaggtgggttccggggctgcggcgcctcccggctggggccgtgkgtggttgcgaggcagaggggcgcggcgcagggtggggatctcgccctagcttggcgcagcgtgcggtccgagccaccgttcgtkggaagaacgccccccctccccagcgcctccgctcaggtaagacccccaggaaaatccttcacccgtgaactggcgcttgctgaaacctccgggtgctgaaacctgcggctgcagaaacaggagcttcctgcataccttggagtggcctgaagatstgcaragaaggcggaggcgggcgccttcgacgcgttcttggtttttcttggctctgccagtgcggttggcccaggtttgggtccatctccgtgtctttccatttctgagtttcagtgtgaaaggagagtacccaacaatgtggtcattcatgagttgagactgccctgaactgaggttctttgtgtctctgtgttaaatcggaatgtttaacaagtaggagtttggaagactccattcctggtgacagtcaggtatgggaccagtcctttataacgtttagtaatgactgccagttgactttgtaaagtgctgtgtcctcataacgttgcttacttccttaatttctctgtgatgagaaagagccttatcttcctttgtaagtgtgcagcagggaagggcccatctttggagtctggaaaggcactggtttaagtttagacggaaacgttatttcacagtccaatggaataataaggtttaaatgcaatgtctcccaaaacgttacttgccctagatgaatcaaagaaaaaaaaaaaaaaaacaagcaatttcaggcaaatgttctttggaagtcattaatttaccacatctgttgttattgttatcatgagttgtttactgattcctctctccttttatttaactctatagatggtaaggaggggaaggagatttaaaagatgaattagaacagtggaaagagcgctggactcctggcctggtctctcatcccagctttgccatttactagctgtgtgatcttgaggagagtcactttactttttcgaacctcagttgacttaagggtataatagtatgtacttcacgggattgttttgatgaacaaagaagacagatcatgaatttgaatgtgcggtgaaaccactgccttgaaactcagactcagtttcgcttctcttaccttaaggtgtttcacggttagggaaataaggttggcttacttggggtatttacagatgatttctgttacattgtccatttatgtactcatttatttattaacatttgccacatggtgcgtattctatgtagagacttgtgctagacatggtggtgaaaaatgtgggacttactgcttgccttctggtagttcatggtttgtgttggggttgtgacatttgccaagtggtgaatatgtctttgtggtccagagtgagtggcgtaagacagaagttttattgcaatttagaggagagattagtttcgcctgggcgttttgggagggtttatggaggatttcagatttctgagtcagaggggaactgcatggataagtgttgggaataaaaattactattttttttactccagaaacattgacgaaacttgtttgactgccctggagagtttttgttgggaagtggaggtaaggktcaatagggaggctggggctccgtgatgctcttgtgtttggctgcagagaagwcttgattctatgggggatttttgatggggctagaattttaaattttctgatccttgtaaatttttctctccctcatggaacacccgtcatctcttcctctctcatatttaaatcatcttaataggcacaagtgtgaagaacccatatacctttaaaattcctatcacaggataaaattggtaatccaggaagaatgttccgctgaagaaatgtagaccctggtaggacccagatggggaagccctggagaccagacaaggttatagtaaggtttaaatgaattaatagatttgaagcctgcctggcacatgagcactatttatgttcttgttaattcatccagtgtgaggggctgaagggctggggtaaggtggcagtgggactagaggagtagctgcattaaaaacatttaaggaagagttgagaggaccgactagatttaggggatgaaaaagggaggaatgttagaagatgatcctgaagttttggtctgggaagtggggagaaaggttgttacctgtgtggaaattgggaagtaggttgggcacgggggtaagggtgatattagttaaacacaaaggagagtttagtgtgtgccaggaacagtttgaaatgttttacctatattagcccattgagtttttgttrcatttctgagggtgaatattatgagagacagtggttaaaagcaggaccctggagctgactgcctgggctgaaatctggactccactatttattaactatgtaacttttggttggtcacttaatttctctatgcctctatgtgcttatctataaaatgagaatgatagcctcacagggatattgtgacaattagagttagctcttactgttatcatcctctattacaattagcatttgcattttatagatgacaaaactgaggcacagagatgtcatggagcttgttagtgctggacccatttttaaacctgttgcatttgagggacagccttagtagagatagtctatagaggaaatatgagccatgtatataattcaacatttactagataccacattaaaaagtaaaaagtaaccgcgaaataaatttcaataatatatttaacctactatatcccaaatgctatcatttcagtgttttttcaatgttaatataagttcaacactatcataattaataaagagttatagaaatctggagtttttttttttacagttagtacacatttcacttcatactatccacttttcaaatagtagggacatgtggataacatagttacagaaattgagttgtgctgaggttggaagtaaaggtttcatagttaaatttgagttaaagaatataaggaaagtaaatgtgagaccaaatactaagctttggataatagctcctgttaaggattaggtaaaggaagtgtactcgtgggagacaataggcaaagagatgggaaaatgtagtcttacagctctgggaaatggttagaattacaggaagttaaagttgtccatatacctgtgggaatagtaaagaaaaaccaagaaattgacttgctcttggagctgcctcttacttcagtctgataaagcgtcagatataatgaatatcattttctatccaattgaatctttctccaatgggaccagttttcatctgcccttggggatgtgttagttgggctgagggaaatttgggacactcagttcaggcccaggtgtcattcacccattttgtagaatcatattgggctgaaaccctgttggacctgccttacagtggagtagtgtcctaaaagaagcgtttgaaactggacgtgacattaagaagcatatgcagtctctggtttgcttttccattcacctttcacaactccctgaatttccatagctccagcccaactttctgtccatatcatacatcctcatggttttacacaagcctttccttctccctgggatgcctgttaccctttgtcaggggctgaaatgtttagagccttggaccattttaccttaacaaatgtgtggccctcataggtacatatgttcacttgctcgtgggctgaattgtttgtgctcttctgcattatgttgcattctctctgctattatgtatcttgtgatcatacttcattatagatgttttgtatctacactgagcttttcctgatataacagaattggggataaggggcagatgcaaagtagctcggtagctctgatattgaaatccttagataattcattagtatcttacaaaagcttaagtaacggaataagctccatatgtgggaggattcagattacggttttgtcacttaccatctgggtgatcttgggaacattatttaactccttcatctctcaatatcctcatctgtaatgagataataaaacataactcatagtgaggctaatggtgcataccatatggggttatagtgaggtttaaagaagttaatatatttataaaactatggttcctggcacatgagtactattcttgttctaattatttattagctcctcaaatatttaacacttaaactttgtatgtgcctttgttccaggtcctgaggatgcagtggtaaaaagacagaaaagtgtcctgtttcatggatattacattctacctgggagacagttaattaaaccaaataaatgaatgaaataattytcccttttaccaattctatctttcccaaacagcttgtctccttatatgtggatgtttttcgtagaaggccagcagcacattctggatttagctgaatactcagatgatacaaaaatgaaataagaacagagaagtggaacagacagccaaacaagaggccaatgtacttgtccttcagaggattggcctgggtgtggtcaggggcaggcattggtcttttatttcccccatccccaggtttaacagagaattgatctttctaccctgggaagatgatactaaaaaaattgcctgatgaaaagggaarcttaaacttctaccaataacagcaataagacgaatgatagtgaggtctagatctgtgttgtccggttcacgatccacttgtggcaactgaaatttaatgaacattaagaaagtaaaaaattctatttgttagttgcagtaaccacgtttcaagagctgcgtatgtggttagtggccacaggaattggacagcacagtatagaacattttcatcatctcaggaagctctattggacattgcagatctagatgaagctttgtgatggctgctattttttttttctacttatctgtgtgtttatgtattcaggtatttttactctgttcccaagaacaggaartttccagagtgagtggatactttgarattttagttttgggcagttttgcaccctggcttctggtagcatgtccagcagtattagcctccccttagcgtagttgcttcttcagatttgaagtgtcaatatgcttcccagcctgggtgtgttacattgaattttgaggagtagttctctatgccagtggttctcaatcgtgagattttaccagccctagggggcatttggcaattctggagacaattttggctattctacttgcgtatggagggggataattcttctaacatctattggaaaagatttcttaaaaaaacctaaatttctaaaaaaaattcttaaatctgaaatgcaaatgtaaaatccagttgaaaaatccaattgttgtggcatttttttcccccatcagcctggaagttgccatttcttactctgagatggatcagttactcatagcataccartaacaagacaggaaaaccccaatcctgaattgttttgaaatcagattaagtaattagttcaaatggagggagtgatttttctttttggtgttaagcggtagtagagagaatgttctcagggagactattgcagtggctatagagacttctgcagtggagttttgccgwaggggagagagattgggctcagttccaaatacagtaaggaaaagtgggaatttatggtgagggagcagggtgggggtcggkggatggaaaattactaagaggaaacattaagaattagggagtattctgactaaaacgatttaacagggttcttgctgaaggcaggcaggccaaggtgatcagacatcattgggggatggtgcagcttgaagagtttggtcagctatggaggatgggggatttctgctaaaattggactcttgaagacgtgccygaggatagggcccagttgaaagagggttcagaaggagcctgcctagtttgatcaaggagagaaatcttgtcggtggtaatcgtttctgtgacatatcttttcctaaagacacagttgttaaattttaactgaataatgatggtggaaataccagacattatgtagagaaattcagtatctgtctttggatgaatgcagccattgtgcaggctgttttctcttattcttctctctagttactttggtgcttgcataccttacctctgtctttgtctttcatattttttttttcttttttttttttgtttgagacagagtcttgctctgttgccagactagagtgcagtggtatgaccttggctcacggcaacctccacctcactggttcaagtgattctcctgcctcagcctcccgagtagctgggactacaggtgtgcaccaacatgcccagctaatttttgtatttttagtagagatgagattttaccatgttggtcaggatggtctcgatctcttgacctcgtgatctgcccacctcgacctcccaaagtgctgggattacaggcgtgggtcaccatgcctggcctgtctttcatatttttaagtgtacaattcagtggtttttagtatagccagagttgtacagccatcaccagaatctaattttagaacatttacatgtccccaaaaagaaaccttatacccattagtagtcattccccaggctctgcattttctcctagcccctgacaaccaataatgtactttctgtctctatgggttatgctattgtgggctttcctagaaatgaaattatataatctatggctttttgtatctggcttttgtcacctaggataatgttttcaagcgtcatccatgttacaacatgtatcaactagcctggccaacatggtgaaacctcgtctctactaaaaatatgaaaaaaattagccacgcatggtggcatgtgcctgtaatcccagctactcaggaggctgaggcaggagaatcgcttgaaccagaaggcgaaggttgcagtgagctgagatcatgccactgcactccagcctgggcaacagagcaagactccattttgtatttttttttttaatagttcattcattatatggttgaagaaaaaaatcccattgtatggataataacacaactttttttttttttctttcccgagacggagtctcgctctgtcgcctggctggagtgcagtggcrcaatcttggctcrctgcaacctccgcatccctggttcaagctgttctcctgcctcaaccttgcgagtagctgggattataggcacgtgtcaccacgcccagctaatttttgcgttttgagcagagacggggtttcacaatgttggccaggatagtctcgatctcttgacctcatgatccacccgcctgcgcctcccaaagtgctgggattacaagcatgagccaccacgcccggccacatcttctttattcatcagttggtggacatttaggttgttcctactttttggctatcatgaataaatgctatgaacatttgtgcataagtttttgtggttagtcttatgtggttttaatagttaatttcaacctttgaggtggacattagtgtattttggctgcccagtctctgaacctcccttgtatgtgtggtgaatgcctcactgtgtttgtgttaggagacagggtctgttacagatkaatgatttctttatttacctatgtataactagttctttttatgaaatgtttttgtttttattgtgtcctgagtgtctagaaaggatcaaacaacaaataatgaatgaacagatagtcccaggcccattctgacttctaggagtgtcttagggccggaattcccagttggaggtaatggaatggagggcccttccattaaaggtactgatataaaaacctattaaatatttagaagttctttaatctttaacagaatagttggagagccgtaatgtgtatgcagagtgtatgcatgacagatggtactgatgagataagcatgctagtaacttagtcctgattcaggacgtctgtggtagggcctgagatttgcttcctaacaagcagccaggccatgccagtgttgccacacagcatattttgtagtagcaaagttttaagagtagccttttcaagttgttttctcaacatcctccagggatgtatgatcttcacttgctttttatcattgacttattaatatttaaaatattaatttcagttattagttaactctgtgaactaaaggttttaattatcaagaactctgtgaactaaagatttcttttcattgtattctacagtctctcatttatccatattgttacgatctctacagtttcatccatattgtgtctagggacataaaagaaatgtgcctgttaccatttcagggatttctcattggaggaatacactgtttatcagtttagggtgggtgataggatggatgaaagatgttgaagtccacaattatgcttagtatttggtatatgctttgtgtctttwtacatttcacttaaaaatgcacaattctttataaaatgatgaaaaattcacaaaatatgaaattctctaagtagcatcacagagaagttgattttccttacaggcaagtggataaaataacaaaacggccatgtggaaattaagatgggtcaaaaagggccacttgtgtcattgatgaggatggaagtttgtagtatgtacagaaaatgcataccacaaatatcagaggacatgcaatattagcctagtgacaggattgttagtcatttagttctaaatgtagtraatattaaatggccttgcaatgaattattccatttctgctagatttaagatttccaaatatcagtcatcatttcatttgcaagttacacagagaaaacaaaccatactttaaaataaatgtcttgtatctarcttttatgagtactgactagtaacaaaggaggttgggcattgtggaaaatatggataattgtaactcattgtaaagaacatggctgtgctttgrtcaaggataggtcgaggcaaacgtccagaatgactcagcgagtttacagcgcaggtatataactccacttgttatcacagccatgtagccataacatgagaaggttcatcatttggctgtaagccactattgtctgtaaaagatataattgccctgctgacattgtatgggtgcgcttgcacccagagaaggagagagagagccagagctgtccatctttgcagatggacaggagcgagccaggacacagctcgtcttgctcacacccagagagagagagagagatttaagctgttgaccctgaacggagagctggccatgtagctatgtgtgggagctgctggactaagcagtcaagacaaggcaaacagtgtgagagagctaatgtgagtgagctgctgatgagagagctgctgagtaaaactacctttcacctgcatatgcccctgagtgttctttcagctayctgctcatccacttattcggaccccagcatgagctggaacctgaccccgagcaggacactcatagtccttgacctactttctaggaaataatatataggcacaagaagacaaataaatgtgttaatggtacataaataacaaaagaatgatatgggcagtaaatgttatagggacttcctaggtacacatacttacactgagccagatatacatatatatatatttttctacaaagcacccagactattaagtaagaagcactaagcttggtttctctctcctgtgtatggaaactagggcacagaagactcagtatagaaatgtactttaaaaaaaaattccaacccagaaagccaagaatagaaatttagaggtggaaggaagtaactcattctcaacccttaatgagtcattaatgtcatgtttcctcagcagaattatagaaaggatttggctgaagtgggtgcagaaggaaggaaaggggaagtagaagaagattacatgtataagtggctgtggagtctaaaaattcaggcctaagtctaccactttgcaattctgtaaccacccaatgcgttcattttgcctgctgcccacaggcaaatttatcaagacagggtaattgcaatagagaaagagtttaattcatgcagagccagctgaacaggagacttttattattgaacaaatcagccttcctcaaaatttagaggccagagttttttaaggatagtttggttggcaaggcaatgggtgcagccagttcgttggggatgtaatcataggggtgtggaagatagtcctagtgtgttaagtacacttctggttgggagcacacaggtggttggtgggtccaggtggagccattgagagtcagaaatgcaaaaacctgaaaagacatctcaaaaggccaatcttaggttctacaatagcgatgtcatctgcaggagtaactggggaagttgaaaatcttgtgacttctggaatagtggctggtaatcatttatgtttacaccttgggaggattcaggctcctctcatctcctaacctggtggtcttttattagctttaaaagatggtttacttttggggaagtagtattatcatttaaactaaaaactaaatttctcccaaagttagcttgacccaaacccagcaatacctaagggcagtttggaggttaaaggcaagatggaggttggttagatcagatctttttcactgttaacaattttctcacttgtaatttttgcaaaggctgtttcaattccagtagttttataaaagtgctctttgatttactttgaaaaattgggagttaggacaatgtggcaattttttttaagtttattttttaatatgaaaaatattgttaaaaactttagctgaattaaatttaaaagagtttgagcaaagaacaattcgtgaatcaggcagcctcctgagccagagtaggctcagaggctccagtgcagctgcatggyagaagatttatggacagaaaaaggaaagtggtgcacagaaaatggaagtgaggtccagaaacaactggattggttatagctcagcatttgacttatttgaacatggtttgaacagttggccacatttgattggccaaaactcagtcattggcacaagggtggatacagtctgtttgtctccagctaggttagtttastacatatggagaaacctttaggctgaacttaaaatatgtaaaagaggtagctttaggcttaacttgatttaacaatatcaaacatacataaaccaaaaaaaatctccttatatccagagtactatgtttgctgccagaatctttttaaatgtaggaggcaagaaactgagggagcattctttttagagattaaaacagacggtctctacttaccctgtctgtattttttctcagccatattctcagcagttgatagcttgacagataatttttatgcattctagcttgatttgataagaaaagcagaagatattttacagagcccaaatcaattaaaattcattagatatatgtttcttcttgtctataaagagtgaagtaacttggaaaaatcctcaaacaaaatgaccaagccaaacaggttctaccagtataggcagcaaaatgtgtatagcaccctctgcaattcccttttagcagagactttagctcccttttcctccttagccagtatcaatgggagctaaagctaaagaggtgccactgcttctcaagatatacaaatgtctacttctgaagccctcttttttaagttcttggaaatgtagagctggtaagttgtatttgcttcatcagtttattgaaaagaaatgaatctagagactcattacaattttttgtaagtgattattaaatatgtaaaagtattttattggaaataaagtattaataattattgtgtaaataattattgttaatgagatgagtagatgggaaggggtgcagcttttgtggcatacctattaaaaagagttgtcaaattgtccctttggtcccagaggatttttcaggtaatggtaatgatgataataagattcagatgtgtgggagatggcatttctgctgtacaggattgcgaaggggaaggtaggaaaagagatccttaatctcatggaagttgaagatttgtatagaaatttaattccttaaaagtcaaatctgtgtattggtggaggtcagcaaaatgacagaatgggacttcccagtgcttgtcttcacacagaaacataaattgaacaactattcttgcacaaaaatactttaataaaagctaaggaaaccaggtgagagatgaccgcacctggatgtagcagagaaatcagaaaaaacacattgaagagagtagaaagaacagttttacatgacctatattactgcccccagcctgcaacctcaggcagcacgtggagaaagataccctttgcttaggggaggaagagggcagtaagcaaaagattttgcctcagaacccaacaccaggcccacctcagtgaaactcagtgcaaggcaggcccccgtagccccagactccaggatggtacctatggattgagcgtccaagcctaccctggtactaagcaggattctgcagcccaaggttccagctcctccaacctccaccaccaggccagacccaattgatgcaagttttagacttgtcttagggccaggctggccccagtggccctgggcttagagctacctttagtaccaggctggctgtcacaggcaggcacctgtggatacaggcttcaagctgtcccagcttcaggccctctccaggtttcagaccagctgagagccaggttggcccacacagccctgggcttcaggtctgccccagtacaaggccattccctgtagccccaccctccaggctggctgctgcaaccccatayttaagagatccaaggtttcaggaccatcccaatacatctcagcactataccagctcccattgacccaggctgtaagaccatttctgtggacccaggttccaggccagcacccatatgctgagcatctaggtcagctcccatggcttcagggcaggtcctgtgattmtaggtaggcttcagaccaaccactgtagacctaggcttccacatccgctccagcaccagctgagctctgcctacctgctgacccagataccaggccagcctccctgaggactccagcagcaagcctgcctgtgcaccatgccagatggcctycccagattggacaggctgactggtgaagtgcttcccaaataaagccagtctacaaagactggaatcagtccctacctcttcattgtacagatattgatataagacaacaagaaatgtgaaaaaacaaggagacttaatactaccaaaagtatcaaaataaccttccagtagctgattcaaaagaaatggagatacatgaactgcctgaaaaagaattaaaaaataattgtttaaggaagcccagcaaacctcaataaaatagaaataattcagtgtattctggaaaacaacaaatgaccaacatgagaaatttaacagattgaaattattaaaaaaataaaaaattctagagctgaaaaatttaatgaataaaatgaaaaatgcaatagagagcatccatagaagcactgatcaagcaaaataattgtacttgaagacagatttcttccatagttagaggaggaaaaagaagaatgaaaagtaatggagaaagcttacaggatttataggacagcatcaaaagtacaaaaattgaggtataggagttcaaggagaagagaaagagggttacaaagcttatttaaataacaacagaaaactttccaaatctggggaaaggtataaataagtacaggaagatcaaaagttctaatcagattcaatccaaacaagactacctcaagacatatagttaaactgtcaaaaataaaagaggattctgaaagcagctagagaaaagcaaatcacatacaagggagttccaaaaatgctagcagcagacttttcagcagaaattttgtagtccaggagagactgggttgacatgttcaaagtgttgaaggaaaaaaaccctgccaacaaagaatactgtattcaacaatgctgtaattcacaaacacaaacatacagacttgcctagacaaagctaagggagttcatcactaccagacatgtcttaaaagaaacactaaagggagttctccaagctgaaataaaaggatgctaattagtaacatgaaagtataaaactcactggtaaaagtaagtccacggtcaagttcagaataaatactgtaattgtcgtgtgacaataatttatatctccrgtatgaatgttaaaagacaattaacaatagtgacaataatttgttaagggatgtcttcactgttgagttctaccaaacatttaaagaaagattaatgccagtctgtattagttcgttttcacactggtataaagaactctctaagaccaggtaaactataaagaaaagaggtttaattgactgacagttctgcatgactggggacgccccaggaaacttataatcatggcggaaggtgaagaggaagcagggcacatcttacatggtggcaggagagagagaacaaggggggaagtgccacactttkgaactatcaaatcttgtgagaactcactatcacgagagcagcatgggtgaaagcacccccatgatctgatcacctcctwccatgtcgctccctccacacatggagattacagttcgagatgagatttgtgtggggacacatagccaaaccatatcacgattttttctcaaactcttccaaaaaattaaagagggaatacttccaaatttattttatgaggccagcattaccttgataccaaagccacaaaaggacactagaagaaaagaaaatcacaggccagtgtccctgatgaacatagatgcgaaaatcctgaacacatagtagcaaactgaattatatagcacattaaaggatcattcctccttatcaagtgggatttatttcagggatgcaaagatggttcaacataggcaattttttcttttttttttttgaggtggagttttgctcttgtcacccaggctcgagtgcaatggcatgatcttggctcactgcaacctccgcctcctgggttcaagcaattctcctgcctcagccttctgagtagctgggactacaggtgcatgccaccattcccggctaatttttgtatttttagtagagacggggtttctccacattggcctggctggtctcaaacccctgacctcaggtgatccgcctgcctcggcctctgaagtgctgggattagtggtgtgagccaccatgcccagctaacatatgcaaattaataaaggtgatgcaccacmctaacagaatgtagggcaaaaaacctatgatcatctcaatagatgcagaaaaattatttgaaagagttcattaaccttttatgataaaaactctcaacaaattaggaaaagaaggaatgtacttcaacgtaataagggctacatagttcargcccacaactgacatcatactcaatggtaaaacaggaaaagttgaaagctttccctctaagatcaggagcacaacaagggtgcccactcttaccacttctattcagcatagtactggaggtcctagacagagcacttagacgagaaataaataaaaggcatccaaattggaaaagtagaagttaaattgttcctgtttgcagatgacgtggttttaaataatatggaaaaccctaaagatttcaccagaagactgttagaataaataaatttagtaaagttgcagaatacaaactcaacattagaaaagtagtagtgtttttatattctaacattgaagtacctgtaaaagaaataagaaaacaatctcatttatagttgctaccagaaaaataaaatacttgggaatacatttaaccaaggaagtaagagacctgtatactgaaaactgtgaaacattgatgaaaaaaattgaagacagaaataaaaggaaacattgtatgtattcatggattgaaagaattaatattgttaaaatgtccayactacttaaagtgatctacagattcaatgcaatccctataaaaattccaaggattcttcacagaaatagaaaaagcagttctaaaatttgtatggaaccacaaaagaccccagataaccaaagcaatcttgagcaaagataacaaagcgggaggtattaacattacktaactttaaaacacactctgaagytatagtaatcaaaacagcatgatacagaaacaaacatataaaccatacaacagagcagaaagcccagatataaatacatgcatttatatttaattgatttttgacaaaggtgccaataatacatgatggggagaggacagtcttcaaaaaatggtgttgggaaaactggatatctgcgtgaagaagaatgaagttagacccttatctcacctcatataaaaaaaactcaaagtgaattaaaaatttacatgtaagatcagaaagtctaaaactgctagaggaaagtaggaaaaaagttttatgacactagtttaggcagtgatttttttttttttttggatatgactccaaaagtacaagcaacaaacatgaaaatagacaaatgggagtacatcarataaaaattgtctccacagcaaagggtgcaatcaacagagtgaagagacaacctacagaatgggagaatatatttgcaaaccatacatctgataaggggttaatatccaaaataggaagccaaacaactcagtggcaagaaaacagtgcaattaaaaaataggcaaaggatctgaatagacattcctaaaaggaagatagacaaatagccaacaggtatatgaaaaaaggctcaacttctctaatcatcggctcaacttctctactcatcagggaaatgcaattaaaaccacagtgagctatcacctcacacctgttagaatggctgttataaaaaagacaaaagtgttggtgaggatgtgagaaaagaaaatcctagtgtgctattgtgggaatattagtatagccattatggaaatcaatatggaggttcctcaaaaaattagaagtagaactaccatatgatccagcaatcccactactaggtgtataatgaaaggatgtgaaatcagtatgtagagtagatattggcattctcatgttaattgtaaattgcagcactatttaccatagtcaagatatggaatcagcttaagtgttgaccagttgataaatggattaaaaaaaagtagtatatttacacagtggaatactattgagtcttaaaaattatacaaatccttttgtttgttaccacatggatgataaaatgttaagtgaaataagccaggcacagaaagggaartaccatatgatctcacttacatgtggaatctaaaaaagttgcacctgtagaagtagagagtgaatggtgtttatcagggactgcgaggtttggggtcgagtgggggtygaggaggatggttggaggagatgttggtcaragggtacaaaattttatttagatacaaggattaagttcaaaagatgtataacatggtgatgataataacaatgtatttctgaaaatgctgctgtggacatatgtatgtacaagttttatgtgatcatatgttttcatttcttgtgagtataatgtaggcatgggattgtttggtcatatgataactctgtattgaacattttgaggggctgctgttttccaaaatgactactattttcgcaacaacaaatatatgaggattccaatatttccatatcctccccagtacttgttattatctgtctttattacagctatcctagtgggtgcaaagtgataccttattgtagttttgatttgcattttcctggtggctaatgatgttgaatattatttaaataatgtggcttattgaccatttgtatgttttctttggaggaaagcctgttcagatactttgaggcctaagtaattttatgctttttttttttttttgaagcagctttgggagaacatgaagttataaccagtacattccacttttttcatttcagaagtagctatctcatgatacccataggcatctctttcacactttctttgggagtctactcaaatgtcaccttcttagcatttcttgattatcctctctaaagaggcactctgtttccttttttaccctatgttatttttctacagtgcacttatcactctctgatgttgtagttaagttttattggtttacattgttccccagtgggatgtaagctaattgagggtagtgaccttgttttgctcacatggcatactagtagggcctcagtagatactatctgaatggatgaacgaataaatgaatgtgtgaaaggactaggctctggagtctgccactcactagttttgggatctccggcaagttatttaccatttttcagatttaaaatcttcatctgtaaaaccttagtagtaagagtacctatgtcattggattgctgtgaggattaaatcagttggcatgtggaaagcagtaaacaccatgccagtactctaaggaaaaaaaaaaactgttttatctttttctttgcttttggcatgttacatagacttttgtgtgtttgcaaggaatatgtgtttgccttttaaaggactcatrtaaactagaattttttttttcttttttttctagggaatgcagagagcaaccaatgtcacctaccaagcccatcatgtcagcaggaacaaragaggtcaggtggtggggaccagaggtggctttcgtggttgcacagtttggctaacaggtatggtcaagagagagaaagcagtttattttaaaagcagtgcatataggtaaccttggactaggcgtaagcatatttaaattttragctctgttcttgtatttggagcatcacgacatataactgacatagttgcttaataatatttcttgttatttttttttttgttcttttataggattgctgttaaataaaggtaaaaaccacaatgaaccttaaaactactttttcatagatagcacattaaattctacacacttctgagtgcaaataagatctggattctgctctgagaagctaacagtgaaaaccatacgtcttagtctattttatgctgttataacagaataccagagactgggtaatttatatgaatagaaatttatttctcatagttctggaggctgggaagtccaagattgagggactagcatcttcttgctatgtttgtaatacagcagaaggcatcacatgctgagaaagagcaaaagattgaactcacagcctcaatcccttttatagatggattattccattaatgagggtggagccctcatgacttaaacacctccgttagactgcatcattcaacactgttgcattgaggattaagtttccaacacatgaactttgagagacacattcaaaccatagcatggtacaaccagaaagaatgagtggcaagaattttcacaaagtgaatttctattattcagcttttgctatggcctttgattgtttccctagagtcttgtcttttggcttagtcatagcaggctggtgagtgactgaattgatacagattttgaagtagctttaaaaacgatggatgctttcacttctrtgaattatatttaaaattttgatacattttgccacattgcccactaaaattttatcccagtttactctcctaccagcagtatgggagggtgtttatttcccagtgtctttgtcaacagtggttgttaccagttcttaaaaatttgtgctgattggcaaaaaagttactcttttgtttttttaatcatgtttcatttttagacaggtctgtttgtttttgtatgaaagaagatacactctcacattcttcccatttcctcattcttaattccagacagttaaattgttacatttttattgcccaggtttatagcacttaatgggtcaatagttggtagcttcccrtcagttattttactatgacatgttcactcatgagctctttatttgaatggtctttaattgtctgtatttcattgttaaataatttttgcaagatggccttccattaggttctgaactcctggaggttttatgtttgagaatgactaccttttatgccaacttggctgggtaaaatatatatttggttcatactttcttggtcttggaattttaaaaacagtactctattgtcttctggcattaaatgttttgaataagtgtgagcctaatcagctttttctttttaggagcgttccttttttcatctggatgactaaggaattacttatttccctgtaaaaatacagggaaatagaggcttttgtctttctcagttaggtccttatctgcagttgatttttgtgtatagtgtgagggacagatccattttcgtttttttccatgtggataatcacttatcccaagaacatagatttatgagggtgtcttttttctctgatctgcagtgtctgctttgttttatatcaggtctccacttatgtgtgggccctctgctctgtcccactgatatatttgtctgttcctctgttaatgccacatttcttagttactgtatttttataaatcttgaaggacagtggagtaagtcctcttaccttgttcttcatcagcaatgttgacttttctttttcattgtgacttcctttttttttttggctcttagtgttgtctaaatcttgtaatagatttaaccaattcccctgaactctgttgttatttagtttgggattgcattgtatctaagattaattttgggggaaaattgatctttagaatattgggtactctttttcttgaacgtggtgttttccatttatttcatcactaatgatacttataaataaagcttatctgattttttggtacttgctctgtggtctagtatgtaataagttttcagtcatcaccttgcccccaccctatgccttcctcaattgggacgggatggctagaattggctggagttggtatttcccttcccccaggtcagttaggttccaataaaacctcagcaggttaggctttggttaaatagtttctcctgagttcagtccttgttaaaaaaaaaatctggtgctctggtgtatttcagaatggaagcacttggggatttttctccaatatttactgtgagaacctgattgagctcctggaggtgaaactcacaatgttgtggggccctccctataacgaggttcctttgaaatttttaactctcggacttgtccacactgagccttaattaattcatcaattacagtttaggtttttctgtgtgacactggttcccacagtacttttccccacagtgagtctctgctgcagtcaatagttactcccttcatttgcctgtctccccattcatggaggcagtggtttgccccctgtcctcccctcacggatccaagaagagttattctgttcaggttttcacttgttcggatgtggtggtgactttcaagctcctcccatgtggacctggaaaacttgtagttttcataaacgtgtatttgaaaagaatatgtattcacctgatgtgtgcagtattctgtataatagattaagcttgtcagttgtggtgtcaaatcttctgtagccttcatatatatgttttttgataatgatgttggacatggaagtcaagatttgtttttttcttgcaattcagatgcttaacctggatctgcccaagctattgagtgatttttgtatgctgttttgctagacgtgtttcactttttatcagattttattttagggaaattttgttgttttgtgtttctacattggttggtatattaacttcccagggctgccataacaaattaaccacaaaataggtggaagaaatttattctcccacagttctcgaggctagaagtttgaaattaagtttgtggtgaggttggttcctcctgtaagtgctgagggagaatctcttctgtttcccccttggcttctgctggtggctggcagtccttggtgtgtggacggatcactccaatctctttttgtcttatagccttgtaagaacaccagctgttggatcaccctaatccagtatgacctcctcttaatttgattgtgtttgtaaagactctatttccagataaggtcaccttctgaggttctgggtggacatgaatatttggggaacactattcaacccagtagagctggtttctattcttcaggtataccagttatccatatcttagatttggattgcttatcttgtattatcagtttcctctgactgctctgttgactataattatctaaatgaaactgtttatatcagtaattcaattttcaacagtgcttatttgtttcaaattaaatatgcacttaaaacatataaatacacatgtatgtatgaacagacacttttattataatttaggttgtttttgttgtgtaaaagtttagagtttcaaacttttttttccctgatacttgatgctcaattggtggttaaaaacaacaattcaaaagaaataacgaacaacctttttcaccctagccaccatccctttgttccacctactgttactgtgtaacaatttgcctaaaacccagtgttgtaaaacaattgccatttaactttgcttaccattttgaaggtaagggatttaaaagggctcagataggcagctatgcttagggcttgcttggttgttgtcatgctggcctgggccacagtcatctgaagtttcagctgggcaggatgtccaagatgacttactcagatgctgctggttgtcagctgggagcttagcgggctgagagtggctggtacacctgcttgggatcacgttagcatggtggtctcaagggatttagtcrctggcttctcccagtaatgtgaccaaagaaaagctgcatagcattttgtgacctagccttggtagtcacacatcatcgtgtcactatttcactacattcttttggctgcaggtaagtcctaaggccagcccacattttagggcagggaattagtacctcttgatgtgacagtagtaaagtcacattgtagacacttgtaggatgggatattcagttgcagccatctttggaaaatgcagctggctacagtcattaatatcggtttttaatgtataaagcaactgacactgtatcgatgctctcaacatatcctcctcttcttttttttttaaatttttctttaaggtctgggatacatgtgtagaacgtgcagtttgttacatgcttgtggcacggtggtttgctgcacctgttaacccatcatctgggttttaagccccacatgcattagctatttatcctgatgctttccctcccctacctacccccactgggaggcctccacctccccaccgataggccctagtgtatgttgttcccctccatgtccatgtgttcagctcccgcttatgagagagaacatgcagtgtttggtgttctgttcctgtgttagtttgccgaggatgatggcttccagctccgtccatgtccctgcagacgacatgatctcattcctttttatggctgcatagtattccatggtgtatatgtaccacattttctttatccaggctatcattgatgggcatttgggttggtttcatgtttttgctattgtaaatagtgctgcaataaacatacatgtgcgtgtatctttatagtagaatgatttatattcctttgggtatatacccaataatgggattgctgggtcaaatggtattttctggtactaggtccttgaggaagcaccacactgtcttccacaatggttgaactaatttacatttcctaccaacagtttaaaagcgttcctatttctccatagcctctccagcatctgttgtttcttgactttttagtaatagccattctgactggcatgagatgatatctcattgtggttttgatttgcatttctctaatgatcagtgatgttgagctttttttcatgtttgttggccacctaagtgtcttcttttgagaagtgtctgttcatatcctttgcccactttttgatggggttgtttatttcttctgtattaagttccttgtagattctggatattagacctttgtcagatgggtagattgcaaaaattttctccacatatgcaaatcagtaaatgtaatccatcacataaacagaaccaataacaaaaaccacatgattatctcaatagacacaggaagggcctttgataaaattcaacatctatgttaaaaactctcaataaactaggtattgatggaacatatctcaaaataataagagctattcatgayaaacccatagccaatatcatactgaatggacaaaagccggaagcattccctttgaaaaccggcacaagacaaggatgctgtctctcaccactcctagtcaacataatattggaagttctggccagggcgatcaggcaagaaaaagaaataaagggtgttcaaatagaaagaaaggaagtcaaattgtcccagtttgcagataacatgattctatgtttagaaagccccatagtctcagccccaaaactccttaagctgataaataatttcagcaaagtctcaggatacaaaatcaatgtgcaaaaatcaagcattcttctacaccaacaatagacaagcagagagccaaatcatgaataaactcccattcacaattgctacaaagagagtaaaatacctgggaatacaacttgcaagggacgtgaaggacctcttcaaggagaactacaaaccactgctgaaggaaataatagaggacacaaacaaatggaaaaacattccagcctcatggataggaagaatcagtatcgtgaaaatggccatactgcccaaagtaatctatgtattcaatgctattcccatcagactaccatttgatattcttacagaattagaaaaaaactactttaaatttcatatggaaccaaaaaaaagccctctcttctrttttttttttattccagttagccttctgtactaccatgaattctttcaagagcattggtacattagactttagtattttatctcttgttttagaactatcttggttatgacactcgccaagttggcaagtaatagtgcataaatgtactctttccttctctttgtttactgagtaaatactgttggtataggaaggtgagttgaaatgagggtgttctattaaaattaattatattataaattggactcccagataattgtatcaaggtggtttgtgagtgctgatgatctaggaaaatggaggtacctttgtaacatttctttcttttgtcctttctttttcttccctcaccagaaataatttgggcatatgactttgttttaaaatttggcatgcagctttagaaaagtggtaacgagaggacaaagtgaattcccaaccatgtctgctaataaaattagttaagcctttctgaagtttatcagtgatttctgatacgtttgctcatagatatttcattaaaacaaacacttattatgtttaaactgtaggtgttttcctaggcaagaggtaaatcttaaagagaaatattagataagaacattactgagagattgctttgcataatgaatgtatttaatcctgtgattgcaattttttatatctcttgagccaggagtttgagaccagctggcgcaacatattgagaattctgtctctacaaataataaaataagttggatgtggtggcatgtgcctgttgtcctagctatttggaaggctgaggcatgatctcttgagtccaggagtttgaggctgcagtgagctatgcagcctctgcactccagcctgggtggcagagcaagactcttgtttctgggraaaaaaagtattactacatagttatccttctaactttacacatggaatctgtttggactgtttaattttaggcttgtctggagcgggaaagactactgtgagcatggccttggaggagtacctggtttgtcatggtattccrtgctacactctggatggtgacaatattcgtcaaggtctcaataaaaatcttggctttagtcctgaagacagagaagagaatgttcgacgcatcgcagaagttgctaaactgtttgcagatgctggcttagtgtgcatcacaagtttcatatcaccttacactcaggtatgtggtttttgtgccattgcctttctgcttacrtttattgagaatatggtatcaggcaaagcacatactttaaacattgatatgtgctttgaggctaactctactcctccccagctaccatctctttgttcctgtaacataggattaaaataacctaaaacatttctatgctgtgactttctaagtaaatctggttttgataaaacctgcttttaaaaaagccgtgaagtataacacagtcattgaatttaagccaatggccaaattatttcaggctcaacttttcaacttaataaamctatagtgaatacttgacagatgtcaaactccggagaaaatctaactttcttaacatgtgccctaccatggcttctttgctcagaattcgttgttcttagcttgcatcatagttcctcttattttagagactgcagcaacaacaaaccatgtttgtgtatttctctgaaaaaattatgtcatttcttatctcaggatttttgtttcctccctgcctggaaagcactcttctccctcctgttcctgttttcacagtgtcagctgacttctagttatagatggagacttaggttaggtaccttaacacattattttattttcttcaacttttattttaagttcagggctacatgtgcaggtttgttaaattggtaaacgtgtgccatggtgatttgctacacagatcatcccatcacctaggtattaagcccagcatccattagctattcttcctgatgttctccctccccaaccacaacagtcatcagtgtgtgttgtttccccccatgtgtccgtgtgttctcattattcagctcccacttataagtgagaacatatagtgtttgattttctgtttctgtgttagtttgctgaggttagtggcttccaactccatccatgtccctgcaaaggacatgatatcattccttttttagctacatagtattccatgatatatatatatatatatacacaccgtgttttctttatccagtctatcgttgatgggcatttaggttgattctatgtctttgctactgtgaatagtgttgcagtgaacatactcatgcatgtatctttgtaatagagtgacttatactcatttgggtatatactcagtactgggattgctgggtcaaatggtatttctgcctcaagatctttgaggattcactgcactgtcttccacaatggttgaactaacttacattctcacctacagtgtaaaagcatttctttttctccacgagctcaccagcatctattgtttcctgattttctaataacagccattctgacgagtgtgagatggtatctcattgtggttttcgtttgcatttatctaatgatcagtgatgttgagctttttttcatgtttgttggctgcatgtatgtcttcttaagagaagtgtctgttcataccctttgcccactttttaatgtttttttcttgtaaatttgcttaagttccttgttgatcccattctgtaggttgtctgttcactgtgatgatagtttctttttctgtgcggaagctctttagtttaattagatcccatttgtcaagttttgcttttattgcaattacttttgatgtttttgtcatgaaatcttttgcctgtgcctgtgtcctgaatggtattacctagattttcgtctagggtttttatagttttgagtttcacatttaagcctttaatccatcttgagttaatttttgcctatggtgtaaggaaggggtccagtttcaatcttcygcatatggcaagccagttcyagcaccatttattaaatagagaatcctttcccactgcttgtttttgtcaggtttgtcaaagataagatggttgcaggtatgcatatgttatttttaaaaacycaattcattgactgttgatattgatagtagctgtagtggtaataatattaacatttattgaacacttaactgtgttctggtaactgctagagtgcttttatgtgaattaactcaagtaattcttgtctcctagtggggacacaaggaaacaaaggtgtgcattgcccaaggtcacacactatacttgtagaagagcacaggtttgcatccagacagtgcgtctcctgggcttagatgctatgctgcctccaaaccccactggctccttgacagctgggaccgtgtcttatttgcctttgtaatcttgatgccaagcccggctcttggaccatattatatgattagtgtttgttgaacaatagcatactcccttgggaagccctgatatcagtgaataagcgagttagtatagaggtgagaggcagggtctttggagttggaaacaaaggggctgaaatctcagctctgccagttattgctgctgtggccttgtccagcacacttaacctcctgcagttcaagtaatgcctacaacatagggttgctctgaagattacgtaagtcatgtgtttaaagcctcagcacagtgcctggcatgtaataactattcaataaatggaataaattatattagcacaattctagtactgtatcataaattttgatggttacttggactttttttttttttaaacaagatttgacctgtaagaattatggataagtgttagattgagtattatttacacaggttcacttaattgaaccatggcaggagtcctaaaacattctgtaaaaaccatttcttgaaacccttgggtcattgccaatatatcagtttaaagtgtataaataataggagcataataagagttagagttcctgaatccttggatatacacaattttcataaaaatatgatattggcattcttataccttctggtgggaatcttgcagctctcggaaaagggggaggtctataatacctgttatggagagctatcagccgacacctgggtatctragagtgtgtgctgatctgctttgtggcccccttgtttgtatagtgtggagcaaaatcttygttgacctcatctataaaagcactgataatgaggtttggactatgtttagggcatctgaaaatccatgaaaatatttggattgaaacatgcaatacaggacatgtgtatttttctgtatagtcatgattatatttgttcattcaagagaagtttattgggaatttccatgtcaaccactgaactgagcatattggttctgaaaattaacctgatacttcctattctgaaggagttggtagtctggtgggaatgcggagatgtgaagagttacaatatcttgaggcaagtgatgaagtacatatatgtgaaaggtgttatgagagaatcacagaggagctgctgcttgaaatgagtcatgaaggatgaatcagagtatactagttagaccagagggagaaaactgtttcagacagaggagacagtatagtatgctcaatggaatgtgagacagtttgtttttttggggaactgtaggtaggttggtgtgactgatatgaaggatgattgtgaggggagatggagctgatcaatttgcagaggctaggtggtgacttctgcactgctcagaaaggattttgccccaaaaggagttaatagtttgagattataacagagattggtatcattgggtttgcatttgagtgaggtcatccttgaagcctggattgagactggtctggaggtaggagactagccaggaggcttgccgtagcaccagctccttcagggaagaggatgtgaactcaagcagcagcaatgggactagtaaagatgggggcatatttaagggctcttgaggcttgagtagcatcagtaagacctggtgcctgcttgattgctgattttatgggagagcagaatgaagcatggtgctttctgaataaaggttggtatgactgagttatgaagtacaggataggagsggaggacatgcgtatttcatttttggtgggttatgtttgaagtgctagtggagttagtctaagtggagattaccactgggccatctaggaaattggttttagagtttaggaaagttgtatgggattgagatctagatttaggaatcattaactttattagttgaaacctagatgaggacgattagatacagaagagtaataagatgagagacagggatagaaactcattgacactttcctttaaaaggatagttagaatagtaagatcatagcttaattgctattccagacactaaacttgtaaagctgatgagatgattttaatatactggaaaaagatctatgatcatwtgtagtgagtattctgagaaccctgagaaagcaaggggcctcatcagcctgagcatgcagggaaggcttcctggaggaggtcaccatggagatgtgctgtgaggaagcacattggtttgtccagaagagaggggttgagtgttgctggtaggggttgggttgtggcgtggggaggcctaaggtagaaacagcctgaccaggcaggtattatcaatagagcatcaagtgcaagactgagaatggtggggccaggtatagggctgatgcctcacattaagaaactcggattttaccccagtagtggcagagagtctctgaagagttcagtaggatggtcagatttgcatcctttgccacagtgtagattatggctttgagcagatccgagttagaagccagaagacctgtaatatgttgaggccgttcagacaagagaagtgaggttgaactagggaatagggaaagattgcaaactgggttggtgtaatatttagaagtaacatctgaaggactttgtgactgaattaatgtatgggaaagggaaggaaccactcttaggattgtgggtgtgtagtgwggtcttccttgatttgggaagcatatgagagaatgtaaacttgagagaaaagggactggatttagttttggacatgcttagttyttggcacctgtgatatatccaggtggacataggaagaatttggacatgtgtgtttaatttcaggacagaggtcagggttcaagcttcagtgttgatgtatgtgttgtagtttatactgtgaaggcacttgagagaaacgctyaagaactgtgtaaggtgagcagtgggctgtgatgggagtgtgggcaactccagtgttaagggatgggtgaaataggaggagcccaggaggagtctgcctaggaaagatcagggaataacattataggcatccataggcatagcagtgggaaagcagcaaagaggcctggtattttaaatactgaaaaggacctatggttaagggaaagtttttatatgatttgttagttcattakgctgaaaatttttttagagacaagatctcactctgtcactcagcctggagtgtagtgactattcacaggcacaattgtagtgtgttacagcctggaacccctgggctcaagtgattctcctgcctcagcctccccaagtagctgggactataagcgtgctacaccactgcccttagcagttgttttgttttaaatgggtgaacttcccttagcagttcatttgttttaaatggacttgtacttgtttgttgctggggagcagggaacccagcaaagggggaatgctgaagatttcaggtggagtagagagaatgggttgaacaggtcctgtaggagttcatgaaaggggagggaattcctagtatgtgaaggtaggagtggcagggagaaaaggatcattagtatgtagataaatttgtatgacagagaagagattttgcttgaaagagaagagattgagagcttattcttggagatttgttttktttttttttttgaaacatgaagtatggtaatctggtgagagtggaagtaggtgaggattgtcagagggaccataaggaagatggcaaatgctaaaatgagctgtgtggaaaaaggatggtagaaattgcagggaccagctttgaaaatattggcaactgcactttgattaatggagtataaatgtggagcaaagggagaatcaggttttgaagaccagaaagaagaaaaggttgatttacaaaggaaacattgttccaaaggacagagtggagagggcttagagggagctgcaagggtggttactasagagttgggagttaggagcagaaaagttaagtttggggagtgttagagaggagaagtggctgcagggggcttgcatttggcaaagaagtaaactagcctcaggattctgaatggatcttttttgtgaaattgctttcatgccagctcaggctgggtttgaatgtgatattagagagaagcctgatgacaccagcattcaggctgggctttggctcaggatccacgtagaatttgagtgaaaaagtttgtggtacattcattgttttccttctgtacctccccaatatcctgggttagtagaacagtatgccttttaaaattgtcatgaataataggaattaacctaataatttcttggatttttttttcagtttatatttaaaaacataaattttgtctatttcccactaaattggatgagaagcactttttactcatctttaatattaatatagtacgtttgtgatttgtgtgatcactttttattttatttttttttaaggatcgcaacaatgcaaggcaaattcatgaaggtgcaagtttaccgttttttgaagtatttgttgatgctcctctgcatgtttgtgaacagagggatgtcaaaggactctacaaaaaagcccgggcaggagaaattaaaggtcagtaatattttcttyccagtttcactttgcttagatattttatgttcccatatctaggattgatattttctaagagattdrygtgacttggagctccttgaggagagaatgtagtcttattacactgttctatctctcaggcatagcagcagtgcctggtgctggactaaatgagtcttgttgatccttttggaatcctgttcactagccagagttggggctcgggagttggcgaaaacctacttgataaaattaggtgcctaacattaagttggacatcagttgcctgctgccaccaattctactttctttgttccagggaaaatggaggaaatcccatagctattggaaaaaatgcctgaattataagcatcttgatgataaggataatgccttgtactttattacgatccttggaatggtcccttattcatttcatgtactattgttgaattagattgaattaacatatcactgattctgttaaaatatatacagctgaccctccacatctgtgcattccacatgtgtggtttcaaccaaccgtgaattgcatatattccagaagaaacaatataaaataatacagcaatttaaaaatagtataaataacaaatatagtataacatctatttatataacatttacattgtactaggtattatargtaatctagagatgatttaaagtatataaaagaatgaacataggttatatgcaaatagtacaccattttatgtaagggacttgcacatcctcacattttggtgttcacagggagtccgggaacaaatccgcatgattaccaagggacagctctacaccttgctttttaggttttatggtccgcttcccagagtttcaactgtgatggacatttagacattgagggagaaatttagaacccaactctgctctggcctttgatattaatcatactatttatcttgtagacatcccttgacttgtcctgttccattattgttaacagaaacaaaggacttgctggcaaaaacaaaacaaaaacaaaacgaaacaaaacaaacaaaaaaactaactaaagataccattgtttagggatcagtgagtcatgcaggtaacttttaagtttgccttcccagcagggaatgtgataacctgagactgtcacagaaactcccaggagctctctcagagatagattttggcattcagtttctggccctgaaaacaaaaagatacagtgggaaggaaaatggtrgttattctgggttcttctgtatttgaacctgggaatgctttggcaattaggtcaggttccatctgctgtagtagcattagttccatgggcaaggctgacctccggtaatgccactatggagaatcagctccttgatggggactgctgcctgtcaaccctctacctcattaagctgttactttcttgactcagaaagatcaggctgcttaaccagaataattatgacaattggaggaaaacctgtttagcccttcagctcccatattactctctcaatggccagttttcacttcagtctttgtgtagaaatttggcacagaaaagcaaaatggtgtgtccaggatcctaaataaagtctaaaccttttacttactttaattttagttgattttgttgtttttgaaagaatggattggtgagggaggaaggtttgtcatcctggctggagtaggctacttgtgagcagggagatcatagtgaacacttgtgtgtgtttagaatttagcacagtacattgcccaaagcatacacctgtcacacacatagttaatgcttgttggatggatgagaaggtggagtgggagtggaatgttgaacacacatttgccaatgctttggcgacaaaaagagttgaactcttgtaaaatatttgaagagattcsagaccatcctcgctaacacggtgaaaccccgtctctactaaaaatacaaaaaattagtcagcatggtggcgggcgcctgtagtcccagctactcaggaggctgaggcaggagaatggcgtgaacacaggaggcagagcttgcagtgagccgaaattgtgccactgcactctagcctgggcgacagagcgagactccatctaaaaaaaaaaaaatttttgaagagatttactctgaaccaaatacgattgaccatggcccgtgacacagccctcaggaggtcctgagaacatgtgcccaaggtcgttgaggcacagcttggttttatacattttagagaggcatgagacatcaatcaaatacattggtttggtccagaaaggtgggacaactcaaagccaggtggtgcggggagcttctaggctataggtgagtttaaatgttttctggttgacaattggttgagtttgtctraagaactgggattgatagaaagggaattgttcaggttaagataaagattgtggagaccaaagttcttttgaggtcttacagtggctacccttagagacaatagatgacaaatgtccccattcagatcttaatctctttaggattgggagggtctggaagaaaaaaatatagttttgttaataaagattctttaaaggtgcaaattttcccccacaaagaacagctttgcagggccatttcaaaatatggcaaagaaacatgttttgatgaaaatattttgattttcttcttgtcttgcaatgttatgccagagtcaggttggaaaagaagtcatgatatatagggttaaataaaacctatctgatgaaaatttgtggtttgtagggcatgactccccaggccccttagataggaatttgggcaagataaaaaatcagagtttagtcctcagctttctatttgcaaggtatgtatttggtgccaagtattcaaagatgaataagaccttgtccacaatgctcttgggtctcttacagtttgtactctataactgggagtgtgtttgtattagtccagtttcttgtttactttctcaaytgttgactacattcccctgttgttgactacattcccctgagtagaggttgataaaatgttccttaggttamtgtgtgtgttgtgtgtgtgkctgtatgcatacactgatacttaggtttgccatggtgctggagttcctgattatagagttgcttatttttttaaaaagcttttacttgtaaatgatgcttagcaagttccctatcaactctatttcaaagctgtaatggtatatattccagcacagacaagattgtgtatattcagggggcctcaggcttttatagacctttacatgacatttatcggacagtcagtatatccttgtattaaccattctgataatctcaattattttcatgatgactgcttaagatagtttttattacctgcttaaatatgttttttctcacaatttacatttattattgtaatcacttatggataaattatctagtaggagaactccagggcttctaaaatgttaagccacctcttctaacccagtgcttgtcaagctttgctgcatgtaagcatttccttgggaactttaaaaaatccagtgccaaggctgtaccccagactagtgaaatcaatctcatggggtgggacctggtgattccagtatatcaccgcatttgagaatcagagcttaacagttagtgttcttaatcagaattatttttttttttcccagccattttcttgtgacccactgctaaatgggaataccggtaacgcagaaattttttcttgagttcagggctgcaggggatgcttagaaataggaaatagaaaaaaaatgaaataaatgggctgtaggtttgtagtatatatttttgaactcttttgctagctgtattttttaatattaatggtaatgattttaaattcatgcatascattctaacctaagaatgacctaagctttccgagatagacaagccttgaatgacttacgtgtggggtaaggtcaggggtataagataggaatagcgtatctttaactcagataaccctctctgggaaattgtcgtctatttgctcttttcttagcagttatatggtaacacatataccataggaaaaatctaaatagtggttaatactaaaattatatgtgattgtgtaatttattttgtgatctatttactatccttrtttatgtttagtttaagcaaatagtagttcatttgtcttaaaacttgttatctgatggcagaagaagcctgcagagcttcaatttggccacagataattcttgtgaatgtactggacagattgacttagtgttagtttttgcattgagaaaaaaataatcttgtcaggtttggttttatgtccatgtcctgtagagaattgagatgccttggatcacctggtattaattccatatatcttcacaggcagcttgggcattttcttaagacaaaaaagaaagaaaaaaggtgacaaaagtagtagaattgattcttactatttgtggatttgatatttatgaatttgcctacttgacaaaatttatttgtaatctccacatcagtactcctggcactttcatggtcagtgcaacacgtccgacacacctgacacagttcccagcgaaaataaacaaggcagcactttgccttctggttttagttctcaaaccataaacaattattcttattgcagcctatttggtgtcacattttttacatttttgtggtattttaggtagttttacagtttaaaatggcccccagtgcaggaaaaaaaaaagtttaattagaaatctcccaagaaagatgcttcattactatagccctgtggcttgggggacagcgcagatactaacttcaatgtagcagagatctgcactgaaaaaataaactattttaattttattttccaccctactctattatctgttaccttttgcaggtttcactgggatcgattctgaatatgaaaagccagaggcccctgagttggtgctgaaaacagactcctgtgatgtaaatgactgtgtccagcaagttgtggaacttctacaggaacgggtaagagaggatgaaagaaggaatcatcagagaaaaattatatctctctcataatctttcccctccaaaaaaaaatggtggtgttaatattgagtaacatttgtattttaaatgcttcgaaatgccaacagtgttctgtgtctgtatgtcagtgtgtgaggtgttgtggggagcaccgtgaatgtacagtatgtgaaatatccccgtcagtataaacctcaggaggcttaggagtcagtcttgtactttaccagtaattttgccacagaaaaatacctaacagaaaatccagccatgattgttcagtcctgtaacttgatagtattatatttttcmatttgaggtatacaaagttgttaacttttcttagatatttagagygcccacattttccttgtgataacatgatgatctccttatgggtggattctagagagggacctgtggaggatgtaagtttctaggacataaggacctttgggtgcctgggcatatggaggcatgaagaggcttggggttctccagggtactcaggcccactaacaagtgcacggttccttcagactttagtctgggtttttagaagttttctttcccttgtgttttgtccatactaccctcaatcccctttccccatttcattggagggtcacatagttcactgtagttgaagaggatctggcctctatgtgggtggaggtcttgggtcagtgattaccctgtcaccttgtcatgcattcccccctttgctattcagtcctgacctaggggtacacagaaaaagacatcatctttcctcattctgtcctaactgtgggttttggagtttgaaccccctcttaatctgcaaaatcctgtaataaacctctttcatctagtgtatyttataaacctctttcatctagtgtatcttactggatatattagacatacaactttaaaaaaatttctttgtctgaatatattataaatgtttagcctttgagtttttccacattataaaatatctaccaggtaggtaacttgggactttccttcctaatttatttattttatccaaacattgtagctgaatatatagaaataatgtaaatcgatactgctctgaygtttttctttgtatttactgatcagrtatcattatttgcaggccactgagacatcccaggaggttttatgcttcatcatctctgccttctaggtttctttttaactgacttctgcactcttattctaatcctattgttctacttgtagcttcctccttatctctccaaagctgtcccagcatccattctttcatcttccatcatcaaccacacattgattaaaagcccaccactgtagttatagtcctaggctctagtaatgcaaagatttatcagctgtgcctccatccttgagggatttacattataagtgatagaaacagacataagagtgtttaactcctaggaagtgtgttagaaatcatgatttcagttatgtctgtggcatactgggaggcacaggggctttctcatctgtttgttcatttttagaaaatacttttactgggcatagaattctgcatgacagattgttttttcttttagtgctttaaagatgttccatttttttttaacttgcttcatttctgatgagaagtctaatgtaattcttttctttgttcctctatgtgatttttttttcatgtctgaatttaagattttgtggtactccttggattttagtgggtttaatatcatgtgtctaggtcttgtagtagatttaggtcttttttcttactgtttagaattccccaacctgcttgggtagatatatatttttttcattagtttttgaaaattcttggccattatcatgtgaaatatttcttttgcctttttcactcttcttctgggactctagttacacatatgttgaataatatrttgtcccacagtttttagatgctctgtttctttcatcccttttctgttaacattttagctttgataatttctgatttttatgtttgctgattccttagctgtatccaatatattgataggctcatagaaagaatttttaaactctgataatcattaaaaaacaattctgtcattatttgacttttttttgatagtattcatttttctgttgaaattctccatctctccatgcatgctgtccactttttcattagatcctttaacttaatcccagttaaaaagtcctatcttgaggagtgcttgaatctgggggggtggaagttgcagtgagccgagattgcgccactgctctccagcctgggtgacagagcgagattctgtctcaaaaaaaaaaaaaaagtcctgcctcatggtttgaacatgtgtgttatttctgaatctcattttgttgagatttctttgtcatatctcttgacagtgggtagtttttcttgctttcttggtgtatcttgtaattttttgtgaatgctggacactgtgtctagatgtacagtagagattgaggtagtgtttatgtcatgggcatgtttcattttctgtcatactgttactgtagtaggttgatttagccctcagctggatttggctgtccttattccttatgaagttattcttaatgcaccagaggcttcaaatttctgtagtggtgggctcttttaccttgtacttagtgtggggcctggcctgctcatgggtttttcttagtgttcctgcttcatcctcagtgttccctgtatgcctgtaccacagaaggagtcttcctcctgcttgtctctcagcagcatactgctgtggcttatcacttggtgctaggctcatgactgcgaagtggtgatgattctcagtttcctggcccaccttcagtcttaggcgtgacctgtgctcctgagtcttgaggtgggtttttctcagtgctccttcccctccctgcataacagctaatctctgctttcaccctgggaggcttggaggggagttttcttttcctcacatgcattagcatgttttatatctgttttgtactggctacctggtttgtatgaatgcaggatcttgggcccaaaagggtttccttcatctcctcctttgtggcagaccatatttgcttccacccctcacccagaaacagaggaccctgggaaggtttgagggtttcctttcctttttcattagcttaaggcttttgtggatatgaaagaagggtctggtgagtgagcatagtttttttgcctgtgccccactgaggaagactttttttagtctctagacctgctcctgatttatgttttgagcacctgccataggcatgcttgtgagtgagtgcaggaccccttgtgtctggtaccccccggtcccccattgtactaagcctgtcacactagtctacactcagcctttaaaagttttaaagacattttagctgttttcctcttacctgcctttattgcaactacctcttcctcccatgttctgctaaaggtaagcagttcatgtgcctggtcttttcttggtgggacttgtcactcttcggaagcagttcatctcactgctttttttcacctcagctctgcaatgggctcaagaaagtttatgattgtagattggctggccttttcacttgttaggtgatrctctcttttggaatctctgtgttttgttttcaatgcattgtctaccctttctcttcacttttactctgttgctgttgtgtatcgttttcttagaaatttgcataaaattctagttctagacatagatattaattccatctcttttttattttttttattttttacattcagctaatacttaaatggcaacttgatttttttttcttttttatacgttaagttttagggtacatgtgcacaacgtgctggttagttacatatgtatacatgtgccatgttggtgtgctgcagtcattaactcgtcatttaacattaggtgtatctcctaatgctatccctccccactccccaagccacacaacaggccccggtgtgtgatgttccccttcctgtgtccatgtgttctcattgttcaattcccacctatgagtgagaacgtgtggtgtttggttttttgtcgttgcgatagtttgctgagaatgatggtttccagcttcatccatgtccctacaaaggacatgaactcatcatcttttatgactgcatagtattccacggtgtatatgtgccacattttcttaatccagtctatcattgttggacatttgggttggttccaagtctttgctatggtgaatagtgccacaataaacatacgtgtacatgtgtctttatagcagcatgatttatagtcctttgggtatatacccagtaatgggattgttgggtccaatggtatttctagttctagatccctgaggaattgccacactgacttccacaatggtggaactagtttatagtcccaccaacagtgtaaaagtgttcctatttctccacatcctctccagcacctgttgtttcctgactttttaatgatcgccattctaactggtgtgagatggtatctcattgtggttttgatttgcatttctctgatggccagtgatgatgagcattttttcatgtgtcttttggctgcataaatgtcttcttttgagaagtgcctgttcatatccttctcccactttttgatggggttgtttgttttttccttgtaaatttatttgagttctttatagattctggatattagccctttgtcagatgagtagattgcaaaaattttctcccattttgtgggttgcctgttcactctgatggtagtttcttttgctgtgcagaagctcttgagtttaattagatcccatttgtcaattttggcttttgttgccattgcttttggtgttttagatatgaagtccttgcccatgcctatgtcctgaatggtattgcctaggttttcttctagggtttttatggttttaggtgtaacatttaagtctttaatccatcttgaattaatttttgtataaggtgtaaggaagggatccagtttcagctttctaaatatggctagccagttttcccagcaccatttattaaatagggaatcgtttccccatttcttatttttgtcatgtttgtcaaagatcagatggktgtagatatgtggcattatttctgagggctctgttctgttccattggtctatatctctgttttggtaccagtactatgctgttttggttactgtagccttgtagtatagtttgaagtcaggtagtgtgatgcctccagctttgttcttttggcttaggattgacttggcaatgtgggcccttttttggttccatatgaactttaaagtagttttttccaattctatgaagaaagttcttggtagcctgatggggatggcattgaatctataaattaccttgggcagtatggccattttcatgatattgattcttcctacccatgagcatggaatgttcttccatttgtttgtatcctcttttatttcattgagcagtggtttatagttctccttgaagaggtctttcacatcccttgtaagctggattcctaggtattttattctgtttgaagccattgtgaatgggagttcactcatgatttggctctctgtttgtctgttattggtgtataagaatgcttgtgatttttgcacattgattttgtatcctgagactttgctgaagttggctgtcagcttaaggagattttgggctgagacgatggggttttctagatatacaatcatgtcatctgcaaacagggacaatttgacttcctcttttcctaattgaatgccctttatttccttctcctgcctgattgccctggccagaacttccaacactgtgttgaataggagtggtgagagagggcatccctgtcttgtgccagttttcaaagggaatgcttccagtttttgcccattcagtatgatattggctgtgggtttgtcatagatagctcttattattttgagatacgtcccatcaatacctaatttaytgagagttttagcgtgacgcattgttgaattgtgtcaaaggcctttyctgcatctcttgagagaatcatatggtttttgtctttggttctgtttatatgctggattatgtttattgatttgtgtatgttgaaccagccttgcatcccagggatgaagctgacttgatcatggtggataagctttttgatgtgctgctggattcggtttgccagtattttattgaggatttttgcatcgatgttcaccagggatattggtctaaaattttctttttttgctgtgtctctgccagtctttggtagcaggatgatgctggcttcataaaatgagttagggaggattctctctttttctattgattggaacagtttcagaaggaatgttaccagctcctccttgtacctctggtagaatttggctgtgaatccatctggtcctggacttttttggttggtaagttattaattattgcctcaatttcagagcctgttattggtctattcagagattcaacttcttcctggtttagtcttgggagggtgtatgtgtcaaagaatttatccatttcttctagattttctagtttatttgtgtagaggtgttgatagtattctctgatggtagtttgtatttctgtgggatcggtggtgatatcccctttatcattttttattgcatctatttgattcttctctcctttcttctttattagtcttgttagtggtctatcaattttgttgatcttttcaaaaaatcagctgctggattcattgatttttttgaagagttttttgtgtctctgtttccttcagttctgctctgatcttagttatttcttgccttctgctagcttttgaatgtgtttgctcttgcttctctagttcttttaattgcgatgtyagggtgtccattttagatctttcctgctttyccttgtgggcatttagtgctataaatttctctctacacactgctttgmatgtgtcccagagattctggtatgttgtgtctttgttctcgttggtttcaaagaacatctttatttctgccttcatttcattatgtacccaatagtcgttcaggagcaggttgttcagtttccatgtagttgagtggttttgagtgagtttcttaatcctgagttctagtttgattgcactgtggtctgagagacagtttgttataatttcttttcttttacatttgctgaggagtgctttacttccaactatgtggtgcattttggagtaagtgcggtgtggtgctgagaataatgtatattctgttgatttggggtggagagttctgtagatgtctattaggtctgcttggtgcagagctgagttcaattcctggatatcctttttaactttctgtctcgtggatctgtctaatgttgacagtgaggtgttaaagtctcccattattattgtgtgggagtctaagtctctttctaggtctctaaggacttactttatgaatctgggtgctcctgtattggttgaatatatatttaggatagttagctcttcttgttgaattgatccctttaccattatgtaatgaccttctttgtctcttttgatctttgttgttttcaagtctgttttatcagagactaggattgcaacccctgcctttttttgttttccatttgcttggtagatcttcctccatccctttatttgagcctatgtgtgtctctgcacgtgagatgggtttcctgaatacagcacactgatgggtcttgactctttatccaatttgccagtctgtgtcttttaattggagcatttagcccatttacatttaaggctaatattgttatgtgtgaatttgatcctgtcattatgatgttagctggttattttgctcattagttgatgcggtttcggtctttacaatttgtcacatttttgcagtggctggtaccggttgttcctttctatgtttactgcttccttcagaagctcttttagggcaggcctggtggtgacaaaatctcttagcatttgcttgtctgttaaggattttatttctccttcacttatgaagcttagtttggctgcatatgaaattctgagttgaaaattcttttctttaagaatgttgaatattggcccccactctcttctggcttatagagcttctgctgagagatcagctgttrgtctgatgggcttccctttttgggtaacccgacctttctctctggctgcccttaacattttttccttcatttcaactttggtgaatctgacaattgtgtgtcttggagttgctcttctggaggagtatcttggtggtgttctctgtatttcctgaatttgaatgttggcctgccttgctagattggggaagttctcctggataatatcctgcagagtgtcattctccctgtcactttcagctmcaccaatcagaagtagatttggtcttttcacatagtcccatatttcttggaggctttgttcatttctttttattctttttttctctaaacttctcttctcgcttcatttcattcatttaatcttccatcactgataccctttcttccagttgatcgaatcggctactgaggcttctgcattcatcacgtagttctcatgccttggttttcagctccatcaggtcctttaaggacttctctgcattggttattctagttagccatttgtctaattttttttcaaggtttttaacttctttgccatgggtttgaacttcctcctttaggtcagagtagtttgatcatctgaagccttcttctctcaactcgtcaaagtcattctccgtccagctttgttccactgctgttgaggagctgcgttcctttggaggaggagaggtgctctgatttttagagtttccaatttttctgctctgtttttcccccatctttgtggttttatctacctttggtctttgatgatggtgacgtacagatggggttttggtgtggatgtcctttctgtttgttagttttccttctaacagtcaggaccctcagctgcaggtctgttggagtttgctggaggtccactccagaccctgtttgcctgggtatcagcagcggaggctgcagaacagyggatattggtgagcagtaaatgttgctgcctgatcgttcctctggaagttttttctcagaggagtacctggctgtgtgaggtgtcagtctgcccctactggggggtgcctcccagttaggcttgggggtcagggacccacttgaggcagtctgtcagttctcagatctccagctgcatgctgggagaaccactactctcttcaaagctgtcagacagggacgtttaagtctgcagaggtttctgctgccttttgtttggctatgccctgcccccagaggtggagtctacagaggcaggcaggcctccttgagctgtggtgggctccaccaagttccagcttccaggccactttgtttacctactcaatccttggcagtggtgggcacccctcccccagcctcactgccaccttgcagtttgatctcagactgctgtgctagcaatgagcgaggctccgtgggcataggaccctccgagcctggcacgggatataattctcctggtgtgctgtttgctaagaccgttggaaaagtgcggcattagggtgggagtgacctgattttccaggtgccgtgtgtcacccctttctttgactagaaaagggaattccctgaccccttgcgcttcctgggtgaggcgatgcctcgccctgcttcatctcatgcttggtgcgctgcacccactgtcctgcacccactttctgacactccccagtgagatgcgcccggtacctcagttggaaatgcagaaatcacccgtcttctgcatcgctcacactgggagctgtagactggagctgttcctattcggccatcttggcaccacccacctccatctcatttttattggaactatagttctagtatttttccttttcgttttgattgtagttttgtttgagttttttgtatactgaatctatcttttttttaacttgaaatttgccatatcagcgttagaaagttggccctctgtrtctggagttctatatctgtgggttccayatttgtggatacaaacaaccatggattgagaatattcaggaaaattaatacaacaatgaaaaagaatacaattttaaaaagaatacaattatatacttatataacatttacattgtattaggtattatatgtaatccagagatgatatgaagtgtatgggaagatgtgtgtagattgtatgcaaatgctatgccattttatatcacttgagcgtctgtggattttggtgtcctcaaggagtcctggaaccaattcctctcagatactgagggatgactgtacagttttattatttgttttgatttttttatatcttgttagtgattcataagtgttttataagatctcagaaaaatgcacatatttaatagataccattttatataattttatggggcttattaatctttgactataaattccagatacttcagacatgtatatgggattattaagcttaatttgctttgggtgccacaggtttctcccaccttcttcccgtctttctctctttaaattcataatcacttctttggggccctatttagaatagtgtcctttgggtttgacacttttcctacgtgtaggctctttttttttcttcagggaggaagataattttaagtttttcttgaaaaaaaaaaacttgattttgagaaaattttgcagctcttcacttattttttcactaatgtttttcctgttccaggattcagtccaggattccgcactgtattcagggttcagttggtttttaactataattctgtataatgaaaatacagattcctgtggtatttatgatgcacaggactttgcatcttgcttttattccctgatggttaaaaactgaaggtaaattgacactgtatgattttaggatcacactatcccatattcccctaactggttaccacaactccagttctgtgtgccctttagtctgtcctataatattcacaaagtaatctttctaaagtgtagtctaagcatttcctttttttcgctctaaaacacttactgatttttccattgtttatagaattgagatgatttatacctggcatatgccaggtgtggtggttcacacttgtaatcccagcactttgggaaactgaagcaggaagattgcttgaggccaggagttcaagaccagcctgggcaacatagtgagatcctgtccttgtctccaaaaattttttttaaaaagtagtcaggtgtggtggcacatcccagatactcaggaggcagaggcacgaggatctcttgagcccaggagtttgaggctgcagagagctatgattctgccactgccctccagcctggatgacagagtgagaccctgtctgaaataaaaaataaataaaataaaatgcatcaataaaaatcaaataaagaggaaagatgatttgtgttcacagttcttcatagtttggttccatgctgcatattttcttatttattgtccttatgaagttcaccgtagtattttctttctttctttggtgctattgcttgtcttatctctgtagtcttagttaatgccttcctcctaatttatttgtacctaattaatgactatgctaattgctcttccttgtatatggatactaatctgtattatgcttgctagacaatctgatgattggacagtttcattcaaggatattatccttgaaaaagaaggatagataagaaattaacatttgctgagtccttattataagggacatatttatagtatgttgtcttttaaaataacttgttctgtttatttcaattggaggaaagtgaccttttttcctaatttagcttccaactgtctctcacctgaattactgtggtagttttccaagtggtccttgtgctaagctcttttcatatgttgtttgattttattcatacagtaaacctttgaagtatttcagagaaatgaagaaacttgttcatggacatgttggattctgcatctagaatttcagtaattttcttatacctctggcttttactttcaggagtgttctccttacacttaagtgagatgtaattaaatctacatccagaaagggattctggttatgttcatttaggagagagaaattttcttttgaaaaactgttaatttttatcttaaaggtgggtggtgacaaaagaagaaatgcaaatgcctccttaatttgatagctttcttttggtatcaccctccttttcaatatttgttacatgcttttctgaataaatgacttcacttcccaatgaaagcacgcatatttctctgttgtacttagttgatctttttagttaatttaacagatagttaatgctatatgtggtaggcacttttgtggacactgcggatgtggcagtgaattaagcaataaacattccagcctcatggaccttaatttttggtcttcaccactgttattttgtttatagtgtatagactagaatgagcatatatagattcatttatttctcttcttttatactatgatgtagaatttaaaaatgcaattgaggaagaaatacacatagacacacaactatatctgtcttttattttcttttggttgtttttctcactaagttgaatcccagtgggcattagggcacatggagaaaccagtgaatacctgacattcagctcaaagttcatccttagaaatgccagttgtgcatttgcccactgtacttcattgcaaagtgacttgctataatgtgtacttttcatatcaaactccctctatccaggggtagcaaattcagttcatttaacttcattgttatcacaaagacatttgttaggttttccaaaggtgggctatgggaggacacatagtacaatctaaatatagattgggaggtgaaggggatgaatatatcaagtaccatgttgctttaaagcaaggaataataaccaaatttatgtagctttagagtatgtgtttggagtagggaggtgaaggttaggggtcctacattaaccagcattatgtaaaagaatatataaatgtgtgtgctgaaagcgaatgccatgggcagtatattagggttctctagagggacagaactaatggaatatacgtacatatatatgtgtgtgtgtatatatattttatatatatatgagtttattaagtattaacttgcatgatcacaaggtcccacagttggccatctgcaggctgaggatccaggagagccagtctgagttccaaaactgaagaacttggagtctgatgttcgagggcaggaagcatccaacaccggagaaagatgtaggctgggaggctaggccagtctctcttttcacattttcctgcctgcttatattctagtgatgcttgtaattgattagatggtgcctacccagattaagaatgggtctgggtttcctagcccactgactcaaatgttaatctcctttggcaacgccctcacagatgcacccaggatcaatgctttgtatcctttccatccaatcaagttgacacacagtattaaccatcacaggcagagatggagaccatcaacagtaacttaccagttgaactcttactgtgtgctaggccctgtgttaggtactgcagtggcattattgcatctaatttacattgaaattgagaagtatttataattatcttcattttgctgataaggaaacagattccagaggtgaagttatttgtcccagatagttcagttagggagaggtttgcacacagttctgattgattctgcagcctacacactcaatgtttctactactctgcctttactagtatttagattctttccatttctagtttatttctgaaatatgaatcttttctctgactctctttcacattccttgatcagttgttccctaactgtagttgggattaagaaatgggagaggcatgggcatttcattgaccttagaaagatttattatttcttgaatacttttaaaatacttgagcagatcaaasacaacactatctgggttggaaagaatgtttattaaagaaataaactgctcatacctgtgtccagctagtgtgaaatgcttgttctatgtaagtgcaataagaatagtgtttgtaggttatctaatttaccttggaaagaggcacattttgcctaatgaattatgatttatgtaagtcctaaaacctgaattggagtggtaaaaggttatactatatataatgacaactttatttctaaaataaactaagtaaattttatcccctcttcaagcttagttttgtaatacttttgaagactttttttctcacaataaccagttttttgtttgatctctgatatcatctggtatccagtgattcaatttaattttgaccctagctatgtggagttagttcagacctcacaggttaagggctcactcctatacactgccctgttttagacgccagcccaaatggggtgcccaggctacccactttcttgcctggctgattataaatccaaggtttcccacctccctaccctgtccccacaccaggtttgatcattggctaggacaactcacagaactcagtaaagtgctttatttgctacttccagtttcttatagactcagtaacagccagatggaagagatgtgcagggaaggggtggcagagcttccgtgctttctctatgaacttcaacccccagcccccagtacctccgtgtgctcaccaactgggaagctctctgaaccccatcatttagaagtttttatgtaggctttacgtcgcacatttgattaaatcattggccattggtgattgaactcaatctctctaatgcctttctgctccccagaggtcaggggagtagagtgaggctgaaagttgcaaccctgtgatggtgacttggactttctggtcccagttcccatcatgaagctgtctaggagcccttcagccaagagtcctctcctcagcactccaaaggcacattgatcacttaggggatttcaagggtgttaggagctctgtgccaagaactgaggacaaagaccaaacactgtatgtatttccaattgtataccagtttttattagagagaagaaagtactatggtctgggacttcccagagaatgaaggtgtttgaaaagcactgtcttcatggaaaaatagtggtaagtagagtttgcttttatctgttcctctgtattcctttggagagactcttctgaagtgaattgtacctggaattgtttaatggtcttcagtaagatacagtatttatttcattgtccaagaaaaatgtttttagtatgctgtacaaygggtaatataggatgatgggtcctttggttaccatgggtactttacataaagttaagaattctctgtcattttctgggttgccttctctttcactgtggctatgtaatataatcaggatagataaagtggtcattcatataaagactgcatttcttagcgttttctcacagcatcttcattttctttgtttggtatgtatttaagaaaatagaaaacactaacaaatcaggatttttttattttcctagaccctaaattggtcactagatggcctgctagtattgcattttaacttggcttgttatgacataaggaagtagacttcttgctgctggttttaatctaaagtgatattttaaatactgttttaaaatctaccaggaactctagatttactagtgctataaattatttaaaggtttgtctttttaagaaatggtggtttagtgctctaaatgggttttatgctacacataaaagccagactttgcagctcagttttaaagtgttgccggaatgtcgtttggtgttcatgctttggatgcatgtagtttagataacagaaatttaatagttacataaaaatatgaatgtgcccttgtgttcaaatctgttgagcagatttggctcaagaaaaaagtacagaaagtatttaaaggaaaacttaaaatgtggaatcattgtattaacatgttcagagttctttaggaagattaaaatgagaggcgagagctaccactttcatgtagcgcatgttgtttgccctgcctgccagtgtccaggtaaaaacaaaaacagttgtctgtttttggatacaacatatgttagatgttagactgtcaaagtcaaacaacgttctgggtaccccgtgttacattttaaaattaaattaatacttataaatktataatatctctagacttacaggttacggaattcacctctcattaatagtagagtgtgggtcatttactgatcccctgctcaggaggactcctagggcctccctgagccccctttacccttcagtgctgggtgactggagcctttcagattggaggtgagatgtccaggtgtgtgcagactttttcctggcctggcttgtgatctctttgtgttttaaaggacatttcatgaagcaaagggttttatatgtacaaattgaagaagagcacgttgtttctaatagctgtgtctgtggaaatcctaatgaatcccaaataaagtggatagctcatgtggcagggaccaactttctgttgtccagatatcttgtgtcactttgaggtggttttgctcctttcagatgtttagtagtggttttggaaactgagatttgtcactggaatgtgctagaagctggcagcatctgcatgtttaagattctttttatattcctgtaagagactgagtccttttgtctttacacatagaatctgtgtataactcatttccacagactgagcagatgctcccagttcctcttgattcatgctatttttgcattaattcccaaaacattcactctctgtatcttttttagaagagaaaaacagtagcaacctttcgaatgtttattttggcattggttaggtatcagaagaattttgtattgaagttgtgaggctaaaatccatttaaaaatattgttgggtgtgaattttgaaragggaagagttttatgaaatgcttctaatgaaaaagttattttgactcaaaaacaaaatatgaaaaaatttcccttcttgaaaagaaagtggttatagcctttgttaatacatgtaaagtagcacattgataaaattatgctcaattatgaataactttattagtgcacaaaatatttcagtaatttgatggggcttacagtatagatattgccctttacatgttcaaactagttaccttggagacagatttgatcacaaattatttgtacagttttttttttttaacttggggatatggttggaaggaaatggtagacatcatctatagaaacattcgttagtgcagagttcttatttggaccatctcttcagaggaagcagagatgcacctgagtgtgccctcagtgttgtggggtctccagggtggagggaagagaacagtcccagccctgtgcctggagcattgcagtggactgtgcacactgctcctggtcttcagtctttgtgagctgaactagggatgctggattaggaaaccagctaaacatgccttgttgtagccagtaaaaatcagaagatgtgtctgctgcatgctttcttctgcttctctaggattgtgacaattttcagcagtaaacctgggggagagtagtcaagccccatcacagcatacaaaaagatatcccatccttacaataatatacatttcagagatggcaaagaaagctttatatagagtttttcttaccattgaagttgagaatgagattcttctcttctctggagtcctttgtcatttgttcccagactgcatatcctgctaagggatcctcagcattggaaatggaggctcatgatttattcacagtggcagggtttggaacagttggttgcaaattgcttacttgtctttaatagaactatttaggctcaactgaaatgctgaatatcttttatttttctctagaaccttaccaacgcattggaagatcacatgctgactaaaaacttgggaattatgtttaataaaatcatgaaaataagaaaaatttgtgtgacaaaatacttaataccttagttttcaatacttctcaactatatgaccttggaagatatagtctaatttcttggacttcaattcgctcatctatgaaatgggaaataattaaagtgcctgcctcaggattgtgcagaggattctatgagttgatacatgcagagtgcttaaacagttcctggcatgtagcaagcatactctaattaytgagtattctttttatgttaagtccattgaaagacagtattgcagggatttgggtcaagttgttgacctctcttaggcctcgatttcctctgtaaagaagggatagcagtagtttcttctgccttcattagtaggactgtgtgaagattaatggactaaaattcacatgaagctcttagaacaatgagtggtgttatagtcagttctcactaatattatcctccactcttcaggtactttaagtcactagtttgtcaaaacagccctgtaacatatatgtgtgtatcttttttgtacttttttttaaacaactggggagacacgttgtaagatgctcaagattgcactgttagaattggaactcagatcttaaatataaaaagcctttgccctctttttttacttcatattcttagtgataagaacattggaaataactgacctatagactcctgttgctttttrtatctcgttggttttgaagatgttatgcccctaaagctttgtgattatgtaaatatttaattttaagtgtctcgtgaaagtgtatcatactcttcctcacagaagtcctaatgagtgcctgactttttgtgtaacttgttatgtttagtgttttctccccctagcatagaagatttcaattctttactttgtagctgcaaagaatctgtatgcctcaaggcatctttggaggctttacatatcgaagaagctaattgaacatacaaaatgtatgtgtagttcacttaatgcacatcgtattgtccttccaggaaaaattgactctgaacttttattttctacttgatgaagtaataggctttgyacagactgctaaactatcatttgtcgtgtaatgtacctatggatggagaccagatcaaagggaagacagaaaaatgacagtgataaccatatctgggatacagggtgatttggttttctcataaagagaatctcccagattctttttactgctattttataatttaaaatacatatattaaaataattctggagttggaagataagctatatctcatgctagatttaaggaagagtccttttttttttttctatatgtggtttcccctcctggtattatgtataaactatgtatatttagttgtcactgctttgaactccttggcaaaatttaagatatgccctctttagtgtgggttcattagaaataatctgccccattagtgcatctacagagagaacatagaagcagctggtggagctttcttccktcaccattattttttaatgccctcctgtattatttaccctcagtaaacacaatagatagcttttggctatgggtgcctgctggaagcttaattgcagaagatttggaaggtatacaaagtgtctaatgctgtgccgggtttgtgcctcacacacttttctgctttcctcctatgaacagtgagaccctagagggacaagaggcttccagaaagtgccgttcatgtctacaccccaagagcagcgcagctggctgaatttgctgttgtagctagcggtgtttatttcttgtctgtcttttgatttttaatattacgttttcttttccttgatgtttattcttcttgtttatttatttatttttttaattattagaaaggtcagagactttgaatttaccagtaggaggagcctgattttggcacatatttagccattgctgaactgtctcttgttccatctttgaggaaacagggtgtgtgagaaagtaggagaaatgtaagagaatagttcttagattttcagaacccatagttgttgattgattgagtggtagcacctaggtctttcatgaagtcatctggctttgattgacatatctgccttttttttctactgaacatgtcatgtaagaccaaatataaattgaagtttctttctagaggtcatctattcctcaggaaaaatagtggagagtgtccttaaaaatccagttctttcatcttgaattacattttttgttgttttgtattgttttaaaaaaacagacttttttttagagaagtttcagattcacagcaaaattggcatcatgtagttggaatcatatagtctgtacccttttcagattggctattttcacttagcagttctcacttaaggttcttccatgttttcatggagctcatttcttcttagagttgactaatatagcattgtctagatgttctacagtttgtttattcacctactaaagacacattgtggctgtcaacttttggcaattctgaatagagctgctttaaacaccctgtgcaggtttttgagtggaggtacgttttcaactcattggggtgaatatgaaggagtgaaattgctgataagagtatgtttagttttgtaacaaactggcaaaatgttttccaaagtagctgtaccattttgcatccccaccagctatgaatgagggttcctattgctccacatctttggcaacattagatgttgtcagtgtttcggattttggctatcctgataggtatgttgtgctatcttgttttgatttgcaatttcctaatgacatatgatgttgaacatcttttcatatgcttatttataatctatgtgtcttctttgatgagatgtctattcaggtcttttgcccatttttaaaattgggttcattttcttattggtgagttttaattgtttattttgtatatttttggataacatttatctaaagatataacttttgagtgtatttttctcccagtctggcttatcttctcaatcttttgagaattactttattttgaataacaaagtattggacacatgtatgaaaagccctccatcagtgccarttttgcatggttgtagaggttacctgacagatttggcttaaaacaaattaaagtgattaaacacatttagtaattattcttagggatatgtcaagtgttgtgaacaagccttgtaaagagctcctaatgagcagtatgtaaatggttatgttgttatcacaaatatgtacttgtagtataaatggggaaaaacaccatcccagtgttttataaatgagtatatggagcttggataaaaattccaggctgcatttcgtgtgggatcaaaaagttctgattttcaaaccacagtggtggaagtaaagctgacattctagaataccgtgttgcttgggtaaaaggtggctttcctgacagtggtgataaaggtatatataaaagctggaataaaatggtttcgtgatatggtaaagataataaggatgatggttcaggtggtttttgtttgcttgtttccaaattctttttgttgttacctcttatttgaggccacctctcatttgtagttgcctgactttgacatatgtagtatattttaggaatttattctttcccactagataatgggacattgggcttaattacttcttggatgtgggatactatctgcttgagagtattggttgaggggaacatagcactcacagccttyttttatgctactttttggttttattttgagagattttcttcattaagataccctttggtgaactctaaattcttgaatcaaacatttaaattgtactcctgttgttatataggatatygtacctgtggatgcatcttatgaagtaaaagaactatatgtgccagaaaataaacttcatttggcaaaaacagatgcggaaacattaccagcactgaaaattaataaagtaagttcttcgttgcttttcacactaagtgatacagccttatatacagtagtttgttaaatttgtgacttayagcagtatttgaggccaggggtggtattagctggggggcaaagatgttgtggtatatgtcacaatttctaaggatggggaatgtgtttaatttgtgcaaccatgttcccaagttaccatggctttgatttgctttgagtaataatacttatttattttgaactatcaaagaacaaatattacatgagatccttaggcttatcagaaataatgggttctaaaaggtcaaggaatactaatccatagtaattaagtaaacattctccccttcagacatgttttctaatcccttgccaaaacttgactctctctgtcttatattgttaagaataattttattgtgtatcttagctctgatgatatcattagctgtctttcccaatacaactgcgtagttaagcatgatgagaatggaaaytataatttatcattttcgagtcttagagaattttaagttgtatcatttatgtatactttaaaaaaagggagattaaaaataagtatttggactagaagttagattccccatcctttcttttaatatagtaaaaatccaaaatacccaaggaagtgccacatctgaaagtaaggagaaaggaaaacaaaacaaaacttctaggcttgatgaaagactctttaagttgttaccaaatccctgatgggagtaaattatattggtacactttctgtgtgtgattgggtctctgaccagaaaccaagacatgccagggagtgacaagaagggagaactacagagcagagcagctcaggaagtgaactgttacataagaacaacagaatttgttgcttacagactgcatggagtgaatacacrcagacaaaggcagagagaagaagaatgagaatgaatgactatgaatttacatgtcagattctagaatccagaaagacagtagctttttctaaatggaatgtattttcaattcattggttytcaaatttcttcaattggcagagcatctggaaggcacactgctattctttgcacctcctcacatgcctatttctaagtatggtagcattggggttaggccttcagtataggaattttgagaggacacagacattcaatccctaacagataccatctagaattgaattccagtagagacaagtagtagccaccatcaaaggttttggaaaaaaaaaaatttcttcatgaatmcaattttttttcctgtgaattgattttgcagtggaacacattggcaaacatactctgggaataaatagtaggctgcattttactgtactccactcagccaggtgctttatctttctcattggagagccactgctgtatgcttagttaaaaaatgagcatatccagcttacattaacgataagtacattgttcatcggtcctttgacgttctaatgggatatgctagaaatctcaaagttcaagaaataatagtctttgtaaaatgaagagtactctgtcatgggtaagagacttttcttggaaaatattttatttaatgtttcttcctttctttttttttttttttaaatggagtctcgctgtgttgcccaggctggagtgcagtggcttccctttttttttttttttcctaacaagaccacagaacagaaggtacttaattctatacaccttttttttttaraatacagtactttatggtcactttttttgtgagtcacttgatggaccaaggctcttcttatttattgtgtatcaagtgacctcagccagtattttccttttgaagtttaaatggtcttagctggccagtggggtgattcctgtgtctttccagcaagattttgttaatcttggaaagattccttgcttcctggctcagcaagatgttccaggctcaccttataccttctagccctatgattggattcagccttttytccagccagccctagttcctttttggagaccataagctgtgtgcttgggtgcactgtaaaggtaccaaactgtcagataaaatgcagctttacagataaaggtgaagtcttctctatgaaatgattatgccatcattttacatttccctgatgatttatgagaataaccattttttcaatacatttattggtcatttgagtttccttgtctcccaatgacttctttttttttttttgagacatggtctcactctactgcccaggctgccaggctggagtgcagtggcatgatctcagttcactgcaacctctgcctyctgggctcaagcgattcctggcccaagcaatcctcatgcctcagcctcctgtagctgggactacaggaatgcgccaccacayctggctaattttttgtatttttagtagagactgggtttcaccawgttggccaggctggtcttgagctcctgaggtcaggtgatctgcctgctttgttttggcctccaaagtgctggaatttcaggcgtgagccacctcctctggccgtaaagtttctcttggttaaggagagtggttatcaaagtattagatcatcactgttaycattttctgggaacattttagaaatacagattcatgggccccacagcaaactgactgaatttgaaactctgcagatgaagcagtctcattttagcaagctttccaggggtttgaggtaaagtttgagaaccactagtttaggagaggctgtctttattagaaatacttggaggcctaatgttatttaaatttaataggagaaggaaatattttcctagtgcccttattctttgttagtttggtataatctatactcatccttacactgtttgtttccattgctttcaaaattaaattcctaaaggtcatcactgcttttgctcatatatacatgcaatagaaaattttgctttactttcaaatttactaggtggatatgcagtgggtgcaggttttggcagaaggttgggcaaccccattgaatggctttatgagagagagggagtacttgcagtgccttcattttgattgtcttctggatggtaagacattttacattcaaaattatattgtatgtggaagagaaattacatagttgcagagatttgtcactgtttacaaaaagtagtagggtaacgtcttaatagaggtagcattataagactaagttatatcagtaccgaacactttatttaagtgaatcatgagatctcattttcgtttttccgtgtcctgactcttatttattgcaaagagagagggaaaatctgggaatcagggctgaggatggattgtaaaacacatacagttattctgtgctgtttttgcctgatcactgtggaaagctgcttcccacccagggcatgtacgtgctgcgttttgcagtactgaagcccatgcttgagctttctaatgaggaattgtggagtcttagttaaggaattctgaaatatgtggctaaaaatgtggtccttcctattcttttaaaacattaacaaaaaattgtcaaagaaattgatgttggccaggcgcagtggctcacgcctgtaatctcagcactttgggaggctgagggaagtggatcacctgaggtcaggagttcaagaccaacttggccaacatggtgaaaccccatctctactaagaatacaaaacttagctaggtgtggtggtgtgtgcctctaatcccagctactcgggaggctgaggcaggagaatcgcttgaacctaggaagtggagggtgtggtgagccaagatcatggcaccactatactctagcctgggcgaaaggatgagactctgtctcaaaaaaacaaataaataaataaaaaatgatgtccaacatataatcattataatgcagcagcctttaattttgtgttgtatattgttggtaagattaatttactaccttatgaaaatatttttaaatgtcacagaaccctactataattgctaccaagttttttgttttgtgacttattttaactgggtggtgaaatagatattagaaaacataattcctaatcattcttctcaagaaactttatcacaagaacataaggattaaataatgcattttgattttcttccttggagctaattgcaaagtcttgtggactacctcctttacgatgatttagtcttgggcttggtgcaaatctacctattcattttccatgttacactttacctagtggtagtaatttaaaaagcagccaagcagttatcattactctcgttgacatcttttgttcaaagaagatatgccatgatgtccaaaaaatatgatttctttagtatataaatagtccaaatatgaatgtgagagcacactttatttttctaacccatagatgatgagtagaaaaaagatttttatagcttgcaaggttgcatgctgagactgtgcctttagtatcactgacaacacattttggtttaaatacagtcattactgtctttatttcttggttagtgatagctggtatcagtttgaatttgactgtatttaaaaaaactttttggatagttctgtcttcctatctcaaggatactcaagtatacttaatcaacttgccacataaattgtagttattatgtcatcctgttatcaacaaggatttaagtttttcctgaaaaggcccagaaacgtagttctttgtctctttcatatattggaagtgcacagtatgtatttggtgatgttaggcttaaccagctgattctttcttgttaaacagtttgttttacttatgtaattctataccaaaatgttgtacccaaaaacagtttgattcttttaatttttccttttttttttttttttttaacttgggagatcgttgctcattctccctgaccttatagcttgttctgtctttcgtttttctgtgccaggtaccagttgaatactgtcactggatctacagccttttattatttgaaaagtgtcccctgaagtgaaaggtgggtgttaagtaaagcgtgttgagtaattcaagctgtgtgcttcatgttcttttgtgctctgcaggaggtgtcattaacttgtcagtacctatagttctgactgcgactcatgaagataaagagaggctggayggctgtacagcatttgctctgatgtatgagggccgccgtgtggccattcttcgcaatccagagttttttgagcacaggaaagaggagcgctgtgccagacrgtggggaacgacatgcaagaaccacccctatattaaggtgctgaaaaaacctcgctgcattttatcttgatttgccaatgatgtttgtgctgaaatgtgggcattttctgtgtattgacttttcattggaattgttaatattttgcatagtagagattggaccttagattattgtgatgagtgtttatgctcttgtcattttggtccagataaatatttattcaacaaacatattttaaatctctattgtatacatggcactgagctaggtgctgatgctaggaatgcagggccagggacaccaccggcacagtgtttcagctcttggagtatacaatctcgtcgtgtgcttaggcatgtacttataatgagcgtgtgaggtagaggctaagggagccctcaccagggtggtttgatgtgaaagcagtgaaatataatttctcttcaaagtacctcatttattatatatatatgttgtatgtggaatgttattgaagtcaaatttctgtcagttgttaggtgtgttaaggtagactgagaaagaagctgggcacattgttggcacataagccaaagcctcatggggaaaaggagggctggagctgccttgtgaatatgaacaggtcctggagggtaatagctcctcctttcrgatgcagggaaaggaagtagtaaaattgtaagaaatttgaggtggtgtggagattggaaggcatgaatttgtatcgaactcgatgatcattaattcttcaaaaggttaggattggagaacacagtgtgggntgacccagagctacaaattgttctgttaataaatgtatgataataacgaaaagaatgtttttgttacttgaaaaggtgtaattattcgcattgcttttgtttgcctttcatatgtaaagatagttatttcacaagttttctgggaaatcacaaaatcgattctaattttatagcatctctaatgtcaatttagttgataagtcagatttacctcatttaagatgagagtagcttacaacgactgtatttagcttatatgagagaaatgtttttacttattttgatctcggtttccattaaaaaaatttgtttttcctattagatggtgatggaacaaggagattggctgattggaggagatcttcaagtcttggatcgagtttattggaatgatggtcttgatcagtatcgtcttactcctactgagctaaagcagaaatttaaagatatgaatgctggtaagacatggatttaattacctaatataggccggcttggagagaaagttctagacgattttttccagtgcttacgaaaatgtaaaacgatgagtacaggtaaatatagcagtggaatatgtaaagaaaggtagtcaatcaaaactagcctgggtagtttcattatattggtataatttgatttgacattattttgaatactctggaagctagatgctaatgcagaatttaccttttatttattataaaactcgcatgttaaagctgaatggaactatagaatattatttgaataattcactcatataaatatgctttatatgtcagagtgttttacatgagagagatatatattcatatatattcatgtatatattcatatatattcatatgtattcatatatattcatatatgtattcatatatatattcatatatatatgaatgtcatgtatctcagaatgttttacttgacattcatatattggaagtgcacagtgtgtatttggtgatgtgtcacagcaaataatgatacatgaccattgtatcataccattgtaccaatgatacacgaccatgatttaaacaatagagaaagttgtttaaagcaaaaattaaaagaaacaacactgcgcatagaaatacttctcaaaacaattcatcaaactgtctttgggtacaaatttttggtatagaattacagaagtaaaagaaacttaacaaggaagaatcagctggttaagcctaacatcaccaaatatatactgtgtacttccaatatatcaatgtcatttatcgcakcaaataatggaacaacggaacttttatcatgttcacttcatttaaaaaatgtttctggatctttatatgccagtatgccatgtgctgaggatccataaataaatactctaggagcttatggtatagaagagagagacattaaacaataacagaaaaagttatttaagagcggaatagagaagctacagatgctgttctttataatactgctttctatattataaagcactccaggacaggatttttatatcatatttcctgctattaggtctttgacacagaggtgggtaaatgatgtgcttaccttggtgcacccatactctttctatacctgcaaattcaaggttctgtatcagggaacagcattcacygtagatttggggaggcttttttaagccttaaaattggaagcatcctgcagttgtgctcctaattaattcccacccactgcagagatggtttggccctaagcactggtgctgctctcttttatattttctgtgtagaaatcagatggatgtggttgagaaagggcaggtgaatgtgtttgcctttttggggtatatagctggccaccaaaccatgtttgtgaaccagaggccctcgttccaagcaactacagaacaactgggaaagagcaggcatttcatttgtgtttgtcttagtgtcggtgaactccagaatgctcctggtaggcattcagagttctgtgttcagactctgcctcaccacctagcagttgtgtttgtggggaaattacttttctctytaaggctcatggacaattgttgaggatattgatrgtacctaaagcataacattttactttaaaaagtgaaataagatgtgtaaggcactttaaactgtactgctatgtagtaagagattaagttgttgatacggtttggctgtgtcctcccaaatctcatcttgaattgtagttcctataatccccacctrtcatggaaaggacccagtgggaggtaattgaatcatgggggtggcttcccccatgctattctsgtgacagtaagttctcacaaggtgtgatggttttataaggggcttccccttttgcttggttctcattctctctcctgccaccatgtgaagaaggatgtgttcacttccccttccaccatgattgtaagtttcctgaggcctccccagctgtgtggaactgtgagtcaattaaacctcttttctttataaattacctggtytcgggcatttcttcatagcaacatggtaatacaggtgccttaatttttgttgtgtraactgaagctagactttattcatgtgaaggttagagcaagaattatctatttatacctaagttctgctgtagactgctgtagactgtgttatgaacttaataaaatgggttaagaactggaggcctcagatgggccacccactcttcagtgctccatagttcctacctagtctgcttaactcattcacatttctttcgtggcttctttagggtttttgagtgtgggatcccttttctccttttatactttactcctgattttgaagcaaatatttggcttaaattactgatacagaaacttctttgagtgctatacttggtactgcctgtataacagctcatttctcttcttttttgctaacatgttttaggcccagtatacaggaatgaataatgattgatacaagttaataatgatgccccactcttttttgtcagtgtgtgatttaagggtcaatgcattaagtcatttctggccattgagatctaaggaagagggttttcaggaaagattttctttctgacagtgtggcttatgccagacaaattctgtttttttttcacccttctcttcctgttttggatgtttggagttcctgcaaccattttgtattcatgaaaattccaaatatgctaacttttgtccttatactgtgagtttctcatccaaccatggagtcatttatctccagatttcttattcaaagagataacatatattcaaattatttaagatacttttagttgggttttctgtgatttgcaaccagaaacatctggtagtttattatatgtacacttcccttttctgctggtgaacagaaacatgtttaatggaggacttgctgtgaccatgttatttaaatttttgccaaaatttgaattcatatctggaactgatgttagtaaattarttgttggcactgttgaaagggtcttatcaaggacttattcataattagggactttcatattacatctgtttttcactcttctttgtgagccaaacattttaagtcatttagagaatgtgttgcataatgaatgattgcaactttgtttaaagtagctgagagccagttattagccttacatcaaacaacaaaaattggagtgttattttattttttccatttttatactgaggcaaataagcaacagaccgaggagtttactttgtagttcttgttcactcttttaggaagccaataacaagtcagttctgatgtgttcaggggagagaaagcagggaatttatttatttattttcttaatctaggatttcttttcttacctcttcctccttctcctcccctcatcttagaagtactttgattaccccatgtgagctattgtcctgtgcacagcactatcagtttggctgttcttagaccattctgtagctgggaaggattgagaaatctttaatacacacatcggtgattgcaaggtgatacatttccagatggcaagttctttgaattaccgatgattgaccagtatcctggaggggaagaatgcatttcacttaagccaagtaagagcctgttagtgtttattaaacatagaatattggtgtcctgctgattgcaaagggaagagttgacataatttctttcagaatagtgtgtggtagtacagtgttaataaatctgagaaagctttatagcgttgctgaattacaaactacattttaagtgtgtaartggagacatcagaagaatgttttaagtaaagttgaggatggtacatgagaaagctgaggcagaagcagatctatgtttggctctgaagtggatagtggatctcgatgataagtgacagcaagccagagagctgagattgggtgagggaacctgtgtcagtcagctcccagcaggaagcagaaggcacactcagatgaggctttgagcataattcagtgaagcgagtatttaaagaaaggtggtcagagttaagggaacctacaaggatttgctgaggttccagggactagtggcattgggtagtgttagccagtcccaaaggggtgagagcaggaagcagtgtttctgaagccaggtgggagctgcagctgtgggaaggccactgggcagaagctggttgcagggtcactggcacagccagaatcacgcgctgaggcagatgatagtggggagaagagctccccgaaaacttttctccgtccatcctctggttgcctgctaatgccaccaccctcaaggcaggaggacaacagccccttctaggggaagccctgagggacacctgtgctccctgccccaggacatcagagaatagatggggaggggaatggcaaataagcggcacagaacccagttggcacaaagctttgtagtcaacatcttactttaatttggaagtgtttttagtcatgagaatagaaagtagttcattgctgccatactttaraatatgaatttaccagttttgtgaaaaattctaatatctttatatttgttcaaggggcccatctcttattcctttatttccaccccccaccttcttaagcagtttgagtaaaaraaagactgttagtttatgataatcccaagggaggaggggagatcaaactgctttgttattccaggtcccttcacaaaaacccacaaaaacaaacattaagcacacacacaactctagtaaccctagaaccattgtcttgtttagctgctrtattgatttaggaaaatcagaaatgtctgttcttggagctttaccgtagagaggcagatagaaaccttgggtgggagggaagaaaggaattactaattactgctctatgtagcgcagtcttacagtgaagttaagaggaaagaagcaagaagatgttgtaattctatgttcagtggttggggtggatactggggctctggctgtgggctgggatgtgaagcacagttctgggaagtctgaggaagattgactaggatttagaagcactgccctgcttatcacctcattcatttatttgctgagtttgcagttgtctttggatactcagcttggaaagagtagagtctgggtcgctctgcactgtgccacgacacgacagtccttgctggcaaygcctctagatgaagcggcctgtggcttgtcctacatgtgttcacggaatgctgatatcttcatttccttccttgtcacacatatatgctcagaaaaactttcttaactttcttcttcctcttctacctgctggaaggaaagggatcagacttcacttgtttccttagtgtattggctcctggactaggtgataggaaatccagaggaaagggagagaacttgctctgctgggaagttccttcacatagacatgcagtacaggagaaggaataggctttgggggccagacccaaatttggcttgagatgtgacagtaataggaaaggtagaagaattgagggaaagaggtaggtaatgagcaatgtatattgaaatagtttttgtaatgcatctgtccggtgaactggaaggaaggacttagagatgtggctaagagaagccatctgtatgtgtgcggtaattgaacccaggtgtaggggtaagcttccagtgagtctgtcaagaaggaatttcatagggcccagcagtaagccttgtggctccaagaggaccacaagatgtcagaaacaggtggttagactggaatggccaagcggaatagaaatgtcatatgtttgattatagctgtgtaaaaatgtatgcaacaaagagaaaaactggaagattgcacaaaacaaaacaaaagaccatgctttcaggacagtgcgtttatggatgattttctcatcaaattttattgggtttcgtggtttttactttaaaaaaaagcatagagaggcagatgacatataaaaggttggtgccacagttagaaggccttaagtggtgtagatttttatgtcagtcagtagagaggtaaggaccacttaaatcaggaaagtgccatttgaatttggctctcatttcatcctcactgttgatggaacaggaaggaattggttcaatcaatgaatccagtccagcagtgtcatgtataggtgaagacgcccattctttccttccctcactctgtcctccacactgtggtagtgctgtcaccagtcttrtggtaatagtgtggaggagtaagtgaaggaatattgtcatgtcctgctggagttgaaggaactatattccttttaacatgtatttattctcttagggaacgtctttgctcccctgctctgactagactgtaagcccctggagggtaggccagttttactactccctcaggctcagcatgtctccagctgcatttgcatcctgtccctggcgggtttcttccctgtcactggctgtcgtgtaaagttgggtaggggaggaagacctatttgaagacagatcttgtgaagagatgatgaaggctgagtgtgctggtaattagtgtgctgcaaatgagatgtagggaacagaagggactcattacatgtggaggacagggcaagaagggaaactgagcctctgaggtaggtaatggtgaattgctggtgaggtgcctgtggagcacttagaggcagttggggagacagtagtctgagcttgggtagagttctggtcagaagacacaggtttgtaaatcactagtacctagggctctgctcagtgacctcaggcacctgagagcagggttgggaggggcttgacggggagggcggtgcctgttcttgctgttgtcatagtgtggctttattcaccagtgtgtagactgtggtctgtcagatgagccttcatcagatgtccccattattctttgagcacttcccttcttaatggtgcaaaaaggtgttccagctcatgttgtacttttcttgccccagctctaaaagctgccatttgccaaggagctctggtttatttaactggggaatggtatttagaatgtatgggcttttgttttgcttcttgccactgggtagtcattgtttgtaggaccaaacaacggtgctacaaaaaaaaaaaaagtggacaaaactaagagatgtgtgtgtgtgtatgtgtgtatgtgtgtgtatgtgtgtgtgtgtgtgtatatatatatatatatatctgtagttctagtggtcaaaagggatattttggcatcttttatgtccatatgtaaaaccaaatttgaagtacattgagaaggatagaaaaatgttaggtctatatttccctcctcccatcccaaagcaaaataattttaaatgcttgtatatcaagacttttctgttttttgtacctaatgtcatatcagctatttcctttgtgaaaaccagccctgttctgttcatgtataaaggtaacgtgaggaacttccaagagtaatgatcatgctgtaaatcttggattttacatgatgtggcaaaacaaaaacaaaaaatcccagttaagtaggatgccacagtcttcctgtggtaccttttgttacagtgatagaagagggtcagaattgagaacagattggagatgatgtactatttggcttacagattgttagaagagagaggctgttcctctccctgagtcgagctgggatcagcatggcatgatgctttgtcaggtattgtgagggcggcaaaatacagagctcctctaactggattggaaaggtctcctgctagcaagcaccacgtaggaatgaacccagggttgtaagcaggagataaggagttaaccagtttcgtctgtctagcagttttcattgttttaagggatattgttgttgctaaactataatccaaaattcagacctttgatcataaaacaaaatatggttctagtcgagcaaagtaattgtaagtgagcatatttggacagtaagtaaatttttgaaactacaaatatatttctctaactttctgtctcccttagtaaagcattatattaggtcgtttggagggattgatctggtgggtaactgaggcacagaccaaaaatgtttatctatggtaagcagtggatccaggatattaggaccagaaagtctgatgattgctctcatttcccatgaatgcaagaaagtaattcttataaatccatgattgttatagtacatatcctcagataagtatgatttacttaatattgtatagtagaagtataggtcatgttatcctaaatggtcaaagcagtactttttttttttttttttaccagttttctgatttctgagtttgcatatgttttgcttaatcctaagtatcaagttttaagaaaaattgcgtatcctttggaaagtaatctgttagaaacatgctattcttaactctggaaattctcttttcagatgctgtctttgcatttcaactrcgcaacccagtgcacaatggacatgccctgttaatgcaggatacccataagcaacttctagagaggggctaccggcgccctgtcctcctcctccaccctctgggtggctggacaaaggatgacgatgttcctttgatgtggcgtatgaagcagcatgctgcagtgttggaggaaggagttctgaatcctgagacgacagtggtggccatcttcccatctcccatgatgtatgctggaccaactgaggtagactgcttgtaagattttcactgcagcagtgttaaagccactcttactaacacagctagtgtcaccatccgattgctttttctgtgctctgtaggcctgttccaaacatttgttatacatgacattctttcctgctcgttagggatattccctggatgctaggggcagccttgagaaaggaaaggtggggagaggtttcacttgctcttctgggtcttggtcccagttgtgaaggaggggatgttccctgcagacagggctgggtgtggttgggaaggtatgccacaagctcctcttgtaactgctggccacattgcagacacaacaacaacactgatcttgtcccgttaccagagttctaggtctttgttaaagaggggagctgggcaaagcctgtttgtttaaattcttctctgtgtccttgtgttttcagagataggcacgttcctttcctctaggtatagggagggcacctctggaatgagagtcttttgacctacttcaggggaagatctgctaggttttatgactgccttaggggaaggtgagagtggcttgctttcttctgctgttttctcaaatgccaaggtgccatattttggagtagtgtgtcctgaaccgtgtcaatatgctagctgcagcaagtccttccctggcctcagattcaactctcctcactacccgaaagagcatggtctagtggaaataatacaagacggttgtcgaggagtccaggcacrgtttgggttctgggttgccaccagctggtttgccatctcacattagacttcttgagacctctctatactatgtttgagtgcacagtaggtggtgtaggtaggactaagtgttcttcaagattctgtcccattctgatcgtttcctaatttgtcttattttcttttaacttcacattgaaatataatatatatatgagaaagtatatatgaaaaagtacatattatttgagttacagaagcattaaaagaaaaagtgcatctttcatagatgcaagtaaatgaatttttcccattggaacagaggcatacaatcagcttccagattaaaaaaaattttttatcatcacccagaagtttttcttcttgcccctttctattcactacttgtcctccccctaggagtcatcggtaccctcacattaacatcataggcccagttagcttgtgtttaagattggataccctgagagcagactctgagagtgaggtgcggttcaggaagtctcttagggagaactcttgggatcaacacctctggaagggaagagaaaggaagggagcaggattctatagagagggaggtcgagctacagttcagtctcagtggaggctttaattgagtccatggagagctctggaaaggcccttcagagatgtccaaagttgcatgggaaataggcattatacctccgtgtttccaggggttggctgcccatgggagggggcatacctttgggtgctgctgctcctttcaacagaagcagtttctgagcggggcgacagctgctggagagcccgctcccttcttgcaggaggcctgagtattgcatcacagcattaaatccagctggtttttagtatttctgtaattcagatcataccgcatatactctttcgtgtctggcttctttcactttacattgtgcttgtgaaactcacctttattgttatgtaattagtggcagattgttcattcttggtgctgtgtggtgtttcgctgtgtgattttacccaatattgttgatggatgtttgggcactttacagatttttgctcttaagaatagcgctggcgtgaaggttttagtgcatgtctttttgtggacattcctgttggctataccagggaggagaattgctaggtccttggatatgtatttgttgagcattagtagattcgaccagtcagttttttgatgtggttgtaccattttacactcccatcagcagtgtattgcctcaccagtacttgagtgtccttttcattttagccattttggtcctttagtgctgattacttagccaagcactctgtaatacttttcctatttcttaaccagcctcaaaaaatctcctcattgaaccagtttcactgaaatggagtcttagtaaatgagttgtagttataaagcattgagaaatagaatataatagtccatattttattgatttcttactgtatttttcagacaatattctgaatgctttacatatgttaactaaatccttataaagattgctagttaatgtataacttatgttataagttatttgttgtaagttttatgttaggttttataacttatgttataaggattaatccttataatactaagagggtaggtactattgttattcacagttcacaggtgaggaacctgaagtagggaggttaaactgtgttcaagatcacatagtattagtaaatggtagagataaaatctgaacctaagtaatctggctccagagctatgtactataatttcacataatttttaatattatataacgttaaaatatttttaaaaatatgtagccacatcttttttaaaatactagaaataaattcttataatatcctataagagttccaaaatagtgagttaggatggccctggcaacattcgttagaggtggaatctccaaataaacttatttttttatcagagcctagagttgtgggttgtgatattctttgtataatatgtattcttaatctttgtattcttacaatacctgactcatgatattggtaatatctgtctatgtttctattgttgagaggagaaaataggatcaatgtaaatcatttaacacattgcctggctcatgacaagrtgtggtaattaatataattggtgtcctttaaaaaactactttgctgcaaattctctgcatttctaggattctagccccacatccaaggaactgtctatatctctaggctgcttcataagtctatgaagtcctagagtttgattatggcagggagcctggtatgacctactgcctaacaggcttcatgtcagagcgtgtgtcctagccctgatttgggatatcctttggtgtttaatataatataaagctaatataaagaaatwgaaagtacctattttatgagtgcctatgcatgtgtcactcartgaatagctgctttgcatgcatgcgttaggttaccccacaacttggtgaggaaggttttattcttgttttaccagtgagattactgaagctcagagaggataagggacttaactgtagtctgtcaaagaagaccagagctgtacagtgattaaagtaataaaaacagaactttattcaggaaatattgcaacaggagaataaagmcctcagtatagaactgggctcaactctgaatatagcatggacaggtggggattgatagcaaaggacagggtggaggtaagtggatggaaaattactgagaggaaacattggaagtaggggattctgggataaactggattcttgctgaaggcaggccaggatcatcagatacctgggaagtgggtggaagataaggaatttgatcagataatgagggtgagcagatactgagagtagaggattctcaataaacaaacttagcaagatttttgctacagttgggcaatgcaggcctggtaaggatggacactgaaggtcaaggcttagagggctcaggggagcctgactagttagtgttctgtctaggagagacacagaactgggactgaaacttgggcctgttttttttccttctagggctccttgctgccaagaagcctcaaagtagctttgtgctttggcatttggagggaaggccaagaagttagttgttctgggtgcctgcagagctcccaggttttctagggagactaagaggcacgttaaagctgtgtctgcctctacatctctgtctggagtgtgaattgtgagcgtaagagatgtggttcttttcaggaaggcccagctctgatgcctgagcaaaaggcggttttttaacttctgaacttgtaaagaataagctttggaaattctagtaaacatcttaatatttcagaccatgaagtgttttaatgtttttggcctgacagtatttaggctgttggattgagctgcttaggaaaagtatctttctcgaggacctaacttgtgtgtttgacttgtttgacttatttgcagccataagtgaagaatttttttgtaataaaaaaaaaccctctcatttttgtagcttttccagtgacatcaggaaaaagtctgtcagtaatgcttatttgccaactaataataataaaataaaaacaacgactcttcctttaatcattttctgtaggtcatttagaaggcattggtaccagatttgtttccttagcacaaatgcttttcagaaccatgggcagctgttaagcctatttggttatcaacaggatgttcctgattttatagtctataaagattttatggcttgaatcctaaattccatttcaggaatggaggaggcgaggatgtgaagggagtgttaactttctaatgctaaaatggtgttatagatacacattttgtctttgtgaggtattaattgactatgtaggaaattctatttgtctcatctcactaaatactgaatctatttttgtgaaggataaataatgctaagacctgtgacrtgaaagtgtcaaaggtaagatgtttttgagaatgtggatatatgttactaacagctataccctcggtttatgaagttttaatgaggattatcagttgaatttgggggaaaatgcagttggaggtagagattatcctttgctatgaaaattacccatgcactgttaattgactctttaagagaaactgattctgtgtaagcgagtggatacccttcaccagggacagtagaacatactatgacatggatgccagtgtgcttgtttaattagtctgtgctttacaccagtatctggagcagtgagtagggtgtctgttaggatataaacttgttcttccctctacacacttccaagagctctagcaactgatgttacttcttgagatctgagtctaattatacaagccatagacacctaagttttacttgtacctttgactctctttgggggtctttgataattttgtcttctcatttatcttgttccaaagtttattgagtagtatgacacagttcacagtctcttttccaaaatccttaggattatgtattacttatttctcctgatgggtctgggatggtacccccatattaaagcacattaatattcctgtagcaaagtaaatgatttttctcacaaataggatcggcaaaaaggctggtagaaacttcctcagttttgatcaggttttgctaccaagtgagttacaaaactgagttttagatttcagaattttagataagcaattgtggacctgtaccacaaatgtatttagagtgtgttgatttactttgaaagtaatttkggggatccctgtagtctgttttatatacttttagcttatatatgtcttgaaaactgaacttatttcattaggaagcatcagattttgcaggtgtttataggttgcttttcatagggaaaaaatgtcattttttttctcttaatagagtttcagttcagaatttgttcttgcttgtttcttactaaagcagtatcaaattcagatttgtctgttagtctgatttttcaggttttcctgatttcccagctaggtaatctatacagtttcctccctaaatgtccttgacacagcgtcagtagctcagtatgaataggaatgtgtgggttttggggtcacacagacccaggtccaaagacttgatccttcactagttcattttgcagctaggatatgttatttgaattctccaagtccctgttttcttatttgtaaaacaggaataataactatcttattgatttgctgtaaacattaaataatatttataaaacattttgtacagtgactggtatattaggaagagcttggtaagtgttaccyattttaatttcttcttctcaccctrttgaaggacctcatgaaatactttccagtgctttatcaccatggttgccttcctctgttttcttagaataataatcagtgggagggcagagagcctcttgagggtccctgggtttgggaggcaggaagaggaggtggaggctgagcatttccaggcttgttgtctccactctgagcccccactctgggagggctgatactgttctcacctgactaggggtctggggtcagccagggcaaggtcacttccaagaataaaattagtttggttgctggttgttctgaaaaaaatgcagctcttacatttgaggtatatctttttggagattgagagattatccttaaaggaaattttggggaaattctgtgtatcttgtattgggcctcatatacgaaatgaagaattcagactccatgatgtagactgcctttcagctcttaaaattgtatgagagtttttgtaaggtatgtttaattctttcctacaagatgaagaatgaaatgtccaagtatatttcataatttttgcattgcaaactagaaatgtgactctcatgagactactgttcagtaccagtacagagtaatagaacttaattgaaacacttagaatatcagttttattaatacaaagaagaccaaaagccacagtatcaggaatctgtatgatgggaggatgagcctcacctttcacttgcctgtgtagattgttccagtcagcttgaagagtttaaaataattcctatctctggaaaatcaagaggcaggccactatgatttgggaatttcaagaaaacatattaatgctagataatgtacaactaagattagggatattttaatatggaactcatgagattaattaaggtatagattttttacacagcaaaattaggtaatgcacttgacttcctaaagaatttttatagcattaacacaaccaatgtttttgacagtctagaaaataatattcaaacatttactaaaaaaatagtttctgtgcctgatgttcttttataaacactttgagaatataaagttggccttatagaatattgactttaataaaatktattacacttaaataaatgcagattttggtgtgaagatataaagaaataagccactkaagtgggacttaaattttaattgttcaattcattattctcagtatttttaattcagaaaaattgaaaatatcatatatctaatctgccagatttctggaacagtgaaatttctcaaccgtcaggtgtggggagagaatggtttagtggtagtggtattatatgtaagcagtatagtccattttataattttataatgtaattaaatttgaaaagtaggtttttaatttgtttttgttttagaaactaatgaaaataaaatttaccgaagtctttgccaggtttggaagtggggagataagtgatagacagtattttcaaatggatttggaacaaatgagattttcaggtttataaaaaggggcatgaattaaaaggttaagaaactcttctcaataacatgccatattgggatgaatctagaacaattctaactctgaaggattttatattataaatgtgtgtggaggtaagtaactgaggttcttatccatcagcgatcattgacttattagtcatgtggtatcttaacctatgatggatggcaaggagaaaccattatagaactaaaattttcatagataaatttttttaaagcattggctataatttggatcagaaactactttcctattctcactattagatagtaaacttaactaattcttacttgtttgactcacactatggagattaagtaaaaatttgagtaaaccttagctccacaaatgtctttgggaaggaaattttgaaacaaataatctgtttattttaattacagttatttatttttagtagcccatgttctgccttccattttgataagacaattctgaaaccctgtctaatggtgaaatgagataattatggaacctaagtattatttatttgaatttggtcctcctgtcctcccctgctttttcattttctcgaacaaggcagtgtggaaattttgtaccacacagtgaatcaggtgtacactagggattccattattctgtttcyggagtgttaagccctgccttacactccagagtgttaccccctttgatttcttagaattcatacttcccatcactctcattcctcgtcttccttgagttgcacgcttctgctgtcgtttcactagtaagcgaattcaacgagtgattttccaaaatcagattctctagggcatgatgattgtgttagagatcaaggcctagaaygtttgtttcgtttctccccaacatttctattatgtattttgtatcgtaaaactgcttcttaaccttcctatattataaataccttcttatgttaatttaaatattgatctttttttaaatgatggcacagttccctgctgtttaggaatttaattcaataacaacacccaattgaaggatctttgagttagtttctgtcttttgacaacccgtaatgaatcctgaaatgaaccttttttgcatatttgcctcacaatatttctggaattgaaattgcttgggttgtttgacatgttatcaaaatcttgactttcggatatcttatacccagttttctttcacataagcagagcaaagtagtataatactgtttaaaaaggtaatcactgtgyactcacatgcctgctttgtcactgactttgaaatactggaagcttgaaagtttgtgactgacaagataaacagagaagcacacttactaagccaggggtctctgtgtacctatgtcaccaagtccatgaaacaccacagcttccagaaaatgcaactgttgtgctatttcgggtgataagaatattttaaagtcttataaagtaatgtttattacataattttttagtttcatggtcccagcatgtagattattctttctgtaaggctattaccagcatataaatttatgttagtggttttatttatttatttatttattttttaagtggttttatttttaaaatgttaactcactggtcacatcctattttttctcctttttgtttcctataattgcctcactttatcataaaaacagtttgtaggagattggaagtatgtagaggaaagcagtccttatttgctccacctatttcctttaattattggcctgcgtttaaatgcagaggtcattgaattgacatgttggatgagcatcttcttggctttgttgatgacaaaaagaatcatatttgtggaaatatttttctctttaattcttttagtttattttaagctgtaccctagtgaaaaaagatcagcaaatgtataccatattaatgcttgggaataaaatacrgtataaaagttaagatttttttccctcgagttttttctctcactttttgtttttagcagtcatctttagggaacttgtctttttcaaacagtaggtttctttggtcagggaactggaaattgatgaagtctatctaaaaaagtgtattcatgttttagtcaaggctaatagaatataaaaaataaggaaaaataaaacattttagaaaaaactttaaaaatatgtctagaataggccaagcgcggtggctcacgcctgtaatcctggcactttgggaggccaaggcgggcggatcacaaggtcaggagatcgagaccatcctggctaacacggtaaaaccccgtctctactaaaaatacaaaaaaattagctgggcatggtggtgggcgcctgtagtcccagctactcgggagactgaggcaggagaatggtgtgaacccaggaggcggagcttgcactgagccgagatcgtcactgcactccagcctgggcgacacagcgagactccatctcaaaaaaaaaaaaaaaaaaaatgtctagaatattgtagaaattttagatcttgtgaatattttttgcaaaatttagacatcttttaattttttttccaacttgtgtaatgtatacaaaatcttatggttcatatactttggaatacatttaagcaatgtgagttaggaaccctatgaaccaaattaggtaaaatatgagctacattttaagaaatgtatttctttrggtttattttaaatgatgtgtagataacatatcttgttaattttgttggtaaatttgaaccttaataaaatgatccaccatttacttggaaaaagtaaaacatggtgggaatgtaaattaatattacttcctaaaaatgtcttgcatgaacctcagatgcacagaattggattaatcattatctgtggtacgtgatgccttgtcattagcccctgaattaattgctcttcttaatcttgattatgtatgtatttgttatttttaaaaactatttaatggccaggcacggtggcttacacctgtaatcccagcactttgggaggctgaggtgggagggtcatttcagcacgggagttcaagactagcctggggaacatggcaagaccttgtctctacaaaaaataaaaaatagccaggcatggtggcgcatctctgtggtcccagctgcttgggaggctgagatgggaggattgcctgagcccgggaggctgaacctgcagtaaaccatttttgcaccactgcactccagcctgagtgacagagtaagaccctgtctcaaaaccaataaacagactatttaatgaacaacatagaattgctgctaatttgataagtatgacttataatctagcaggtactgctaccaatcccattctttttttttttttttttttgagacggagtctcgttctttcgcccaggccggactgcagtggtgctatctcagctcactgcaagctccgcctcccrggttcacgccattctcctgcctcagcctcccgagtagctgtgactacagacacccgccaccacacccggctaattttttgtatttttagtagagatggggtttcaccgtgttagccaggatggtctcaatctcctgacctcgtgatctgcccgcctcagcctcccaaagtgctgggattacaggcatgagccactgtgcccagccaccaatcccattctttttacgctgccatttccatcatccaccaccccccaccccagataatctctgtcctgaattttgtattttttcccttatctttacacacatacacacacagttttattattatgttaaactgtgtggtcatgaagcaggttagagcaaggtacacagaaacctggcaaagctatgcaagtggaaaaaaatcaaggtaatcattaactctaggaaaaacagttgtgcaaaaaggggattaaaatagagataatagtggctaatatttcttgtatatttactgtgtgccaggtattattctaagacctcacatgtttcatttattaattttcttaaaacttctatgagataaatactattataatcctcactttacagatgaatattgatttcatcaaaaatgttgatatcactgtacctgttggggaataagaacctcattaaatactcgaatatggtaggaagtctaagtgatgtggaaataaggtctatgttatatactatgtaaaattaaacagtcataacaaagtgtaagcatgctgtttgaaaacatgcaggcaaacatcagtagaaacaacttaaaaagttgaaacccctcagggtgaacaattcaagtgtgaggtatggaattgcactcttactattgcactttctaaactatgttggtaaatagataagtacctggtatgcaggagattmccagsagagagaaaatgaaaacaaaacaataaaagatgatttggttatttatgtgtagtggttatcatttataccttattttaatatggaacagtgatggttttataaattattaaataatggagacttacactgaaaggaagctaaaaccaaatttctaggcctgagtttatcctaaactttattggccagtcatttaacctttcgggggcttcactttcttcaaattttatggagaatgttgaactagagatgatcttttactgtcactttaaattctaaagtttcattattctaggtattagactaatttttgttttttaataataggtcttactaggcctgaaactagaggcttcaaggctagttttggatgcagcatggccgtttactcacaaccaatctttttttttttaactagtattaggcatatgttataagattagttatatattagttatacgattttctcagtactagtttatgtaagtacctacatgtcatttttatccaacagggttttttttttaacctgttaaagtataatatacagaaaagttcataaattataagtgtgtatatatctcaatgaacttttacagtgagcacaccctaattaccagcacccagatactggatcaagaaacagagcattaccatgattccagaagctccttgcagttgcctccctccagggatcagccattatcctgacttctaacctcatatattagattttgagctgtgtaaatggcatctggtagttgtgtaaaatcaaacatctagacacatgtatgtttacatatatcttataagtaatacataaatatatatacatatatatccataaatatttgtggatatatgcttttaatcttttggtttgggggaggtttttgttttttgttagttttgtttctggcttcccaggatgatacatctaaatttgttgagatttcctaccgataatgattttataaaaagcatatgcatttattatccacttactatttctaagtacatagtcataaaagsaaagttacctaaaatgaaacttttattctaggtccagtggcattgcagagcacggatggttgcaggagccaacttttacattgttggacgagaccctgctggcatgcctcatccagaaacagggaaggatctttatgagccaagtcatggtgccaaagtgctgacgatggcccctggtttaatcactttggaaatagttccctttcgagttgcagcttacaacaagaaaaagaagcgtatggactactatgactctgaacagtaagtcttacattctctgtacaaatctttgaagtacttcgtggtctagctgctcccagggatttagcttattgtctaatctttactgatgacaggttttgtggtactcatgtcagagaaaggtaaacccagaaaagtaatttcccaacattctggaaattagaagtagaaataaaacttgaawctagtttcatggtttcaggaattttgttttgaagtctgtaaggacaatattgttatttctctgcctactgtgtctgctatagcttactgagcataactagtttgaggacttagtgatgtttactctggtaagcccagggagtctatgtatggagagagaatttagctaatatttgtgcaatcactatgtgacaggcaatgtcctaattatttacaagtattaaattatttataggttgtgtatcccttgtatgaaatgcttggggccagaagtgtttttgattttggattccttcagattttggaatatttgaatatttgaatgaggtaccttggggatgggactcaattctaaacatgaaattcatttatgtttcaaatataccttatatgtatagcctggaggtaactgtatacaatattttacataattttgtgcatgaaacaatttgtgtacattgagccatcagaaagyaaaggtgtcagagatggaattttccacttttgtcatgttggtgctcaaaaattttcagattttggagtattttggattgtggattggggtgctcaacttgtattttccacaacaatctctaaagtaggtgctgttacctccattttgtaggtgagtatctagaggcatacaaaggctaagtagcttgtataaggtcacaggactagtaaatggcagctcagcagatgaacccaggcagtctggttttagagtctgtggtcttaatcattaacagcacaacttctgtcttcaaagatcttaggaagagcaaaaaaacccaagcttttagtacaaattattggtagtattgaacattgtatttatccgttttcacagtgctataaaaaacgacatgagactggataatttgtaaacaaaagaggtttaattgactcacggttctgcatggctggggagtgaaggagaagcaaagcacgatttacatggccacaggaaagagaacaaagtggggaagtgccacacttttaaaccgtcagatctatgagaactcactatcttgtaaacagcatgggggaaactgcacccatgatctaatcaccttccaccaggttcctcccctgacatgtggggattataattcaagatggaatttgtgtgggracacagagccaaactatatcaaacatacgtgaggggacttcaaaaagtttgtggaaaatggaattaaaacataaaaataaaaaatgtaaactttatttcttaacataagctccatcaagatcaggacacttttgtgagtgatgataccagtcatttaatccattcctgaaggatgagggtatctggagatctggagactagggataaaaaagaaccaagggtcctgggaatttaaccatgtcaatgtagtcttttttgactgaagaaaaatgggtgccccttaaagattttttaagattaggaaatgaagccagaaagagccaaattaggaccttagaggtggatgcctaataatgtcccattgaaattcctgtaaaattgcccttgtttgatgagaggaatgagcaggagcattgccatggtggagagggactctctggtgaagctttcctgggcgtttttccactaaagatttggctaactttctcaaaacattctcataataagtagatgttattgttctttggccctccagaaagtcaacaagcaaaatgccttgagcatcccaaaaaactgtttccaygacctttgctcttgactggttcacttttgctttgactggaccacttctgcctcttagtagtcattgcttggttgtgctttattttcaggattgtgctcgtaaagccacgtttgatctcctccctcagttcttaccaggatcttgatcccacttgtttaaaatgtccattgaaagctttgctcttgtctgcagctgatctgggtgtagtggttttggcaccagtcaagtggaaagtttgctcaactttaattttacagtcagaatcgtgtaagccaaaccaactgagatgtctatggtgttggcttttgtytctactatcaaaattgttggtcctgggcatgggcaagattaatttcttccttgaaaatttatgtggtctgccactatgggcatcatctccaacatcattttgtcccttcttaaaatgtaaactgctgatttctttgggacattatccccataaactattgctgaagcatcagtgatttcaccattctttttacccaagcttaaccataaagttgatgtttgttcttgcttcagttttagcagaactcatattgccctgataggggctctttttcaaactgatgtcttacccttcttagtgcctcaaactagatcctgttcagacatgttataatcagttagtgtgagtttattttggtgaaaaatggaaatccatgcatagttgtttttgataatgaacattttccatgaaccttttggaggccccttgtatctgtctctctttgactgacagaattgtattaactttcatctataggtagtacactctgtaagtttaaagtggtagtgtgaagctgtaaactctgaagttgtgggttatagccctgtccttgctatataacttgagagtcctgtcttctctgccctgtttccttgtctctggaataaaggcagtggacagggtgattccctcttagcccaaaatgtgtagctctttgcattatctatagcacctagttatttttacaccttagtaggtacttgtacatatgaaatgttttgtgcttgacctttatttagtatacctgctcttttagtacaaatcacaatccacattcagcaagcaaacagataatacaacaagcaaaacagataatttttttaatttacatttttatcagtgtcagctctactgacatgtgctaattggaaattgactatggcctagtaaccattagtctgaaagctgccatcctttcccatgatacttcatagttggttccccatttaggaataatgtagccctgaccctgtgtcctcatttttatggctcattttgtaatagtggggacagaagagaaaaagaaacctttaaaaaattaaaacaacattctcttgtttctaaaatggatgtagtttgttgtcatttgatttatttgaaataaatgataagttgtctggagaaagaaatactattattaccagtggagattgggagatgttaggtttctcattaatgacagaaataattctggagacaatgcatacttttagatgacagcagacttttctgagcgatgaactgtagctaaaatgcaggaaagtcttatgagagtgaatgaacagaaaaggcaagtgtaaaaggactcctgactattccctatataattcaagacggaagatattctagtttatattttctgaagatctgaaatgtggcccagattctagtatacttctgaaccacaccaaaagaaaaatttgcaacaaactagaacatttttacccttgtacaaaattaggtttgtaaacatttagaaaaagttctaaatcatgtgggattttgtttgcctttaaaagaaatatgtatctgtatgtatgtgtatatatactatatatgtacacctagtacgatttcactgtctaaaaagtgcaactgtaaaagcggtgtgctgagagttataaaaggattttttctaccaatggaccttttctaccaaaaggatgccttaaaatttttttaagaaaaaaagaataaaaagaaattgtagtaaaccttgaactgytttaccacaaaaggtgattaaaactttaaaatataaattgattattaagggaagtaaaaaagttttgagtacagttctgcccttttatggtaggccattgtcaaaaattctaatttacttagtctggggagaggccctataatttgtagttcttttaaaagctccccactttaaaaccactaaaaaagggtagcagtgccttcctacagatctataaaacatacaatgtcaggtgaaatgctgggcccagaaaccttttgcttctcacctagcatgagatttatttagtttgtgtataagggattatgaacacaatcttgttctgagcgttaggattaacttccttaagttgctaatatagtggcaagggagagcaaggagagggaaataaaattattctgctaatggctaaatgcttaaaacttaggtgaatttccattttgatgagttatgaaaaccaaactaaaaagagttgagcttttcttttacacttcttgtgccaaaatgtttcattactgtggtctctttgcatgatcagttggtttaatcacacgcaggaccctaaaccccatctgtatgtagttgactgatgtgctggtaagcctttggtaactttgatgtttggttaaataactgtgtagtattgctttaagtctctcttttaatcattcaaaagctaaataattacatcagttctcttaagattttccaaagatgaattctatattagttgcatgagtggctcattttcttggaattttttgggggttaccaaatcttaataagtaataactggggaagctttaaaactgccttagttttctaactttttgtgtttgtgttcaaaaataattaagttgatggtaatacgttggaaagtgattaaaattttgtggaaaggtgatagcatttgatgtagtgagaaaacagttattaattatgcacagatgaggttgtcttttgtttgattaatggatgttactcrgcgccaggttttatgtaattaatgaatttgttttgttttttatttgattaaataccaatgtaagacaatgcttaggagaaaagaaacaaactttatgaagatttcaggcaaaacgttgttgataagaattatgataaaaatcatctgtttatatttagaaagttaaggaggttcaaattagttataataggcactaaaggaaatttagttttaggactacaagattaaagtccattctttcagaaattgcaaataaacttttagaggtaattcagttatcttatttgtattttttcccctctgttataatgtaagtctttatattagggtagatagatacaggattattcagattagtgaaatagtaaactcaaaaagcagacagtacacacgagtgagagtgccttgtggaaatgggtaaatgaatgggcaggtggacataaatgcctgttatctggttatttccacattttcagtagagtatttctttcatgtttttgatgccagagtatactttttttttttttttttgagacagagtctcactcttttgcccaggctggagtgcagtggtgctatctcggctcactgcaagctctgcctccctgtttcacgccattctcctgcctcagcctctcgagtagctgggactcccagcgcctgccaccgcgcccggstawttttttttatttttagtagagatggggtttcactgtgttagccaggatggtctcgatckgaccttgtgatccacctgcctyggcctcccaaagtgctgggattacaggcatgagccaccgygcccggcccagagtatactttaaataatgtactgttagtgtcatttttaaaaaacactctaactgtaggcatccttcaaggctttttcagatatactttccatgggagaggtcatccgttcctgtggtttctgtgggggtgatttttaaacctgtacatcagtgtttcccagttgtattagtttttcgttgttgcgtaacaaagcaccacttaaagtaacacccatttattacctcatgcatggttctttaggtcagaagactgggtgtgcttgacagggttctctggccaggttgggttcttatctgaaggctctgaaaggaatccactgtcagactgaaccctgttattagccgagttcagttccttctagttacagaactgaagtccttgtcttcttactggctattggctgagcattgctgtctgctcctagaggccacttttggtctttttttgtgggctgcttcatctcagcagtagaacctccctcatgttgcatccctgtcatgcctcagatctctctgacttcccttctgctacaagacaggaaaatttgagtgattagcttagggccacgcagataattttgctgttttaaggtcaactgattagtaactttaattgtatctgcaaaatctcttttgccatgcaataacataggatggtaataacactggggacaaaggtcattggggctatgttagaattctgcctgccacactagtgaacatttctacttagatttcttgcttctttgatttctttctaaatttatttcttcttcagccatttcttaaaatggccaaaaccagctttacctttaccctcataatatccccaaatcctacatttctttagttacttcttattcgcactatatagaaccttaaagtcctttatccttttccctcactcttcatagccgagtcttatcaagttgaccactgaaacgtttcttgtgtgaattctttcctttccctttcttgccacagtctttgcaatacacaagtatttctgttagagtattgggaaactgtcttttctgttaattcataaaatgccttgtttttattaattttgatgtttcgtctgaatacatgtagagtctgactataactgcgtgaatttaccaatgagtctcatcctgtatttgttaattttgcacatactttatagtggggagttgcttcatgatcattaatagataagacctaatttaaactctatcatattgtcttctagtatgcatttgaattataattaggtatagtataactatgtatatttttgaaaatcaaattatatattttatatatactggatcttgtattgaggtcaatatattctattgaaattagtacaaaactttgactttactttgcattattcatttattaatttcttatggagtctttactatttgcaaatagtttgcttgcaagccattgctaggttgtaggtactatagttggaaacaggcagatattgtcattgcccttatggaacttaaattctaggaaagaagacagatagtaaaccactgaccatacaattgaagatggtaagtacttggcagaagactgtgggaaacgcagttagcacttgcttgaccaagcctgaggtaccggggataggttcctggagtaagtgatgtttgcactaagctccaaaagatgagtcagcactcctttgatgaagaagggaataatagtattctggacaaaaggatctgtgcatgtcaaggtcttgggtgagaaggatcatagagggttaaacagagtgaggtagaacagagtcaaaggaggatgatgagatattcaggagccagataaggcagttcttgaaaggtaggagctggagttgataagaatttttaaaagatggtggtgtgactgtatggattggttataaaaaatttgggtttctggtaaagaggtaggttagatttaacagattgcctttctgaagaaattaaaaatgctggattaaatgaaacattttcataaaagtattgtggatctgacaaratgatgataagaactgtgaggccaaaaccagtaagcgaatgctgaaaattcacataagctgagcgttgaagctgcttttgccctggtaaamctaacaaacttgagagtattgattttcaatgcctcatagtgtagatggggatagaaaatacaactctgcccatgatcaaggtggagagcccaacaggagacactcccattcagttgagactccctgctgccttaattaagtgtaagggagaacctgaaatgaacccagttccttctcctgttctaggagactgtgagcaggacattctactttaagctcgaaagctgaaagctctgctcaaatgggccagacttacattacctgggtgatattaaaacaaacaaacaaaaaaccctcaagtcatgaaattagttttttgtggttcttaagtaggcaggcctctaagcattcagcagaagcaaacataaactcttcctagagcagcacatcagtgtcctaggtctcgacttactcctataaatatttatatatacttaatgaacagttttagtcaaaaatgacaaaggatacaaggcaacaaagcaccataagcaagaaaaaaaatggaaactacagtcagcagaagcagacctgcagagacttcacatgttagaattaccagatatagattacaaagtcagtatacttgtagtgtttgtaaaaccaaggacaagtgtgaaagtatccacatggaacataaaagttataaaagtgacccaaaagtttagaaaagagaaagacagggaggtcagtgtgtaggcatgtatcagtatcatatgggtgggttgcaatgggcagactggaggaagtggcttgacttcaaagcatcttcaggaggcacagtcagtaggacttgtagtataattgttatattaaatgaaggctgttttgctttttcttatcaaatacataaatctactcacctcccccatttcaaaacaaaaccaatttagttcagtatcctcttttgtaattccacaggtaatgggcagagagttttaatggaaggaactgtaggtataaaagtgtgatggaattagtgaagggttcgtgtttcacacaccatcattattgtgtacaatttaaattttctgtaacagcaaatattttgattccaaaagtgttctgatggcaagagtctgcttctacatttcgtaaagcagttaataaaagattttgtgtattttgctccctttagaatattattcaacaatagaagatgatacattctacctagtttttatggcaaactttctttaatcagtaatgcaacagatgacatggaaatatgcattatttgttttatcttttcataagcccctcttttgaaaccattgtagggaggtgagaagcttacattttctggaaataaaataaaagtgatttttttctcttagtggttgatactaggaatgatagataagacaccattaaagagatgttattatggtatttttggtataaaacccagcaatacctatatgctgctcttagtcaactatagtatctgggagaaagaagggagggggaaggggagatatgcatggagcagtaaacagcaattgaagacagagcagtactcttgggctttgcccccagtgtggaattctagtgagctggaatcgactacgttgaagacattttttttaatgccaggaagccaaagtagctttgaacccaaagcaggacaaaggtcattttctctttctctaaagccctgatggggtttgaccactcttgtaaagtatcagtaccagagaaaaagtaaaaagagcaaatgagacagttcctgaatgagtaytttccctaatgcatatgtagagcagtccaggtctccccatacaagtgcccttgatgtcctccagtggaagaaaaataggtcccagccatttgtgctcactctgaaaaacctgtcttccggctgggcgcggtggctcacgcctataatcccagcactttgggaggctcaggcgggtggattacgaggtcaggagatcaagaccatcctggctaacacggtgaaaccccgtctctactaaaaaaaaatacaaaaaaaaaattagccagrcgtggtggcaggcacctgtagtcccagctactcgggaggctgaggcaggagaatggcgtgaacctgggaggtggagcttgcagtgagctgatatcgtgccactgcactccagcctgggtgacagagcaagactccttctcaaaaaaaaaaaaaaaaaaaaaaaaaaaaaagataaaaaacctgtcttcctagaaagtttcttctttgtggctaactagggtgccctgattttgatgcattcttgggtgaataaggggtaaatggagtaagtgccccctaagaggtcaaccaattgaaaatatgtttgagaaaaattacgagagcatttaaaaagagaaaattaacacctatgtcaccaatactttttgtgtggtttgcttttattctctttatacattaatctaacacagttgtacgcagttgagtttataatataatagagttttgtgtcctgctttttaatttacttttcatgagcatcgttccatgctactagaagttctttgttatcattttaatggctctttgtcagtatctggtaccatactatgccataaatctcactggttgcagttgaataaagaagtttatgaaggctcccccctactctggaagaggcttcctcacagcacactcatgtccttaggtatcactgggggcaggtagcatcgatctccttgtcccatttcttcccactcctcttaaaaacacagagtatagtttttctgtatctgtaccatcagatgccactgagatctggccatgatgttccgttaggctgtagacctgagctgtgtctagtcattgaccttctttcttactgtaaagaggtctaggaggaaataactgtaaagctatatgtcttatatagtgatgttttgttctgttacctgcttttcttttttcctgtgactttgagatctcttttttcttttctgcccctttagggtgagagtgaaatttacattttataaaactatcaactcaatctgtctttctttcttaatatacccattagcagggtttctcaatctcaggagtattggccttttgggccagataattctttgttctggagaggctgtcctrtgcattataggatgtttgccctggggagggggaagaggatggcaaaaatcatctctgttgagaaattgagttgattttccagtacactttaggacagccctggaagtccattatttggctgaatatttaataggtgccacactctagcctttatttaaaagactggagtgctgggaggaaaacatgacaaatgaatggcttttattaattagattttagataattcaatttttcatgtctttcaattggtctttggtttgaaaataaaaattgttaagtttgtcatgtatgatgtcaaacagtgcttaaattcctaaaaagatagccataaatgtttatctgattttgaagagaatttttaatcccagtcttaagaatgcttaatgttttgatgtatactatgtttgatgtaacccgctttcaagttagactcaaaacagattcacttataagttaccactattatttttcgtcctatcaaagaagaaattcccttttgcttctctgaattgcttgttgcctagttagcacttttaaaaagctggtctaatcgaatatgaaccktcaaaagatatacttgaagggccatctgctgaccccagctcttgtccatgtgagcaacttgtaatggtggctctgatggccatgtatgtggagtgagaaacagcagatggttgtaaagatttaaaatcttcaacaagtggccgagagtcatctctactttggagttagtcaagatgctggccacatgtggttagtatgttatgaagggtttcacatattctgctcatttcgggtttttttcccctccttgctgttctaacctcttctcttttgttttaagagctagcattctgtctgctgtagattataagaatctgtaaccaagtggttttgaaaaggaaaaaaagcaaacatacttgtatttctttttccagtgccatagaagattggttaactaatgtagtgaaatggcccaaattagaatttatttgtagtgaaaacctaaggtcccttatttattagcctttcctgctactggcagattcctgattactcacaggtgaagttcagagataattttagcccattccagaaattcttcagtttttttttaaatttagttatttctgtaaaataatgtccatttgaagatgtacttgtgaaaaatatgatttgattttggtgactcttgtgtccactccttgaacctacattctgataaaaagttaaaatccttatgtgacagagatggaaatgtaagtatgaggtggaggaaaatgtgttttccgtagccagggtggagtggaaccaccactatgtggaagtggaaactcccattccgtgtgatgaagaaatgcttgtggcatgcagggcagatggagtgtgaaatagcttcaggacaagaggtacccagggaccttggtttaaaattgcaatttcagaaggaatgcaagcaaacttctggatttcagacagtttggcattctggggaaagaaaggactttaattggtctggcttttttccaaaaagttagacagagtcatctagcaagctgctgtcttctttttcattgccttcaacaacaagcactttataaagcaagtgacaagtttttcttttttgaaaccagagtttaagatttacatgaccagaaagttctagtatcataatttttcaaaatgaagcttatttagggagccaataagtggacctcctaaggaactgaaacacattcagtcagtattttgtcaaattattattgaccaaaccagtttttaattttacatctggttagagcaagcatttttggatatagttggaaagctatctggaccccctccataactagtcaactcccttagcttcctgtctaggctctgcttgctaagtcttgtcctgagatgtaacctctctggcctggagataaagtcaactaactgcatggatggattattttatatattcattcacatgcagattctccacaccctcagaaggcaacctgacatctttattgagaaaattaagacyattttgcattaaccaccacatctttttctaacaccaaatcatttctgtctctctccactcccccaccaccttctgtttcctcttttcatcactcctgaccctcctccttgtcaaagcccctctccctgtgtcttcatcctgggcttccttctccatcttatgtttctcttgtttcttctcctggcactcatcctcctcccctttctcattcttgccacttattttctcctgcctatataacttggtaagccttctctcgtttccttaaaaaaaaaaaaaaatcacatctcaactccattgtgtatctctgccatttcactgctctatctctttcttttatcatctattaaaactcttctattaaggaagatttaaattctgatttgtcaactcagtgttttgttccctactgtggtcatcttcctaagccctctgtggcctttccatttttaagtttcccttcttccatgactacatataatcatcttggttctctttctacctttttgacaaatgttttgccttttggtgagttttctttctttggagagcttctccattttctcaaactcagtttttattttagttttgataaacttacaaattgtttctaactccagctctcctgattgtttttgaaatctcttctctcatagccttgcttatttttctaggctcatttcacatgcagtaactttgtttttttccccttaagtcatagtcctttatgtaatataaagatgatagtttactttattttgaactatagtaaccagctcatctgcatggacccgtatatcatggtcgacttgacatttcttgcacattgaatatgatagaggtgggagatactccctacatttataaactctctgaatcaaaccatcttattttgaagcaatatctgttaatctttcctttttatccatcatctttaataatttggtgtagacatgtaaaatgtgttttacctaagaagatgagagttgaaatactgagttgaatgtgtatgtctatcttcctggtaatgcagggagtaggaagaatagacaggatgactaggggaggatgtcacatatctgaattaaagtagtagtacctttctgcttaatagttagaaatgagattataaaacactgacattgatttttcttgtgactgattaaatgagtcacactagtttatattcatatcatatatgtatagcattccagagtaaaactcttagacatgtttcaraggggagtggaacatttgttaaaatcctggttcctcactgggaagttggaaaggycagaattggagctaacagtgaatctaagaggtagaactagaccgggaaccaagtgtcaagttgattgtaagaactgacagcagtggtcaggcagaggggtaggtcaggtacaggagatgcttggaggccggtggtgaaaaaaaaaaaaaaaaagccgaagactcatataaaccctgtgagcagttgagtcattgagcacacagataacaaacatcaaacagaggaaaccagaagcttgatataccacctagatcactaaggaaatcataacacttctttcatgttctagagcccaccctagtgagtggatagcccacaagctcatagctagactcagtgaactgtgataaggaagatggtggaaagctgactagtgtggaggtgagtgaggtcagagagaagacagatctgaagaggattattgatgagatcattatgaagggcatgctgaaacttctaatatgaatagtccagatttagataaaagggaatgtagaagtagcccaaacttcagtaactaacatttcttatattatgtatttatgtgttcacttatttatatcaacactcctatcccatcttaatgcatgttagttttttgtyttatgaccctctgccacccacttytaagacccattcttaatttgttacatttgaataaatatctttcaaaaaacaaagtagtagcacaaattgaccacagtattcagtaaagctaaattcccctttttgccacagtataaagtcactyattaaggtctatgaatggtgctatattgaaccaatacattttcctttacatgtacctatttatcctttcatatttcaccaaatatttactgagctcctagttagataataaaccaccttatcactggtcagttaatatttattgaatatatttggtgtccctagcaccattcagatgtattttttactgctaatgtctgtcatttacaggtgtgttaatagccattataattgttatgaggccagaatgatcactttggatagagatttttaaaatgagtttttactcattataaaattataataattgacattctcatttgattttgataatattgataattgatgaaatgatcattgtagaaaactgcagaaaacatgaataaaataaaaagcacttgtaagaccacttcctagaaataaccactgttaacatttgggcatatttcttcttttttttttaaccccaacaatgactacatagggcatatttctttatgtgcacacacactctctctctctctctctctattttctaaaaatagcagtgatatttgtctgagttcaggctgctataaaaaataccacagcctggaaggcttagatgacaaacatttatttctcacagttctagaggttgggaagtccaagatcaaggtgccagcagatgcggtgtctggtgaggaccctttttcctggttgtggatggctgccttcttgctgtgtccttatgtagaggaaagagcaagaatctcctgtctctttcttttcttataaggggattaatcccatcatagggggcccacccttttggcctcatttaattctaattacttccctaaggttttacctataagttcatagcaatgtttgtatatagttttgtgtcctggttattttatttatcattaatcacatcatgagcatcttatcccatccgtactttaatgactatgtaatattcgactcaggactatactgtaacttatttaggatctttcggcctttaggttatttatagtattttgctgttgtaaaatgactttcatatagctgtcttaggcataatatttgtctgcctctaattatttccttctaggtttgtagaagtgtgattattagttaaaacatacttggcatacctccagaagccagggccacttggtagtttatgattgcaccaggttttcaggttaagtctataaataatgaagagaggaaggaacatagaactgccaactagaagtaaacaggctcgtgatctggtgacctgagcgactctgaatgcttgctgagtcctagttggccatctaggttggttcccatgtttgagagacgaggatggatgaatttaaggtaagcaatatatgccatagctataygtgctctgtgcttactggtttgagggcttttgtgtgtttttgtatgtgtgaagatgagaaaaactatcaacactacctctgttgtgtcttgtcaattaagtagtattgattattgctacttgctgttccagaagaaaaaaaattcaattttactcttaatattccagtattaatttagcctttcagattgaaacttctttaaaagttttcaatttatgctagttaaattagatttagtgttttcttgaaaaaaaaaaatctagttttarattagtggttgccaggagctggggagtagagggcagaggggcaatgcaggtatgactataaaagggcaacccgtgagatgggtgtggttttggaagtgttctgtgacagctacatgaacctacacatgtgataaagtagtatagtattaagtgcataagagaaattagtacaagtaaattaggaaagtctgagtaagattggtagattgtttccacactgataatcctggctgtgatatgctataattttgcaagatgttacctttgggaggaaactggataaagggtacaatggtgactggctatattatttcttacaatttcatgtgactctacaatggtctcaataaaaatttcaaaactaatttttttctggttctaaaaattggtaatattcaatagtgkttttttgttcagtgacaaatttgaaatgagatttatattcacaagtactatgttcagtatttttttttcattaagtttgtctaatatgaacagaaggaacaaatgctttttaaaaatctaagtttctaaaattatgaaataattttctttttttcctctcctttagccatgaagactttgaatttatttcaggaacacgaatgcgcaaacttgctcgagaaggccagaaaccacctgaaggtttcatggctcccaaggcttggaccgtgctgacagaatactacaaatccttggagaaagcttaggctgttaacccagtcactccacctttgacacattactagtaacaagaggggaccacatagtctctgttgrcatttctttgtggtgtctgtctggacatgcttcctaaaaacagaccattttccttaacttgcatcagttttggtctgccttatgagttctgttttgaacaagtgtaacacactgatggttttaatgtatcttttccacttattatagttatattcctacaatacaattttaaaattgtctttttatattatatttatgcttctgtgtcatgattttttcaagctgytatattagttgtaaccagtagtattcacattaaatcttgcttttttyccccttaaaaaaagaaaaaaattaccaaacaataaacttggctagaccttgttttgaggattttacaagacctttgtagcgattagattttttttctacattgaaaatagaaactgcttcctttcttctttccagtcagctattggtctttccagctgttataatctaaagtattcttatgatctgtgtaagctctgaatgaacttctttactcaataaaattaattttttggcttcttatttatgtgatctattttatattgctttgtttccgtataccctttcctccttgtgaaaaagtttctgatggaagagggaaaacgcaggcatcttttattactggaatccaatacttagtttctaatactgtattacagtgaaatttttgatagcaggagactgtgttccattattttatgtgggaaaataataaggcattcttagtccatccaaaaaaaagtttctttgaatatttctctaatattcttaaaacacctgtataacaatttccaaggatttggaacatagatgggtacatactgctttagttaggaaaaactagcttatgctgtagaaacacatctctaaatttgtgccatttgatccatacaggttgacattctgttcaccttagtcattcagggtgaagttctcccaccttatgttcctatgtcaaaaagaggttttagagggaaagagcatacaaattacacaccaactcttcagtgttttgaatcagaagtaacacacatcacctgctggttcattgggcaaaacaggtcacacggccccactcaaatgtaaggagggttaggaaatgcagacttctgtgggtataggaaggcaagtagactgggaatattggtgaccatgagttgtgagtaagtaccaaagttgtcattctgttctctgtatttggaagtggggaatagggatgcatttcttgtattggtccgttttcacrctgctgataaagacatacttgagactgggaaggaaaacaggtttaattggacttaaagttccacatggctggggaagccccagaatcatggtgggaggtgaaaggcacttcttacatggttggcagcaagagaaaatgaggaacatgcaaaagtggaaacccctgataaaaccgtcagatctcatgagacttattcactaccatgagaacagtatgggggaaactgcccccatgatttaaattgtctcccaccaggtccctcccacgacacgtgggaattatgggtacaattcaagatgagatttgggtggggacacagagccaaaccatatcattctgccccggcccctccaaatctcatgtcctcacatttcaaaaccaatcatgccttttcaacagtcccctaagacttaactcatttcaacattaacccaaaagtccacagtccaaagtctcatctgagacaaggcaagttcctttcacctatgagcctgtaaaatcaaaaacaagctagttattcccagatacaatgggggtacaggtattgggtaaatacagccatcccaaatgggagaaattggccaaaacaaaggggttacagggcccatgcaagtccgaaatccagtggggcagtcaaattttaaagctccaaaattatcttctttgactccaggtcacgctgatgcaagaagtagtttcccataatcttgggcagatctgcccctgtgactttgcaaggtatagcccccacctggcttctttcactggctggcattaagagtgtgggttttccaggtgcacagtgcaggctggcggtggatctaccattctggggtctggaggacagtggccctctactcacagctccactaggcagtgccccagtagggactcggttggggggctgccaccccacattttgcttccacactgccctagcagaggttctccatgaggaccccacttctgcagcaaacttttgcctggccatccaggcgtttccatacatcttctgaaatctaggtggaggttcccaaaccttgattcttgactactgtgcacccacaggctcaacaccatgtggaggctgccaaggtttggggcttgcatcctctgaaaccatgggctgagctgtaccttggccccttttagcaatggctggagtggctgggacacaagacaccaagtccctaggcagcacatagcatagggaccctatgcccgggccacaaaaccacttcctccggggcctccaggcctgtgatgggaggtcctgccatgaaggtttctgacatggctggagttattttccccattgtcttggggatgaacattcagctcctcgttacttacgcaaatttctgcagccagcttgcatttgtcctcaaaaaatgcgtttttcttttctactgcatcatcaggctgcaaattttccttttatgctctgttttccttttaaaatgaaatgctcttagcacccaagtcatctcttgaatgctttgctgcttagaaatttcttccttcagataccctaaatcatctctctcaagttcaaagttccacagatctctagagtaggggcaaaatgtcactagtctctttgctaaaacataacaagagtcacctttgctccagttcccaacaagttcctcgtctctatctgagaccaccttagcctggaccttatcagtatcagcatttttgtcaaagccaatcaacaagtctctaagaggttctaaactttcccacattttgatgtcttcttctgagccatccaaactgttcaacctctgcctgttacccagttccaaagtcgcatcctaatttttggatatcttttccgcaacacccactctcggtaccaatttactgtattagtctgttttcatgcggctgataaagatatacccaagactgggaagaaaaaggtttaattggacttacagttccacatggctggggaggcctcagaattacagtgggaggcaaaaggcacttcttacatggtggcagtaagagaaaatgaggaagatgcaaaaacagaaacccctgataaaaccactagacctcatgagacttattcactaccatgagaatagtacaggggaaactgcccccatgattcaaattatttcccactgggtccctcccacaacatatgggaattatggaagtacaattcaagatgagatttgggtgggggcacagagccaaaaccatatcatttctcaaggagcttgtaatcatacacaccagcaattgtagttcagtgttaaaaggggtaatagtagatagaatactgtatgattgaatagtgatggaacagaggaaggaataaactagatataggggatggcagtagagataggaggtgagaggaggtaagaaatgcttcacagcagaggtgaactctgagttcagttttatatcatgagcacttgttttctgagtagaaaaggtgggaaaacatactcctagcaaacagaaatacataaaatagttggacatatttcagagactgtaagtgccttggatacagtttgggtgaaaaatgccaagtgtgggaagcagtgagaaatgaggcagagggaataaccagggcccttcacttaagataaaatgagagcctgacttagtccaatggcaatagggacagatgagagaacagggcagaatcaagaaatatttatgtggtagaactgacagagttgtttgattctctggatgtagaggtggagaagaaaggagaacttgcacggaccttcaaattcctgatttggatgagacaaatggatggatggtagcactggtaatggagacaaggtagayggagataggaggattccagttagtctgttcttgggggtgtggaggatggggcagcctatcaagttggctcttgtagaatatttgcatttgtagaatatcaaataggatcttcaagtaaagatgcaggaactgggtatagaattctggctgagatcagctttttatgatcatactttctatgatgaaataatcttttgtgatctggccttgaagattcatcatttataaagggatagcagattatacatggaagttttgtactggcattcaggcaaatggaaacaaaataccactaggaaaagaaatagaaggaaaaatgcaaaaaaagtggatcgtggaatcattagtgagaaaattgataaacagaataaatggagaatatgrgtaagtggattgtgaataaaaatattcattagggagtggtacagagtggcatatggatgtgttggggaaaaattagaggtagtagttgataagcatatacacacatattttttgctccacattatttagatctcactattgaggaataactcctttatttaagtctacaaagactgaagggtaccacagatactcctccaaccacaaacagagtgtgacatcacgccttaactccactaattcaaaaactcccaccagagttgaacgtgtagaaacagatgcaaagttctagagacaatgcattgtgagttcgtggtggcaaggacagagctgggattctggaggcagcaattgtctagtggagatggcacccatggaggtggggtctcgtgtagaagtgctgtcctatctagaatattccagggacataaccttggctgggtcctctactaccaacttactttcattcttgaaccactttctaaacctcattcttttgcatttttcatcaattctgtaaaatacccagtagccttcccataaattctctacaaagactgaagggtaccacagagactcctaaattatctggagtaagtttctatcatttgctaccaagaaccctgaccatgacaggtggcacgtgaaaaaaagtgtatttttcataaaattcttgatactgccaaatctctagatgatttttactgtcaacagtgtattttaaaagctaaacatacagtgggggaatagacattttaaaaaatacttggcagtcaagaaacagcatcctttcaagactacaccaatatacttattaaggtgagaatgagaagatgagaaattaacagcactggggtgaaatatggtctagaaagtaaccatgtgttctatcaggccattgtcgttagtctagtcccctctgtgacctcctgcctccagctcaccagagggggacatggtgagaacatgactccagactcctgtgtccgtggggtaagtcacccacttgtatgttccagacagaaaagaaaataaaagcaaccaatgatttccaccagttcacaggttggtatttgagtctttacaaatctaatatatgcagaaatttcatttttcctcttcccagttcataaaaatgagctcaaaccaatgtttaaaacattcaaccctcatatcaaacctctcctgtcaagtggtcttggaaatctagtgccatttttatctatccattagctggaaaagtgaatgaaaaaatacatttttttaaaggaagaaggaaaagtgcaatcatcttggcagaaatacagtgtttgaaatctgtcacttctctatttcactatgataaccaagaccacatatttgagttccatttccgtccaagaggggaacaattatgtctttctcttggaagtcagcattcaaattctttatcagggaaaattccgaagtcatgcttcccacatatgatatatccttatcagcacatatacatccrggagtgggttggcttgcaaagtaaggaggtatttgcccactgggcttcttttatgtgtggagtgtatttcttagaaggcctgcaagcctttttggttgtatttctgcaggatcgcattttctattccacacagtcttgtggaataagactgtggaattatattgaatataattatatataagttgtgcaaaaaataccctgcccacctaactctcagtcagtctttttctagactgagctaaaatctggcctcccttaatgatatgcatttgaggactacaactgagcagaggcacggtaagactgaagccttatccccactttctgctccccatgattcccaagggaaatggcaccagactttagggcctagatttaaggaactgaaataagaagcatggaaagtttcatcatgaacttttatctcccggacctgtaccagcactgggcatctataatggtctttattaagaaggggaaaacatctatactgaaataagaagaccaatgtcttctctgcttcccttcaccttggcttatccagtctgagaatcatgtgttctccc

SEQ ID NO: 94906 - DNA, 25981 bp, Homo sapiens
cctgtcactgaatctaaatgacatttttcagccttgttttactgagtaagtgtcaaaggcagaacttgagaagttgtcttcagactctaaatccaatgaaatgtattctctaccaacctggtgatttgcttatctgtaaattatttcgcatatctccttgctagctttgtccttgctcttaggatctttcacttaaaaaaaaaaagggtctattatgcttttatatatgatgtcagattcagtggttctgcagcggcttgctaaacggagaaaaaagtccagtcattactaatgaagaaaactgtgatctctgtcccactggtcttatgaaagataataatgttttctccctaatatctacttatgtactttaaaaagaattttattgataaataatgccatgatacactttcatgggcagagaaaattcctaatgggccaattacatccaagtcgatttatatattttaggataccaaattctgtctaatgtcaatgagggtgtgtgtggccagggtagcacaagacaaggatttgggaataagagaaaaacaaacataagtttactgaggtttttttttggggggggcgtgggggcacagtcttgctccgttacccaggctggagtgcagtggcatgatctgggctcactgcaacctctgcttcctgggttcaagtgattcttgtgcctcagcctcccaaggaactgggataggggcccaccaccatgcccagctaatttttatatttttagtagagactgggtttcaccatgttggccaggctggtcttgaactcctgacctcaagtgatcctcctgccttggcctcccaaagtgctaggattacaggcgtgagccactgcatgggccagtttactgaggtttttagaagaatgaattttaatattgtcatcttcggtaacaagaagaaatgtggcacatttttttcaaaaacgcagtgataattacaaaaatttgctccattcctttttactcctgtgttagcccaggttctgacttctccctttttattagggtaaaacaaggagaggtccccttgataccagtctctactttccaaatgagcctgcatactatgtgttgttgggcagaattatctttaaaaaaaaaaaaaaaaaaaaaaaagcacagcggtgatcattttgctcttctgcataaacacccttgatgaatccccacatctacagtatataaaaagcctcaaaatgtcttaacaaggcaattaaaaccttatattatcagatattgatatatctttctaagtttattctctgatcataaagggcatgctgaggaatttggaatcttgggggaaccagcatatattcaagtaacaatatgcagaatggacctgagaaggaagaaagttgacaagtaatttgaatgccacaaagtgaaaatgaagcaagtttgcaactatttcagtagagaaagaaggccatattcaagagatgcttttaaggcagatggaatagacagtgatatcgataggatataagtagtgaggaggaaaaaagaattaaggataacacccagatttttagcttgagaaactgctgaaccattaaccagagcatgtttcaaaggcaaggaaggcagggcaggctgggtgtggtgcctcatgcctgtaatcccagcactttgggaggctgaggcaggtggatcatctgaggtcaggagttcgacaccaccctggccaacatggtgaaaccctgtctctactaaaaatacaatattagctgggcgtggtggtgtgtgcctgtagttccagctacttgggaggctgcagcaggagaatcgcttgaacccggctggcggaggttgcagtgagccgagtttgcgccactgcactccagcctgggtgacagagcaagactccatctcaaaaaaaaaaaaaaaaagagagagagagagaggaaggaaggaaggaaggaagggggagggggagggaaggaagaaaggaaaggaagggcaggcacagtggctaacacctgtaatcccagcactttgggaggctgaggtgggaggatcacttgatgccagtatttcaagaccagcctaggcaacacagggagaccccaattctacagaaaaatttttaaaaatgaggtgggtgctcactttggcagcacatatactaagactgaaatgatacagagcgtagcatggcccctgcacagggatgacttgcaaatttgtgaagcgttccataaaaaaggaaaataaaaaataataaaaataaaaataaaaattagctgggtgcagcgtcacacacctgcagtcctagttactatggaggctgagaggatttgagctcaggagttcaaggttacagtaagctatgatcacaccactgcattccagcctgggtgacagagtgagaccctgttggggaggtgggggtgggggcagtaggggaggaacgtgtgtagtatgtgacaaattgaaattaacatgtgcttcatgtaagatgtctacatggtaccaatgtaccttaggcagtcagaggtaaggatttggaaatcactgacatagggttaatcattaaagtcaaggtagtggagaacctcactgtataagatcagagggccaggaggaccaaggtttaaatgctcttcaggcattccccaacgctactgattttgcctgaaactaattgtatacctattgtttcacaatctccagagtataagttttttggagaacatgaaatcaagaaccctgggtgttttaggagggaaaagaccactgtattagttcaggtctccggagaggtggtcagaaaactaagagccggtgctcagtatataaccatttaattctgtttttcatcttctttaaagacaactcatgacgagaatcaagggattcaggtgaactggcatttccagcaggtttaaacaaaagtacatccctcccccaacttgttttccaagtttattgtatttccactataaaatgatttcaagttctttacacttatttggaaacaaaaatcatacacaagaaaaaaattaagaagagttaacgaaaaaacattcatccaaagaaaattatgactaatccctctagactcttctatgcatagtttggctgtcaaactttttcagttatactgtgcaactttgtatcacggttttcatctaacattatatattagcatttccctatgttatttaaaagtttaataaattagttttagaggccacttcacatacactcagtgaagtgacataatgtactgaactgctcctagctgtacccaactttatcccgctacccgctataaataaagctcggaccgaggtcttaaggcttaaagcatttcctgactttggatgacttccttgggacatattcccaggagtgttattcacgagtcacggtcataatccctcatttacacccacccctagctcgatcctcatcccgcgacccctcacacgcggcccgccccattctcctcatcctctctgcacgcctgaatctcctccttcccgccccctacccaccaagagccgatccacttccctcctgaccccctacagcctccccacacccgccaggcccggcagcagtggagatgaaataccttaggtctcactgcctcacaaaaacaccaatctctctgtggccgcccaacatcacgccgccgcacataagaagttctgggcagccaccggaagcaccggccctcagtcctctgataggtgggcggtgatatcggtcctctgataggtgggtggtcctctgataggataggcacgctccgagatggccccgtctattggcttttgaatatgcacattagcagagggttcgtcccactggccaataagctctggctctgccgcacggatcgctgggagtggtagtccccgtaaaaccaccgaccgcaagcccgccacattttccctcccttaagcacttgagctctttccccacttctcgtcggttctcttgtctaaggagtccaggagccctaggatcaccacggctttttaaccttctttaaaatctgataaaatctctcaggaaaatgttcttatctgtacacaaaatactgtgcattgagctgaagccgctgcatgggcctgtcccagctacaaatccctgttctaccccgaccctaagcgtgcctgctctggccgcagcctatggatttagtgcgtcccttaggcttcttcagacctatgaggaattccaggtcctgaccctcacagtacagtcgacaatcatctttctttaacaacacagccagaacaccttcagggatgcagacaacctcatctgggacctaagcatccgggagagtggggatgaggaaatggaggaagaacacccttggggctcattctggaccagtttgccaggcttttctccccatgcctatcttccagtgccactcaggagaatcatatcttcacatcagtttttatgtttttctttttcttttcttttctttttttaaaaataaagatggcatgcctgtaatcccagcactttgggaggctgaggcgggcggataacctgaggtcgggagttcgagaccagcctggccaacatggtgaaaccctgtctctactaaaaatttaaaaattagccgaacgctggtgtctcacgcctgtaatcccagctacttgggagactgaggcacgagaatcgcttgaacctgggaggcggaggttgcagtgagccgagattgtgccactgcactccatcctggcgacagagtgaagattctgtctcaaaaaaaaaaaaaaaaaaaaggagagagagagagacgggatctcgctatgttacccaggctggtcttgaacttctaggctcaagcaatcctcctgcctcggtctcctacagtgttgagattacaggtgtgagccattgttccaaaaattgatatacttggcctcacatcaatttttggaacaatgcaggtaataatgagggggaaaaaattttaaaagtcccaattaccctttaaacaaatattacctcctccaaaaaatatttttctagattcctgaatgtattttttggtggaggaggaactcaaagtagaattcatttacatattcattcattcattccacagcactaatcactccatgcagtaactgtgtgtccccgtccctctcagacttagtacctggaagacagccaacctgtcttaattctattggtatccccagggcgcatttctttgccttgaaaattgagtacccaataaatgtgcgtcgagcagaactacacgagatggagaacaggggtttaggggtatgggggagagtcagcaattactggtgtcctccctccctcccccagctctgctcctacagatccaggacgcctagcgagggtaggaacctcttctgtgcttccgcaacgstctgaactgcacggcactgagcgcatctaattaaagtgatggtttcattagatagcaacacagcgagaccccgtttctacaaaaaataaaaataaaaaataaaagattagctgggcgtggttgctcgcgcctctagtcccagctacttgggtggaggctgaggaagaaggatcgcttgagcctaagagttcgaggttgctgtgagctatgatcgcgccactggactccagcctgggcgacagagcaagatcctctgtctaaaataaaaataaaaataaaatgatggtttaatcgccggcctttgccccttctgccccccaccccccacaagtctgtaggactgggttgacttcccagagcttactacagattagatgctaaataaatgtctattggacggatgcgcgaatgaatggatggatggaggatgtggttgtgcttaccacgctccctggtcagtgggttaatgtcgtcaggcggggccaggctcgctaacagccgggcggggtcccttcccccgggccccgccccggccgaccccacctttccgcgcggctccgccccgccgcccccttgccagtggcccctccccgcgcaggtcccgactccagccgcacctcctccggctctgcagtggcggcgaggaggcgagccggagcgacggcggggctggggccggagccgagccggggtcgggcagcagcagggaccccccagaggcggggcctgtgggaccgctatgggcgtggagatcgagaccatctcccccggagacggtaccgggctccctccggagccaggggaggggaggggtcccggggcggagcccggagggcgggggtctgattcggaggtggcgtggagggtgctgaagggtcggggggctggatggggaaggcaggcggagacgccggacgggattcttgggggtctaggagaccatcctccgccatcctcttccgcgctcacctaggggaatgtaggcggcagctcggaggcgggggtctgcggcccggaggcgggggtctgcggcccgccaccgccccgggcttctcctgtcgcggctgcagtcgttcggttatccgctgctgctgataccccagcctgggtttcggcttcgctttccctgccctactcggcgagctctggaaagcaggacctgctctcggatacccgctgctcggggacctcctcctagcgcgtcccccgccgggcctcccctcggtcgcttccctgcgggccgggctgtgagcggctgtggggacagacccaggctggggaagggggaagcgctcccttgcccgcttccggatctcgctttatcctgccgccgctttcagactccctggccaccctgtccactcccatggcctccacattgaagcttctaagcccagccctgcgacctacggccgaacctctccctggacgtcccagggtgctccctggtcagcaagtccaaaacagaactctcgcttcccaccttctctcctaagtgatcctctttatcccccttccgtgtctcactttcccaagtccttgtattactgggtctgggtgtgcaaggaatagccatttctttatttcttgaaatttaattaataccaaagcccccattgyctgcagggtttgatgggcaaacttcatatcagatattattaatatgaacagctcccctccccaggaaattggataacttcttggctccaggccatcttccttgtccaatcccagccactacttcagatatcccctggagtacaggcttctttgcccacgcaggaaacattgctgctgggtcccagaaagcatctccctgaggccttttcatccctcagcagcccctgagctaatctccccatcttcagtctctcctccctgctttcaatctcgtccccaatctcatattcactccctttctatatcatagcctgaagactcttcttaaaatgcagtggctcacgcctgtaatcccagcactttgggaggctgaggcgggcggatcacaaggtcaggagttcgagaccagcctgaccaacatgttgaaaccccgtctctactaaaaatacaaaaattagctgggcatggtggtacgcacctgtaatcccagctactcgggaggctggggcaggagaatcacttgaccctgggagccagaggttgcagtgagctgagattgtgccattgcactccagcctgggtgacagagcaagactctatctcaaaaaaaaaaaagaaaaaaaatgcatgtttgactatgcccctccctcaggcagaagatgttttaatgattcttccctctcccccaggaggggcctttggtgctatggtctattctcatcttccacactagagcttcatctctcaccacctgtcctaagcccaccactaactttttcctccagctttcccaagctgcctgcaagttgtcaaacacaccactcgttcagcaaatatttattgaacgtgtgtgctaggccctaaggtgacacagttgaaacagacagggttcccgctattgctggactgagggcctttgaacatgttacatgttgttccctcttcccagatggtgttttttcacttcctctggcaaactcttacttgtctttcaagacctggcttcaccattctctcctctatgatgttttccttgacttctgtggtcagttagctgctccctcctccaggatcccatagagtcctctaaatatcggctctgtggttaggcttccttaggctttgtatccagccccgtagctttaaattccagccaaatttatacctccagtgcagactcttcatctgcctacttgcaatataaactcagatgtctaataggcatctcaagattgccacccgcacaaatctgttcctcccgtcttccctatctcaggaaatagttgcactattcatccagttgcccaaacagaaaacccaagcatcgttcttgttgtctcctttgtcctcatcctggaccccatttccagtctgattgcatgacctgtcagctccgcttcgaaaatatgtctccaatctttcactctcttctctgctgccaccaccttaaatcaagctatcattgatttcttgtctggattattgcaacagacgcctaaccgtccatcctacacatagcagccagagtgatgttataaaatcttaattcagattatgtcattctctggcttaaaaccctccagtggtttcctattgcacttagtattaaatccggctcttcaagccctgcatgatccatgtccttcccacctctctcctccctcccttctttccagcacctagcctccttgctcactgcaaatgtgttgattctgtgcacttgttactcctttcccaagtgctatttcccagtattttgctcatccttcaagtcccagctccagggggcaccttctccaagaggccatcctggaccactctgtctgaaatggcctgtcccactgcatctccctttaatacatcattgtgtgtattttctttagagtattcatcataatccataatcattttgtatatttaagtattgtctctgtccattagaatataaactccagggcgggtttggtggctcatgcctataatctcagcactttgggaggttgaggtgggagaatctcttgagctcaggagttcaaggccaacctggacaacatgttaagaccctgtctctacaaattttttttaaaaaaattagctgggcatggcagcatgcacttgcagtactagctactcagaaggcagaggaagaaagattgcttgagcccaggaaaggtcaaggctgcacagagccgagatcatgctgttgcactccagcctgggtgacacactgagacccctactcttaaaaaaaaaaagtaaactctaaaagaacagggatagagatcttgtttgtagtgttcactgctgtatccctgtgatcaggcacaggcttggcacaccataggtactcagtaaatatttgtggttttgttttgttttgttttgtctgtttgtttattgtgacagggtcttgctctgtcacccagggtagagtgcagtagcatgaacacagctcactgcagccttgacctcctgggctcaaacaatccttccacttcagcttcttcagtagctgggactataggtatgcggcaccacacccagctaattgaaaagattttttttttttttttttttttttagagatggggtctccctatgttacccagggtgatctagaactcctgagctcaagtgatcctcccacctcagcctcccaaagtgctgagattacagatgtgagccaccatgcctggcctctcagcaaatatttgtaaattattgtgtttattcatctttgatggatggattataatctgcattgtaatctggtatttgtgtgtctgtttccctaccttcctcatgagttcatacattgctctgcatgtctgaagtctggtccaggcctggcacataggaggccaactgtaaatgtctgtggaatggatgatgtgaagtaaaaggggcaatcaaagaaagtgggggtggggtggtgggaaagcccaggagacagcagaattgagaaaattgagggggtaaagtaaatccaggccagagaggtgacgtgattcattctggctcgtacagggcccagagccagaactagggccacaggcatctccatggcatggaggggaatgcaggctggagctcttggtcaggatcatacttaatgtcccaggtgtttttccaataycctactccttcatctgccctcatgtctccctgcaggaaggacattccccaagaagggccaaacgtgtgtggtgcactacacaggtaagtctcaccccctcagcccccacccagtccttcccctcccaaggcagggctgtcctctgagcttctctccagaggtgcctgcctctggatcagggctaaagcccaaggcagcagggtctccctgtgaccagccatcctctactcctcccagccagtctagtgggaatgataaaggaggcttggaaggccaactctttccctcttctaccagcaagggccatccatggtgccagcttctaggtgagtcaaacaccttcagtccccttccttctgttgcaggtrtggtggagcccctgtccctgctgggtctgtctgatatttggaaatccctcctagagctccccgcagactttctctccatcctgcagtatcattagagaagaagaggaggggagaggacagacaagtcacccagaggctccgatgccatttgaggggtggggtgatggcagtgcttttctctgggtactgagggagcccagagcgggactgatcccagttggatgctctttatctgcaggcgaggtagagtgagttcttcaggactgctggcaggaagatcatgagcaggtgtttgttccaagggaggtgagcaccctgccttgtgacctgcttcctaaagtggcaaactcgatgacagccacttagcagacagcaagcccaggttaattcctaggacatactcggatggggccatttttagcagttctgtgggccagtgtgaagcacaaggttaattctaggcagatggtgtggatgttttcagcagttgtgttgctggtcgctgatgtcagtgggctggaccatgttttatctcctggtgatgtggcctaattaccatgggtcgtctggggcctctgacctgtgtaattgatttaacaattttgcatgttgtagacagaccagtatttatcaagttactgaaaccacaacatccttttgcaaagtcctttcacaatacatacatagggcagcagctcctgtcttgggagagactatgtcttatcaaacatagcgggagactatgggacttttggtaaactttaaagttaaatataaatatagtagagaacataatgtaagatgtctaggtcaatgaattttttcaaagtgatcacatttatgtgactaccacctagagaagcatagaacatacaagcatagaaccagcatccccaaaagtccccctgatgccttctcccagtcatttcacctccctagaggtagctatcattgtttttctttttttttttttttttgtcattgttgttgttgttttgagacagggtctcactctgtgactcaggctgagtgcagtggtgatcacagctcattgcagcctcgacctctcgggctcaagtgaccctcctgcttcagtgtcctgactagctgggaccacagacatgagccaccatgcctggctaattttaattttttgtagagatgagggtctcactatgttgcccgggctggtctcgaacgcctgtatgcaagtgatccttccaccttggcctcctagtgctgggattacaggtgtgagccactgtgcctggctggcaactattactctgacttttgtctccatggattggttttgcctatttttgaacttcatcttaatggaaccacagcgtaggtactcttttgtgtttggcttatttcactcactattatrtctgcgagatatatccagaatggtttattcctctacagtattttaacgtacaagtatgttgcaatttatgtatcctctctaccgttgatgaacatttgggttgttcatagtttttgtttattacaaacagtgtcactttgatcagtcttgcaggcatctcttagtgtacatgtgtacagacatatgtgcatgtttctgttgggtatatacctggaagtggggtacctcctgggctcagcgttagcagtactgtctgacagctttccaaagtcgttgtgccagtttccactctaggcagctgtgtaggagactgccagttaccctgtgtcctccccaacacttgktattgtcaggttttggttttgttttgttttttctttttttgagacagagtctatgttgcccaggctggagagaaatggcatgatcttggctcactgcaacctctgcctcctgggttcaagcgattctcctgccttagcctcccgagtagctgggattacaggcgcccgccaccatgcctggctaatttttgtgtttctagtagagacggtgtttcaccatattggccaggctgatctcaaactcctgacctcaggtgatctgcctgcctcggcctctcaaagtgctgggattacaggaatgasccaccacaccaggctttgttttggttttggcctactctggtgagcgttcagtaccatttcattgtgggtttttttgttttttttttttgagacaaggtctcactctgttgccaaggctggagtgcagtggtgcgatcttggctcactgcaaccccgcctcctgggttcaagcgattcttgtgcctcaacctcccaagtagctgggattacaggtgcgcaccaccacacccagctaatttttgtattttttgtagagatgggatttcaccatgttggccaggctggtcactgtggttttgatttgtgtttccctgatgatgaatgaagttgagcaccttttcatgtgcctactggccatttggatatcctctttagactgctctaattttgtccattttagaaaattaggttgtctttttctttttctttttttgagacagagtttcactcttgttgctcaggctggagtgcaatggcgcaatcttcactccctgcaacctacacttcccgggttcaagtgattctcctgcctcagcctcctgagtagctgggattacaggtgtgtgccaccgtgcccggctaattttgaggtttttagtagagacagggtttcgccatgttggccaggctggtctcaaactcctgacctcaggtgatccacctgcctcggcctcccagagtactgggattacaggtgtaagccatggtgcccggccggttgtctttttcttgttgatttataggagttttgtatatgttttggatatgagtcttttgttggttatatctatcccaaacatcttctcccacactatggcttgcctttttactctcttaatagtatattttgaacagaagttctttttttatagtttatattttcttcttttctttctttttaaaatttttttctttcttttttatttttgagataggatctcactctgttacccaggctggagttcagtggctctagtcttcagggatcatggctcactgcagccttgacctcctgggttcaaggactcctcccatgtcagcctcccaagtagctgggagtacaggaacatgctaccatgcctggctaatttttttttgktttttttttgtgtgtgtgtgatggagttttgctatcgttgcccaggctggagtgcaatggcacgatttcagctcaccacaacctctgcctcccaggttcaagcaattctcctgcctcagtcttccgagtagctgggatttcaggcatgcgccaccacgcctggacaattttgtatttttagtagagactgggtttctccatgttggtcaggctggtctcgaactccctacctcaggtgatctgctcgcctcggcctcccaaagtgctgggattacaggcgtgagccaccgggcccggccacctggctaatttttagtttttctgtagagaggaaggtctccctatgttgcccaggatggtctcaaactcctgggctcaagtgatcctcctaccttggcctcccaaagtgctagtattacaggtgtgagccactgtacctggcctgaacagaagttcctaattttgatgaagtctgacttatcaatctttccctttatggttagtgctttctgtgttcagtttaagaaatctttgtctgtcaggccaggtgcggtggctcctgcctataatcccagcactttgggaggccaaggcaggtggatcacctgaggtcaggagttcgagaccagccttgccaacatggtgaaaccctgtctctactaaaaatacaaaaattagccaggcatggtggtgcatgcctgtaatcccagctactcgggaggctgagacaggagaattacttgaacaacccaggaggcggaggttgcagtgagctgagattgagccgctgcactccagcctgggtgacagagatgagactctgtctcaggaaaaaaaaaaaaaaaattgtctctaggtcatgaagatatccttctatttgttatcttgtagaagctttattattctatctttcatatttaggtttatgattcatctggaattgatttttttgtgtgtggatttggtaggggttaaagttcattttttccccatatgaatatactgttgactcaacaaccttaatgcaagaaaaaaaaacctttatttgctgcattgcagtggtatctttgtccaatcaaatcaccatgtaagtgggtctgtttctagactgcatggttttggcttaacttgtagcaatagataaatgaagttatttatccaaagtagattaagtcacatgaaacctgaagaaactaaggaatgagaaaggaaagtcggtatataaatggagtgtgtgaatrtgtgcatgtgtgtttgcatatctgtgtgcatatttgtacaagtatgtatctgtgtgaatgtatgtagatctgtgtatgtaaatattttcttagcatctatttggccaccagggcttttctcctgagtgtgagtgcataagtgcatgtgagcatgcacaagtatctttgtgtatttgaatatcttagcaaccttagcaaatgcatgcgattgtatttgatcttgttagcatccatctgcatgtacctctgtgtagccagaagggttttcttctttgcctcagttagtacccagggcaaaagcttaatgtattctactcagaaagtagttaaataagactgtttctctaatatatattttagttgtaggaattaggaagtagcatcatagatgctcctacactaagctggccctgcttcctatgttaaatatgacacatctgaggccctgggagaggaagtgatttgcccagtctcacacaatgagttagagccagagtgaagtcaaaacccagtctctggatgtacaagcaaggtctttttctagtcccaaatggccttttgtggtggtccagggactgccgggagcagtcgtggaactgcatcatttacagaaggtctgatctttgagtcagagtcacagaagaattgagaatagctgttgggccttgggctgctggactgagatgacatgtggacatcaggatgacaaggcttctgaagcagaggctgggggaaccagaactgctggaccagcacctgggggggggttctggtttcaaacagccctcttagtacagagtctggaggccacctctgaccagctaggtcaccttacactgttccctacagtaggggataatgtaacctttgggttttcccttttgggggaaacttaggaaaccttaggaaccttatgcgaggactcaacctgaggctggaatagctgggaaaacagaactttaggtggaggaagtggcataaaaaagttgaaaagtctggctgggcatgatagctcacacctgtaatcccagcactttgggaggctgaggtgggcagatcacctgaggtcaggagttcgagaccagcctggccaacatagcaaaaccccatctytactaaaaatataaaaaaattagcaggcatagtggcaggtacctgtagtcccagctactcaggaagctgaggcaggagaatcccttgaacccgggaggcggaggttgcagtgaaccgagatcacaccactgcactccagcctgggcaacagagggagactccgactcaaaaaaaaaaaaaaaaaaaaaaaagttgaaaagtgcagaggaatttgagaaaggtatgacctgaaaaggacacagagggaagggaaggaaggggagaacagagagggttataagcaggccagagccggattgtgaagtgcctgtatgcaaggtaggcatttggattctgctctggggagctattgaagtattttgagcaggggagtaatagaatcagatttgtgtttaaagaaaaaaaaaaatcagtctggatgccaagtggacaatgaaatggaggcgagtaaaagaggatcaaaaagaccagttaggaggttgttcctgtgtacaggtgagataagctggtgacttggtcgtggtaatagaaacaaagaaaaggccaggcacagtggctcacgcttgtaatcccagcactttgggaggccaaggtgggtggatcacctgcagttcaggagttcaagaccagcctagccaatatggcaaaaccctgtttctactaaaaatacaaaaatcagctgagtgtggtggtgggcgcctgtaatgccagctacctgggaggctgaggcagaagaatcgattgaacccaggagatggaggttgcagtgagccgagattgtgccactgcactccagcctgggtgacaaattgagattctgtctcaaataaataaataaataaataaaaatagaaatgaagaaaataggtggattccaaagatatgkaggacttagtgataggcagtatgtgggggtgaggcagaaggaagtgtccagatttcctgcttgggcaacaggatggatggggaggatcggaagaggagcaggtgtgtgcagaaaaggcattccattttagacatgtggaatctgaattgggagtttactcatgaccacagctctattgcacccgattcttgctttgacaggaatgctccaaaatgggaagaagtttgattcatccagagacagaaacaaacctttcaagttcagaattggcaaacaggaagtcatcaaaggttttgaagagggtgcagcccaggtaggatgaggattcgcattaaaggggatctggggagttggggatctgggatcagcwctctgccctccacctccaccttcacccactcacagaccactactgctttgactctacagccagggcatggcaacgccatctggtgtcccctcctggctttgcgtccccacccytctccttgccagcatacctcttttgtgtccctgggggctctcatcccaagcacatccccctaggcttgctcagaactagctgagagagccaggcacggtggctcacacctgtaatcccagcactttgggaggccgaatggggtggatcasttgaggccaggagttcaagactagcctcaccaacatggtgtaaccccgtccctgctgaaaatacaggcgtggtggtgcatgcctgtaatcccagctacttgggaggctgcgacaggagaattacttgaaccggggaggtgaaggttgcagtgagcagagattgtgccactgtactccagcccaggcgatggagtgagactgtctcaaaaaaacaaaacaaaaaaataaactagctgaggtctaccagttgcctgggactgaggtagtggaagagttggggtggagtaggccaagaaaatttttcgttttttcgcttttttgaaaagaatttcagaattacaaaaatattaaagaaatagtacagagttcttctatattctatccagcttccccttcttgcataaccatagtacaattatcaaaaccaggacattcacactgatacaaattacttacttattcaaatttttgattattcaaaattcaaaastagatttaaatttcaccaattgtcccactaatgctgagtgggttctcaacaactgctgtgatgagccctggttcaagctgttctttcttggtctgtctgtgaagtcctatgatgctcccttacgataggtcttgtttttggtgtttttttttagaaagagtatcactctgtcaccaaggctggactgcagtggcgcaatcttggctcactgcaagctccgcgtcctgggttcacgccattcttctgcctcagcctccctagtagctgggactacaggcgcccgccaccacggccggctaatttttttgtatttttagtagagacggggtttcaccgttgttagccaagatggtctcggtctcctgacctcgtgatctgcccgcctcagcctcccaaagtggtgcgagccaccgtgcccggcctgttttttgttttttatttatttatttattttgagacgtagtctcactctgttgcccaggctagagtgcagtggcacaatctcagctcactgcaacctcctcctcccaggttcaagcaattttcctgccccagcctcccgagtagctgagattacaggtgtgcaccatcaccatcacgcctggctaatttttgtatttttagtacagacggggtctcaccatgtttgccaggctgctctcgaactcctgacctcaggtgatccacctgcctcggcctcccaaagtgctgagattacaggtgtgagccaccacgcccggactttttgtattttttagtagagacagggttttgccatattagccaggctggtcttgaacttctggactcaagtgatctgcccaccttggcttcccaaaagtgctgggattacaggtgtgagccaccacggttggccacaataggtcccccttgccaccttgctggtgactctagtctctaaaccactttaaataactgcccctgtcacctacttgagtatttacgtgtgctattcatacaccctcttttcctaaagaggcctattctttggaagagggtgaactatgaacaaatggaagtgtttcagtcatacacaaattgaataaccagtaatgtttgtcagatgcatgaatttgagaccactctgtgagggttactgccccacagtcacatctctgctgaggcagaatctgcgtttgttaaagctgttagcacgatttcaatgtatcccatgtaaaattcatctgagatcttcagagttaacattgaggatggtttgggaaaatgccatagtcatctaacttttttcttttaaatcaagctgggtcctctttctcctctccccatctgcccccatccctgctagatgagcttggggcagagggcgaagctgacctgcacccctgatgtggcatatggagccacgggccaccccggtgtcatccctcccaatgccaccctcatctttgacgtggagctgctcaacttagagtgaaggcaggaaggaactcaaggtggctggagatggctgctgctcaccctcctagcctgctctgccactgggacggctcctgcttttggggctcttgatcagtgtgctaacctcactgcctcatggcatyatccattctctctgcccaagttgctctgtatgtgttcgtcagtgttcatgcgaattcttgcttgaggaaacttcggttgcagattgaagcatttcaggttgtgcattttgtgtgatgcatgtagtagcctttcctgatracagaacacagatctcttgttcgcacaatctacactgccttaccttcacttaaaccacacayacaaggtgctcagacatgaaatgtacatggcgtaccgtacacagagggacttgagccagttacctttgctgtcactttctctcttataaattctgttagctgctcacttaaacaatgtcctctttgagaaaatgtaaaataaaggctctgtgcttgacaaactcctgtccatccttattttaggtaggaagtgctctaaggaccacacaagccaggtgcccttgggaaagagtggaaagaaaggagggttccaagtggctaggtgagtgataaatataatagctacaatgtgagcattttacatgctgggccttgttctacatacttttttattttatttatttatttatttatttgagatggagtctcgctctgtcactcaggctggaatgcagtggcacaatcttggctcactgcaacctccgcctcctgggttcaaacgattgtcatgctcaccagcacgcctggctaatttttgtatttttagtagagacagggttttgtcatattggccaggctggtctcaaaactcctgacctcaactgatctacctgccttggcctctcaaagtgatgggattacaggtgtgagccactgtgcctggctatatacttttaaattattaccattgatcctctaagcaaccctgcacagtagatattacctgccgctcatctcaggctcagaatcctcctctgcataactaaagaaatataggctccaaatcttgtagcctagcaatcagatgtgggacttgagcaccttatgtgctcttgcaatctttgtttggactacagccagagggatgagctccactcacccagatggatacagaacactttttgtgtctaaacaaatgaaggtgtgttaagggcttgaagtcgtacactaactcacattgggaagttccttgtgaaaagagtgtgtgattctgagcttgttttcacatacactgcttagtttcacctagatttgttctgacttacattgaggaattacttttgagaagaatgtatgattctgaacttgtttccacatatagtgcttatttcatcaacatttattgtaactaaccagaaacaccagttaggttttaaaatcagcacacttattggtgtaggttatatataggccataggagactgaggcaatatactcaaacatttttcttttttttctttctttttttgagacggagtctcactctgttgcccaggctgaagtgcagtggcatgatctcggctcactgcaagctctgcctcccgggttcacaccattcttctgcctcagcctcccgagtagctgggactacaggtgcccaccaccacacctggctaattttttgtatttttagtagagacggagtttcaccatgttagccaggatggtctcaatctcctgaccttatgatccgcctgcctcggcctcccaaaatgctagcattacaggtgtgagccatcacgcccagcctcaaacatttttctttcagttggtataggatgagaaaaactcctggccatagttggggttattcttttttttttttaatcatttatttattatttttaaaaaatagagatgggggaatctcactatgttgcccaggctggtctcaaactcctggcctcaagctatcttctctcagcctcccaaagtgttgggattatgggtttaaatcactgcactcagccaatacggttttctatcagtgacgacttcgaattgtttcaagattgaggacggaggggctgataacaggtactgttagtgttcctcatagacccactgatacatgtcacatgatgtcatatatatgctatgaggccatgtcatcttggctacatgatctaccttttttgtctccaagaaatcctggctgtattcctttgctgagggtggaggagctaatgaagaagcagtgctttaggatggagaaaacgagagaaaggaactgccttgcattttagtcaccaaagtccctgtgctcacctctattgtgagactagaccagccagagggtatttccttcagaatgtcttggttcctggctttctttgatgactcaaatgcctacaataatttctcagaagtcagcctgcataaaagacatacgcatattttctgctgtgacaccaataagataacaaaagatggcatcaaggactatttcaggtgcccactatggggcatataaaagatattggtctagagtatttataactgaggtgggtcaaaggagacacccactaaaagaactcccccaaagtgcaaacacatactggctagcacctggagaggacaggtgaggctctgcaggtaaackgggaaatgaaccattttactggagctcttaaaagatgatgcagaaaatcatgatgcagtatrctaatgagtctggacattggcctatgagagccactaaagctgttaaacagaagagcaataataagatcaaggtcacatcagttgttttcagactttcagtcaatgaattctctattcctacgaatttttttcttagaaactcaaaaatttaacccagatgaaagtaaagcagctctggcacatgtgtgtgcacatataaacacagtcatctgttgcactcttaaaagcatttgaaaaattgagctttggatgccttgcacagaggaccgatcataattatatcctcagcatcttcgtacagtactgtgtgcagagtgggagtcagtgtttgtccactgagtgcaagttcttgtaacttaattgcgacaggatatggaatttccaaacaattagagggaagttttaagtcttaactttaggtcatgaaattcagctaacagatatatcaatccaaatgatggactggtcatgactgctaatagaaggaatttctccttgttattaaaacaactacaccagaggcaagctagcctgccacttagacaaatcacactctaagttttaaagtctaatttcagtttttctcttacaagaaagtcttttagaaaattctttttacattacctaaaggcacaccatgcattacaaaaactaataatgcattcataaaagcattcaaaagaaaattacagctgtagctcctttcttatcytcccacccttagaaatgactctactctcttacactgctttcaaaaaacactcagatataattaaaagcagaattgatgctctttgtacattgaagtgattcagtgtatgtaccttcaaattgattttaggttccaatcacacacaaaacaattagtccatgtttttccatttggtccatgcctaagcaataaaaagcaaattacggctatattctcccaagctgccatgatgatgaatggggtaataaccatactgtttccatgtcatgggaactcatgataataagaatgagcattaagtatttatggcaaagatatattatgagctaaggtccaatatacctacagatacttaataactaaaggaaaagtctacataaatacaatcttagacatgtaacaaccaacgccactacccaagcagcttgctctcaaatttctaccaatgtgacaattattatgtacccataataattaaaaaacaatttaaagaggcaaatctaagtttctaacaatgtactatcatctaaatgaccatttctataatagacctctgttctaaagacaagggtacccatattgacacaggtgttttgttaactataaagcaagcattattcaaatgtaaaggcttggttaataactggttgttatcacaccagctttgtatgttagcattttattcattcaaccaacatcatgaactttggtttcctcacctgcaaaatgcaaatacctatcttcactgagttgttatgaagatttcattattaatggacatgcaataaacagcaagttcctttgatggctaagcactgcaccgggccctggaggcattaagaatgtaaagagatcctgttctcaagaaactcagaatccctaggagcacctacaattcttgataagcttcaactgttttttcctggtatcaaacaggaagggaaagttcaagagaaaagactgaggtgtttcacaaaaagctacaagtttattaacataatgtattccaatatgtatcaaagtttcaagcaggtcattttgaacctcaaataagaaatcacaatatttagtattaattaaaaaggaaaaaaaggtggtagttgtcattcgtgggatttagtccaaatgaaaatgtagaaaacatttattttggtggatctgtgttgatgccatatttctccttragaagcttcaactgttcctccttcttctttgtgtccatcttctgaaatgcctggaaatgtggtaagcaccaaaattaaattaccaatctacagccaaatgaatttcatcaatagcattagccaaaaaagaaagtcatagtagacatatatcatcacagtacagttctacactaattctcttgagacggagtctctctgttgcccaggctggagtgcagtggcgtgatcttggctcactgcaggctccaccccctggggttcacgccattctcctgcctcagcctcccgagtagctgggactacaggcgcccgccaccacgcccggctaattttttgtatttttagtacagacggggtttcaccgtgttagccaggatggtctcgatctcctgacctcgtgatccgcccacctcggcctcccaaaatgctgggattacaggcatgagccaccgcgcccggccagttctacactaattctcaaatgagatcactacacaatgagaactttgctatacttaccctgttggcattatagtacaaaaccacaaggtatctgttacaaacattgaatcccgataggtgatcacatgcattcttggcatcaaagatgtcctcatagaccacataagctgttcctctagtttcaggtgtgttccccctggagaggtaagttaaacttaattaagatatacatttacctgagcattgatagttgacttacagaactgtcttttaaactggtaactgtcttttaaaaacagtaaattgaaatacgtttttagttaagtattttgaaatcaacctgaaaccatcagaggaaataaacatggatagatataccggataagcctgtaatttcttgaattaggtaattttgttcttcgtttttatcttaactaaaatatccataggtcaagctgactgtcacatcaggaatactaagaacacagctactacacagaacagcctcgtgagttgtggggactacaggtgctcttgccaccctgactggctctacgttgtctttgttttgttttgtttttgtttttgtttttgtttttttgagatagactctcactctgttgcctaggctggagtgcagtggcacaatctcagctcattgcaacctctgcctctcaagttcaagtgattcttgtgtctcagcctcccaagtagctgggactggaggcatgtgccaccatgcccagctaatttttgtatttttagtagagacagggtttcatcatgttccccaggctggtctcaaactcctgacttcaagtgatccgcctgcctcagcctcccaaggtgttggaattacaggcatgagccaccacacccggtctacattcatttttaatacaactcaagtgctaatgcacgatacagctgtgtggctagggagaagggctaggcttctgcaaagatgggagtggaagtgtgcttgtggatagggttatcagtgagccagggcagaatgctggaaggtggctggaagtggaagctaaccttacttatggatacgaggttgctgttagtgtagttattcctggccacttccttccttcacctcaccaacttcctctgggagaggtagagaagtttgaggagcaacgcaacgctaaattgcaggcagcaggtggccatgtgactgttagtggagacaatgggtagaggtcccactcagttcaggctctgggtgacaagatggcccccttgcctccatctgtgttccaaccacccagtgcaactgtggaatgaggtttaagactgtgggctgactctccatctgccacagtccttacatagggttgaataaaagcagtggagccatgggaagaggaggtacctgcctagacttgatctaggataggactat

SEQ ID NO: 94907 - DNA, 16572 bp, Homo sapiens
acgcccaaacgctaccccagccccagacctatccaatcaagtggcttattggcatttatactcggatgtctccaggcaccccaaacgcactggaaacggaacatgatgttacccaccccacaaggtagaccctcttctagtgtctcccctcaaacaacaggccaccaaattgttcaagccaaaaatctccctcactccccaaatccgatcctttaatctctctctcttttttttttttttttttttgagacaagttttgctctgtcacccaggctggagtatactggtgtgatctcggctcactgcaacccccacctcctgggggcgcaagcaattctcatgcctcagctggccaggctggtctcgaactcctggcctcaagtgatctgcccgccttgaaatcccttaagtttgagtctgttgcctctttccatctccactactgagctgaatatgttgtactctccaccctttcccaccagtcccaaggtccaccctatatcaatagatctccttcttccagcttgtggctgggttgtcagtagaaatccctggctggagacaaagtcaggagagggagggtagggcttttattcccttgtaagatggccttgggctggctgtcacccttgatagatcatttcaaggtgggtggctctacacaccctttaaaaaaaataattttggccgggcgcggtggctcacgcctgtaatcccagcactttgggaggccgaggcaggcggatcacctgaggtcgggagttcgagatcagcctgaccaacatggaaaaaccctgtctctactaaaaatacaaaaaattagccgggcatggtggtgagtgcctgtaattccagctactcaggaggctgaggcaggagaatcgcttgaacctgggaggcggaggttgcggtaagccaagatcgtaccattgcactccagcctgggcaacaggagtgaaactccgtctcaaaaaaaaaaaaaaaaaatttagggccaggtgtgacggctcacacctataacactagcactttggttggcctaggcaggcagatcacttgatgtcaggggtttgagaccagcccggccaacatggtgaaaccccatctctactaaaaatataaaaattagcaaggcgtggtggtgggcgcctgtagtcccagctactcgagaggctgaggcaggagaatcgctcgaacccgagaggcagaggttgcagtgagatcacaccactgcactccagcctgggcaacagagcgagactccatctttaaaaataaataacatttaaaaaattaattttttgtagagacagggtctcactatattgcccaggctggtcttaaactcctggcctccagcagtcctcccactatgacctcccaaagcgctgggattatacaagtatgagccactgcaccaggcctacacaaccctttttccatccaggtaccacaacctgacccatttcccctgggcctagggttgggaacggctccttctgccgggctggggttcaggcaccatcccttcttgctcttctacatcctgcccaattggtggccactccttcagtcatcctaaatgcgcgtttcctgctgcaactcagacctacccacagccagccaacggcctgtatcaagccaccacagtttgtcacctggactcggacaaaggaggatccctttatctgagtccatcccatcttgccctgttccacttcaattctccttcagcatccagaacgagttttctttcttttcttttcttttttttttgagatggaatcttgcccgggaaggcccaggctggagtgcaatggcgggatcttggctcactgcaacctccaccttccaggttcaagcaattatcctgcctcagcctcctgagtagctgggattacaggtgtgagccaccacacccggctcatttttgtatttttagtagagacggagttttaccatgttggccaggatggtctcaaactcctaacctcaggtgatctacccgcgtcagcctcccaaagtgctgggattacaggcgtgagccacccgcagctggcctagaatgagtatttctatttgtttatttatttttgagatggagttttgctcttgttgcccaggctggagtgcaatggtacgatctcagctcaccacaacctccgcctcctgggttcaagcaattctcctgcctcagcctcccgagtagctgggattacaggtatgtgccaccacgcccagctaatcttttgtatttttagtagagacagggtttctccattttggtcaggctggtcttgaactcccgacctcaggtgatccgcctgcctcagcctcccaaagtgctggcattacaggcgtgagctactgtgcccagccagaacgagtatttttaaacatttaaaactggtcacattgcctcttctggcagcaaaccaaaaatcccctcttccagcagatctcaatcctccacgggaagaagtccaatgtcctcacggtctccagccaggcctagcacggtgtcagccctgctgcctgttcccttttgctcgtcccagaaagtggatgtggctggtgtagcctgtggaacccagcctgctcccctccacacatcctgcggcctgaaatgctcctccacgaacccctctctcatccaacctactcctgccaccactgagctcccacagggcacactgaatgctgggaaggccactccctacctagcatgactgctgtgttcacggataagccgccagtaggaaaccatgactctgtgggtctggggtgggccctaggattctgtttttacccctcttcccaggtgattaggagccagacctggatgccctagttttgttcccttcaccaagtaccttctccccagagctggtttttctcctttgcaaaatagctggctacagagattcaaggacagcatgttggtaaaccacccagctgggcctctggcacaccgcaagcacccaatggcacctactgttaccctatgtgggttatttcctcaccccaggaggagctgggaggtgaagacctgcccaagggcaygtgaatggggaatgctgtgcccagggcagcaagtgaggtgacgtcccacccccagggtgtgttggaggtaaaatcccggggagccactgaagggggaggtaaagtgggaggtgaaggggcccacagggaggctggaggggagtggcaagccccgagtctgaccttcagcgtcagcagcagctggacggcattggtgaagggcgtgggagtgggcaggcccaggaggctgagggctcggaagaacaggagataggagaaagtccaggccagagccagggcgtggcaggagctgggcaaaagcaggaggcgcactgtgttgggcacagaagtctcggccttggccactcactccacgagtccagccaccaatcctcccccagctctccccattcgtttagagacagaaacacagaagggcagagaggacaggagggtggatgtagggaccgaatgagtatgattgaaacagtgggagaagaggctcagccacatagaaacacacaccaacagagaatgaggttaagagaagcttcrggtgaagaccctgcaatcctccactttttctttatttccgaggtccagggctcaagaagagagaggtggatatgaatgaatatgaacggtggccaggccagcagacacactgtccacctctctccatgacatggatgtagcggactgggacaaacacacagggaccagacgcagaaggcaggggagaaagaaaagcagatgaaggccggatrcggtggctcacgcctgtaatcccagcactttggaaggctgaggtgggcagatcacaaggtcaggagttcgagatcagcctgaccaacatggagaaaccccagctctattaaaaattcaagattagccaggcatggtggagcatgcctgtaatcccagctacttgggaggctgaggcaagagaatcgcttgaacccgggaggtggaggttgcagtgagccaagatcgtgccactgaactgcagcctgggcaacaggagcgaaactccatctcaaaaagaaagaaagaaagaaaaacaaacaaacaaacaaacatgaaacagagaaatgagctgatcaacaagagacagctagagatgaggcagaagctgaaaaagactcaaagaggaaacaggttgcttccccctctcccctcctctccctctcctccctccaccaaattctcaccagggctgggcctgaatgagggcccaggtcccgaggatggtgaccagagaatgcaaagtgtgggggccacaggtgaacagggtgagccccaggcccacagcggctgctccccatctcttcagcccaggacctgcagggggaagggacagcataagcctggaaccttccagagggtcccccccctttattttccactggggagggagcctgactcaccggctttcttaaagaggaagccgatggggatggagataagaagaaccactagatacgtccattcttcaggcgacatggtctgggggaggggcagagattcacagtgagaacccaggaatccaggccccctgcctcctccctcttcgaggatccaggaacccagccttctagaccccagtttttgaggatgatggagtatgagcctcagctcctctcctttgagaacctagcaacccggactccagccccttcctccttggaggagacaggaatccacccccagcccctcctttgagcgcacaggcctccagctctcctgtccttggagaacccaggaaagtgtggggatctcccagcacccaagcccctcctttgcgaacgcagaaatcaaagctactccccgcacccatactggggacccagatttgaagacgcccctcttttaaaaacccagaaacggcacccctcccggacccttcctcttcgacagcccaggaatctagacctccgagccccctcttccagcgaggatccaggaacccagaccccctctttggatcccccatcccccggcccttgtgaaaccagatatccggaccccccagcccttcttcgagaccacccagaggagcccgggtctccaacctgcacctccttcggagctccacacccctctcctactgagaacccggggatcgaacaccctcccctccccaggcccaggcccaggcccagccccaacccgtcccgcgcaccccagcgcatccccggcagagccacaggcggttgcgccagccccgagttccaacgcgcctccggggccgccccgcacccgccagcccgcagagaccctgccgccgtgtaacctcgcctcgccactgggcgccgccaccctggcccacctgagctgctcgccgggcaggaggcggccgagcagtcccagcccgcttgccgccgcagctccggccacgcctcccccgcccagcgcgcccccgcgccgcctgctccttctgggcgcccgccgggctgcgcagatcaggccggggaagaagccacggtcagggccccgggcgggcagggaagaagccccggagcagaagccgagagcgcgagtcggcaacgggattcgagtccaggtccacactgggatccgagctccgagtacgtgaaggggcgggccttcgggctcggaacaaggaggagccaaaagctttggacccgaaggggaacagacgggctctggaaaggaggcggggtctggagctcggcgtgaggaatgaggcggggtctcccttcgggttccttcgggcacaatcgggagcttgagttctccggaagcggggccacaaacttcggctcacttcggcaatagtcgagaacggagagctgaggccactgtgggcggagccacatgtttcggctttcttcggaggtagtcgagtccttagggtcactgttccgatgtgggcgggsccacagactcggccggatgtgggtggggccacaagcttcggtttacttcgtagatagttgggtacaagtgacgctaggatgataggcggagtcaacaggttcgccagayacccatgagtatttacaagggggcggggcgaaagcgacttgccctcaaaggggcggaaccccgagggccggcgtgcgcctacgggaccgggccaggrtgacgatcctcaagttcccaagtagaggagaggaagcggcagagggaggtgcgctcagtggggcggagccaaggtggcccccgcgggaggagggcggggcttcggtcctgcgaggggcgggacctgacttcccgcggcgctgatggggcgggatgacgaagttgacgagggtgtcggcatgagggggtggagcaaggagcgcgtggcgcggtgcgcagtgggtggctccacctcgactgcgaattactgtttatgaggtgactcgctggttctatcggtggacagtgggacattctgaagggaggcaaggaggcggactgagcgctcccaattggggtgagcccgcccgagcggagagtggacggcggstgtccagggggcggggctttcggctgtggggttcggtcgtagggcgggaactccccaactggggtgcgctggcgctcggagggggcggggccacaggccgcgaggstgccgggagccgatgacgcccgaacgccgaacctattgcgtccgggaggaggcggggctacggattcggccgagccgagaacacccgaacgtcaaattgctggcgttcgrgaagggggcggggctgcggattcggtggagccgaggacgcccgaacgccgaacttcctgtgctcgggagggggcagggttttgtactgtgggagtctgagagcgaggaggtccgaaagccgaatcacagtcgttcggaaagaggaggagcgaaggctcgagcgtccggaagagggtgtggcctcggcggtgccttagcctccagagcttctgaccgctgacgggaacacccgaagggggacgcccactttgcaagagggtggtgccaaaatggacctttgtaagggggcgtgtcgccgcgcttgcggaggtttgtttttcacgctccaaggcgcaatggtaggtacggcagtgcgggcacagagcgggtgccgaccgcagggtcacaagggtagagcgggaccctgggggcttggcgaggggagagggtcgggggcttgtctccggcgtctcgtctccggcggccgcgaggcctggtgggatcgcccgggggcggggcctggcgctcgggcccagcaggtggtgaacggcggctgagcgaggccccgccccctgaggcctaggggcggggcttcgccgagaccccggaggctttgggtgcgctgcagcggtcygcggcgcgcagctgtttcggtaactgctttgcctcccggctcccgcaggaggatgctggtggtggaggtggcgaacggccgctccctggtgtggggagccgaggcggtgcargccctccgggagcgcctgggtgtggggggccgcacggtaggcgccctgccccgcgggccccgccagaactcgcgcctgggcctcccgctgctgctgatgcccgaagaggcgcggctcttggccgagatcggcgccgtgactctggtcagcgccccgcgtccagactctcggcaccacagcctggtaagggggcggggctcgaactcgggttcggtgggagcgggacctgggagtcaagtttcctggcttctgaagggaccataagcttggaggttccagcgaagtgtgcttctcaggccctgacatccttcaagcgccagcaagaggagagcttccaggagcagagcgccttggcagctgaggcccgggagacccgtcgtcaggagctcctggagaagattacggagggccaggctgctaagaagcagaaactagaacaggcttcaggggccagctcaagccaggaggccggctcgagccaggctgccaaagaggatgagaccagtgatggccaggcttcgggagagcaggaggaagctggtgagcatgggaggtggagtccagggaccacgggaaggagaggagagatcttttaggaattttagctgggaatccagtgcctgggtctccctgagggtgagaagactttaccccttgaatttaccaaactcttctctgtactccccaccaggcccctcgtcttcccaagcaggaccctcaaatggggtagcccccttgcccagatctgctctccttgtccagctggccactgccaggcctcgaccggtcaaggccaggcccctggactggcgtgtccagtctaaagactggccccacgccggccgccctgcccacgagctgcgctacagtatctacagagacctgtgggagcgaggcttcttcctcagtgcggctggcaagttcggaggtgacttcctggtctatcctggtgagtatgggttggggcctctggttgctgtgcctttccatacgatcccaatgtattctgcgtttttcttttttttttttttgtcttaatagaggtggggtctcttgttgcttaggctggtccctattcctgggctcaagcaatccttccacctcggccccccaaagtgctggaattataggcccagctgcatttttcttttttgtctcactttctcttagcctctgaaattcatagacagacaggaaacatttgggagctccygaactcattgggcaagcagtttaacgacttttattaaatgattactgtgatccagaagattcacttagaagtagttagacatcaggctgggcgcaatggctcacgcctgtaatcccaacactttgggaggccaagacaggtggatcacctgaggtcaggagtttgataccagtctggccaacatggtgaaaccccatctctactaaaaatactaaaactaactgggcgtggtggtgggtgcctgtatttccagctactcgggaggctgaagcaggagaatcatgtgaacccagggggcagaggttgtagtgagccaagatcgtgccattgcactccagcctgggggacaagagcgagactttgtctcaaaaaaaaaaaaaaaaaaaagcctagaagtggaatagttgtgtccaagagcatctgttttagagtatctatagtgatggctgaaatgatctcagatctcctcccagtggtcgttcccgtggcgtccagccgtctgccattggtcactgcttcagtgcctctctccttcccccaggtgaccccctccgcttccacgcccattatatcgctcagtgctgggccccygaggacaccatmccactccaagacctggttgctgctgggcgccttggaaccagcgtcagaaagaccctgctcctctgttctccgcagcctgatggtaaggtggtctacacctccctgcaatgggccagcctgcagtgaactccagagacctaggggatgtggctgtrtcggcagcaagagcctttctggatgttccccagctcttctctgggagtctagaacatcctcctacctttctccgcggttagtttttgattccaggttttcgaacactacatcttttttatgttcttccttgtttcaaagcacttattggctgtgtttttgtagttacctattttcacactgtgagcttcccgagaatggggcctgggtttgattcmtctgttttctacagggtttaagtctcaggaggtctcaataaacttggtatataaatgttcatgatttgaatgtttgcgacagtcctggaacccgtggatggtctcatctgcatgtacaggtgagaaaaaggcctggaggrgggggactgacttgcccaaagtcacacacttagtaaatagcaggcctggcctttcaaaattggtttttctgactcctaaatctgcactctttctacctcactaaacttcctyttgaaaagatttctatgaaatttcccagatgcatacaaacgttataaataaaaatataggctgggcacgatgacccacacctgtaatcccacagaacttttggaggccaaggcagggggatcgcttgagcccaggagtttgagaccagctctggcaacattgtaatacccagtctctacaaaaaataatttaaaaaaaaattagccagggatcccttgagcctgggaagttgaggctgctgtgagctgtgattgcaccactgccctccagcctgggagacagagcaagaacctgtctcaaaaaatatatatatgtgtrtgtgtatatatgtaaatatacacacatgtatgtatatatatgtgtgtgtatatatatatatattatgaaaggaaatgagtattgtaattttaggagttcagagcctggggagaaaggaaggactctggaaggcgttctgctttttcatggcctgggtagtggtgragaatttttttgatactgtatatttatattttagactcttttttggatgtgttatattctgcaatttttataaaagctaaaacacatgtatttgtaaaaaatttgcacttatgaaatcatttacccatgtttttgcttaagaaagtactagaacactaccactattccaataattacacctttatcttatcaatgtgcagttttattttgtcacgtttattttgtcagtgtaatacattcacatggtgagtctgggcgtggtggcttatgcttgtaatcccagcactttgggagaccaaggcgggcggatcatgaggtcaggagttccagagcatcctggccaacatggcccgcctctatgaaaaatacaaaaattagccgggcgtggtggcgggcgcctgtaatcctagctactccggaggctgaggcaggagaatcacttgaatctgggaggtggaggttgcagtgagccaaggtcacgccactgcactccagtctgggcgacagagctagacactgtctcaaaaaaacaaaaacaaacaaaaacttccacatggtaaaattctggggctgaaagtctccacctctagttcttccatttcttccccccatgtttcattctttctcttttttgtgtgaattgagcagcctctggaaccagaataggtttagagagactcccatctcccctctttcttgccattcccagtaaacagacttcatagaatctcaatttcctgtaagtttagattaatttaaaatatgacactgggccaggygtggtggctcacacctgtaatcccagcactttgggaggctgaggtgggcagatgagtttgagatcagcctggccaatatggtgaaaccccatctctactaaaaatacaaaaaaaaaaattagccgggcgtggtggcatgcgcctgtactcctagctactcaggagcctaaggcaggagaatcacttgaatccgggaggcagaggttgcagtgagccaagatcgcactactacactccagcctgggcaacaagagctaaactccatctcaaaaaaatgaaaagaaaaaaaatgacgctaacccctgtctggccaatactctctttgtgcctgcttcataattggctttgtaagtctattctccaccctttctcctctctacaacaaagtacttagaagtctcattccctctgtcatgagtctctcctctgaaaagttcctcatttaaaactcctgtggccagatgtggtggctcagacctgtaatcctagcactttgggaggccaaggtgggaagatcagttgagccgctgagctcaggagtttgagaccagccttggctgaacatagtgagacctcatctcatctctatttaaaacaaacaaacaaaaaaaaacttttgtgactggtgtccccccatgttgtcagtcaacaaattctataggtgccatgttcaaagcactgtggatccacagttaggccccaccctccaccttcactgccagtatcttagaaaaaccaaaccatggctcatttgatattgatagcttcctaactcatcccctgccttccattcttgcccctctgttgtctgttttcaacagagcagccagaatcatcgtttttttttttgtttttttttttttttttttttttgaggcggagtctcgctgtcgcccaggctggagtgcagtggcgcgatctctgctcactgcaagctccgcctcccgggttcacgccattctcctgcctcagcctccctagtagccgggactacaggcgcccgccacctcacctggctaattttttgtatttttagtagagacggggtttcaccatgttagccaggatggtctcgatctcctgaccttgtgatccacccgcctcggcctcccaaagtgctggggttacaggcgtgagccaccgcgcccggccagaatcatcatattaaaagataagtcagaccatgtcacagctctgtctaaaactttcctggagttttccatctcagagtaaaactcaaaggtcctactttgcagcttcctcatgaactggccatgtgcattctcttccttgcttattattattattattatttattttttttatttttgagacagagtcttgctctgttgcccaggctggagtgcagtggcacaatctcggcccactgcagcctctgcctcctgggttcaagtgggttcaagcgattctcccacctcagcctcccaagtacctgggattacaggcgcctgccaccacgtcaggctaattttttgtattttagtagagacagggtttcaccataattgcccaggctcgaactcctgagctcaggcaatccgcccacctcagcctcccaaagtgctaggattatagacatgagccaccgtgcccggccagctttgttcctctttactgctggatattccattgtatggacataaccccattttatttatccattcatcaggtgattggcatttgtttctagttaaggacaaggttttggttttggtttttgttttatttacccttgttcatgcagtatccccaggtccaagaacagttcctggcacacagcagtcaatacattgttgctaaataaatgagtggcttaaactataatttttaaatcagggctgagacaatttggaaattataatttctcctacatgactttctaagcatattttaaataaatatacatacgttaaggtcatttttattaatgaaaattgtagcatactatgcacacttctgcatcttgcttattggatatgcccaggcttgtctcatttttgccaacagctacatggttttgcgtcctatggatggggcataattagattttattacacttgtacaaaaggaaaggaattcagctccccaagcatgcccagctggtccttggcaacccatgatggaaaccaagggttcctcttatattacccgtgctcctttcagagaggaagggctagagggctccagcctgagtgagagagagagaggaggaagcatgaggggtttgtggaagagggcctggtgccatatgactggaccatgcttctgaagaggatcagggtgaggccagatctcatcagttgacccttgagcaacatgggtctgaactgctcgggtccacttttatgcagattgaaaaaagtaaaggttacacagagcatgcctgcctctcctgctttgccttttacctcctccacctctggcaccctgagacagcaagaccaaaccctcctcttctttctgcacctctgcctactcagaatgaagacaaggatgaagacctttatgatgatccacttccacttaatgaatagtaaatatattttctcttttttagaattttcttaatattttctttttttttttttttgagacgaagtctcgctctgtcacccaagctggagtgcagtggcgcgatcttagctcactgcaagctccgcctcccgggttcacgccattctcctgcctcagcctccccggtagctgggactacaggtgcctgccaccacgcccggctaattttttgtatttttagtagagatggggtttcaccgtgttagccaggatggtctcgatctcctgacctggtgatccgcccgccttagcctcccaaagtgctggggtaacaggcatgagccatcacgcccggccaatattttcttttctctagcttaattcatcataggaatacagaatataatacatatagcgtataaaatatgtgttaattgactatgttattggtaaggcttccagtcaactacgagtaatgttttttttaaatcctgagacagtgtcttgctctgccagctgggctggggtgcaggggcatgatcttagttcgctgctgcctcaacctccttgactcaagcagtcctcccaccacagcctcccaagtagctggaactacgggcacacaccaccacacccagttaatttttctgttttctgtagagtctgggttttgccgtgttgcccaggctggtcttgaactcctgggctcaagtgctctgcccacctcagcttcccaaatcccacctggggttacaggtgtgagccacggtgcctggcctagtagttaagttttggggaagtcaaaagttatatgcagattttctttcttgattttttttttttttttttgaggcagtcttgctctgtcgcccaggatggagtgcagtggtgcgatctcggctcactgcaatctccacgtcctgggttcaagcgatgctcttgcctcaacctcctaagtagctgggattacaggcacctgccaccacgcctgcctaatttttgtatttttagtagagaccaggttttgtcatgttggccaggctggtctcgaactcctgacctcagttgatccgccggccttggccttccacatagtgctgggattacaggcgtgaggcaccgcgcccagcctatatggaggttttcggctgagctgggggtcagtgcccctcgcccccagactgtacagagtcagctgtgttaagatattaagcaccttcagtacacaagactctgtgctggttttcttttcttttttttttttttttactctaaatcatcaaaccctatgaggaaagtcctgttactttctcccatttagcactcttgaagaggctaatttgcctaagatcaagagctcgtcagtgactgctgaggttcaaacgcagatcttttttaagacttgagaacctacaggttcaaccaccattataaaaccatctctgtaatcacgaggcacccggaatttgtggagcttggacttcatcctgaagggagtgaaaacttatggaagttttttccttccacgtttcccccttccagatgaataatatacgcgtgttcaagatacaaaaatgcataaaatttggccaggcatggtggcttacacctgtaatcccagcacttggggaggctgaggcgagtggatcacttgagcccaggagttcaagaccagcctgggcaatatggcaaaaccccgtctcaaaacaacaaaacaaacaaacaaaaaacccataaaactgaacaaggtagtttgtaagatatggaagtacaatgcagatgacaataatgacgatggtagctaccactaggcgctttatttatgccactctcctcaacactggatagactctcacttaatcctcacaagcttatgaggtaggcgctaccatcattcgccgttttacagaggaggacgctgaggcacagagtgattgagaaacttgtcgaaggcactgcagctggcaagtggtgacgtggcatttgaatccaggcatccggatggtgtggatgccgtggaagagaaaggggcgggtgggactgcttcctgaggagatagtgactgccgaggcagcagcgtagggaagacaactgaagaacacgagctgtggagacagaccatcgcattcggagtggagagatgggtgtacagacagacaataaccagactatatataaaaagagaactctaggtcaggcgcggtggctcacacctgtaatcttagcactttgggaggctgaggcgggtggatcacttgaggtcaggcgttggagaccaggagttcaaaaccccgtctctactaaaaatttaaaaattagccgggcatggtggtgggcgcctgtagtcccagcttctcgggaggctgaggcacgagaatcgattgaacccgggaagcggaggttgcagtgagccgagatcgcaccactgcactccagcctgggtgacgagagcgaaaaactccgtctcaaaaataaaataaattactgataatagtactaataccccttaagtggctattgataataatagtaccatgggtgggggggcaacttctctgagagtgctctgtaagtatgtattgaagattgagtaaatacatttaaaattcttagaacagtatgtggcacatagcgttccagaatgccacattattgttagtgacagaaataatctcggctgggcgcggtggctcacgcctgtaatcccagcactttgggggggccacggcgggaggctctctcgaggccgggagttcaagaccagcctgggcaacatggcaagacgccgactgttaaaaaaaaaaaatgctacccgggcgtcgtggcgtgtgcctgtaatcccagctactggggaggaggtgggaggatcgctcgagcc

SEQ ID NO: 94908 - DNA, 33356 bp, Homo sapiens
tcccaagtaaaaactagagttatttaagtagttatttgagtaacttcttagcaatgtaggaaaaaaataataggaattaatgttctctatgaaataagaaaaaggcttaaatctattctgtacactatattttacatttattattttcaagtttaacagaatgaccacacacatgcatttaaaatttgcagaattctataaatatatttctacacatttaaggaactataaactatattagtatgtatgtattattaaatttagtaactgctaggtgtggtggctcacacctgtaatcccaacactttgggaggccgagctgggagaatcacttgaggccaggagtttgaggccatcctgggcaacatagtgacatcctgtctctatataaacacacacacacactcacacaaacacagatttagctgggtgtgatggggcatgcctgtggtcccagttactctggaggctgaggcagaagcatcattttgagcctgggaatttgaagttacagtaagctatgatcacaccactgcactacagcctgggtgacagagcaagaccctgtctcaaaaaaaataatattatcatttactgaacatttactattggccagacactactctaagtcctttacatgtattgacttatttcattctcacaaccctacaaagcaggtattttttaatttccattttgcagacaggaaaactgaggcatatggaggttacgtaacttgcccaaggttatatacgttaccagtggtaaagctagaactcatagatagttttgctctagagcagggatgtccaatcttttggcttctctgggccacactgggagaagaattgtcttgggccacacataagatacagtaacactaacgagagctgatgagctaaaaaaaaattgcaaaaaaactcataatgttttaagaaagtttacaaaatttgtgttgggccacattcaaagccatcctgggctgcatgtggctcacaggccacgggtgggacaagcttgctctagagcctaagattttaataagtaccctattcttagtactattaataatttaaacatcatttaattttctttatagacataataatgtatatttcctccatgccacagagaagggaattggttatgaaggcagagtattactgacctgagctttcactgcctctgtcactgcactcgctgcatccacaaggtccctggtctttgcagaacaaatgtctagtcctaacttttcagcagtaacaaatgcataaaatgcaccgccatatgcaatgtccaccatcacctttccatgtccaggaacatccaccatgagatctaaaaaaaagatgtgtttggaaagaagatgtgtttgttaataagtattttagcaataaaattcaaaggatttttaatatgtttatttttcaagagggatgttcttttcctatcataaaaataatgaagtaaaaatccgttttttaaatgaataagcatcgagtgaataatagctagatgcatcattctatttttaacttgatgattgcagaagttataaactaaagccatgctttccctaactcatacagacatattcattaacttccctgaggatcttttctaggaaacacccctgaggccgagagagggaaacccaagggcatccctgtgaacactaagaaggaaaatgtctattccccacttgtactatgagagatggtttaaaacagtgagggtcttggatcctatttacaaatcaattttcttcagccgtaatgtcaaaacataaattttaataaaagatttttctatataaattatatacacttatctacatgttttcatctccttaaggtatcctgcaggcaaacacagaaaaatgccattgtagaatcattgactgctacagcatcattttgcaccagggtttttatttgagcattttaagtctcaacatccccaaagtttcacctgaaggtcagtagtttgaaatcttgaatctgtatttccaaagaaagggggctgggtgatgtttatttcgccccttctcaaattttcctcttccctaatttaagctagcttggtgatcactgccttttagggaagcctatggcaggggagaaagcttgtctttcatgtttttattttagggaagcctaagctctcaggggaaagacatctgttggcaaaggagtgtcctgaagggagaaatatttctcctagagataaattttttctcccttgagaagagtggaggctgaaggtccttagtgcagagaggacgtgtgttaacttcccccagggcaccacaggagcaggagtgaagaaacagaggatggggaggcagtgcagagggcaaggaccaggtagggtggggcagccaatgctcctgctccactttgctggttaactgtgtaagctgaggactgaagtgccatcctctccaaggccacagcacttttaagaaacctttgctcacacatatcaggaaaggggacaacacatggagtgatgaggctaagtgaaccaaaaggacagagtagagtttcagcttcagaaattaagttttgggaaagaaaatatatcttgtgttcctgagttttcatacaaggtcatacaaagatatcagtatgctatcagtccacagaaggctatcagtatgctattagtccacactagtccacagaagcccttttaacccatgatgtgttaaaacagagcaagtttataatcaaaagagtaaaacatgctgtggattgtaacaacaaaactgaatcaaaaatgtctttatcttgatgctggcgcaacatgaaaagcaagtttaatgaaaagagaatgggcaagttgatagaaatgagggactgctggaaggtggaaagctaaagtgagggtgaagatcagcacttaccaggagacacaggtgacggtcccagggttcagtctgcctgccctcttcccttgattgtaacaactaaatggggcattggccaccaatcccgggaccaggatgaaattgggaagctggttcaggagaagtcatccctgagcctacaatcatttccctggcccaacctttctagaatcttgggtctggttttcttagggtgggcagttgggtagggtgctacacctcactgagtttcagtttccttttctttaaaatggaccaaatttcctttaaagttactcttgtccaccaattatctgtgactatttcattttttaatcactaaattactaacattaaaaattaagatatttatttcacccatgagtacttcctatgtggcaggtctttacatacactagccccttaattcattacattagtgccttaattactacagccctgagaggtaggtactgttttacttactatctttacattattccctggtttacccactaaataagtggcagagcttggggtcaaacccaggaccaggtgactccaaagcccaaaccctttctactaaaatatacaacctctatccagaacacaatccaaaatctaagggtttttcttttcttctatacaagcatatcactgaaatttcaatttgatttactttgctcaagatttagtgagcacctactatgtgccgattactgtagaagatacgagaagtacaaggaataaaacataggcttttccccttcttggagtttagttggacaagacagattttaaaatgctttaaaatacactaagcactattctagaaaattgaaacatatctccttaaactacaaaaaattttaaggatgagagggaagcaatatgataggccagggttccaaccctagttctgccattagtgtggctttggtgtcttgtgcaaactgtaactgctatttctcctaaaagagttgttttgaaaattccacgtatggggagttcctggcacagattagggactcgaaagccaaaactttaatttccagtggcaataggtttctcaagaggaccagatgtttacatttgtcaatcagcatattcttctccaaatttcatttatttagttactcattcaacaaacattcattgactgactactcttctaggcacttagaatactgtgaacaagaaagagtttgcattttagcctggtggggtggagatgaactcagcaaccctctgaggtgggtactgttgtcatcctcattttgcagactgtgatactgaggcatggactctctagcacaaggtcactgagatggggagaggtggggcagtgaccttgaacactatgtctgccttgtatgcatttttcaaagtagagaatatagcatttcattttcttaactcagtgaccattaatgcccactaatcattgtactgtcatacagtgatgctctcaggaactactgagaggaactactgaggtcaagtggttgactgaccctgccctaactgacccagaaatgagatgtagtttgtgttcctgctgccagctgccatttcctacagaagtctagagtgtttctactctgctgctggagttgcctagggggaattctggtagccacgctagttaaactgttgaggttttaaaaatggaatcgtaaacataaattctgtctccctcaagtggcctcccagtctggaagtgacaccattctctgggaaaatggcatcaatttctccagaggcattcttcgttaactcgtggatttcagctgcctaaggttgctctaaaagtgcctgttctatcacttatcattcataatcaggctaatctgaaacctagttcttcagggggaatcaaggtccaactttctaacagatgatttgcatggcttgaagatttttaagaaaaggataactctattcctggtaaactggctcctggctcacttccagtcacaatgactaaagcattcttactgatagaattcagctcctgggaggtagtagtctgatgagaaaccagatgccagcttgccaggtcatccctcctgtaagggttatggttatagagatgccctgctttacatgataagctgtacaaggatctgtactagagaatccagcaaaaccttttaatggctcaataggcctagggaactttagcgatcatataaaccttgcaatctatctccaggaatacagtatcttgcatactctcatttaatcctaacaaaaaaactctatgagggaaaagaagaaacacaggcacagagagattaagtaatttgcctaaggttgcacagctttagggggttatcaggatttgaaaccaggcaatgtgtgttcctgttcttaaagaaaagcaacattcgtatcttaatgatttataaactgctttgttcattcattctcatttaattcttcaaagaagtgggggaggtgaggaaaggagaccaggtttagtaacttattaagtgtgattctgtgtctaccaagcatattctcagccagcctggaaccctggtacattggctgttcttcgctctttccttgaccccaccgtaccttgctttatccaccggtgaaatctctaggaatgcctcaccagtgcagagggaggcgctgagtcagggtaacacgcaattcctcgctcctcaagggtctcccaaaaccacaggcggatgggagtcagggaaaatcgaaattacacgcaccaaatacgcaaggctgctgacacacgttggcagtgatttacctttctattaattgcaagggttcgcggagtaggttagttgccagagttccagcccagaaaaaccgttaatgtagttagtcgcgtcccggttgcagctctgccctgggctggaaaggtcccgcccattacctgtggccagcacgaaggccgggacgctgtggaagcgcaccggtccgtggctgcggccgtcctcgcatgccacgaaggcggtcaccagcccgcaggggcagtggatattgacgcgggcctcgcgggtgcccgcagggggcgccggcacaagcccgaagtccaaagcgaagcggcccagcgccagcactgcgtggccgcacatggagctgtagccctcgttgtgcaggaacaggacgcccagatgcgcgtccggcagctcgctcgggactaggaccgccccgtacatgtcccggtgccctcggggctcgaacatgagccgtcgccgcacgtggtcaaggtgctggcgcatgtagcgccgcttggccagcagggtgggcccagacrcctccggacaccccgccagcacgatacgcaagggytcgccgcccgtgtgcatgtccaccaccgacagcaccggcgtccctggatcatgcgggggcagccggggcaccgccagcgcgctctccatggtctgcgtcgggggagacgagtacggtcccgcagctatggcttcaagcccgaccctyacccactgactccgcgggaggagggcgggacgctaaccwgccacgtccggggggcggggtctcggagcctaaacccggaagcgagggaggaacttcggagctgtcgcccgggttaccgggaggcggagccgccgagctcgctgtggcccggatgttcggtgcagctgccagatccgctgatctagygcttctcgaaaaaaaccttcaggcggcccatgggtgagtggtcgccaagatcccgggaagcgtttctggtagtcccgactactttcctacacggctggcctcgggctcggctctttgtaggcggccttcggttggcggcgcaggctcgccccttgaccccgcccgccytcgggccgggcyccgcactcctgcggggttggggtggtctgtccgcaacgggctactaggggaggcgcgctgtctgcggcgaaatgccaggtctttgttgtttggtccgaaatgtctcttcagtcccttagtttaatgtcgagggaacacttgcttgagggttgacttcggaattgaaaacgcgggtgatagtgcagaaaaaacagtaaagcagaagcaagttgctgcataatttgtctactgcttcaacctcaaacgtagatttatagcgcccgtcacaaagggcaggaccgctgcaaaaaaatggaatcttaaaactttagccatcgttcgctaaaggaaatgaaaggagaaattcaacagtcgcttggagcctgggttttgcttagtaagtgataggctgtttatttcagttcagtttatcatactggttttcaggccttggattttgagaaactttagattattgatattcacgtgtatttattaagcatctactagatgtaaagcccatacagaagtttccaattccttamcttctgcattcttgaaaaayctgaaatattcattttcatgtattaatttagaacattgtgattacaattggttacaaaaaaaataagcgcccattaaagaggccagtgggtttaaaaagctaagtccgaaatttgttaaaagcgaaaatattaaactggaggaatattattcaatgctgtttctctttttctctcagcagcataaggagaaggaagtaaaaagtctgcttgaatgtgaaaggagagaaggcactgtagaccaggcagtctagattgtgaattcgtgaataatttgggaaatgattgttcaagaatagtcaaaagatgcataatttttcaaattaattcacatgtagaccgcagtttgttttgagacggagtctccttctgtagcccaggctggagtgcagtggcgcgatctcggctcactgcaacctctgcctcctgggttcaagcgattctcctgcctcagcctccccagtagctgggactacaggcgcgcgccaccacgtcaggctaatttttgtatttttagtagagacggrgtttcaccattttggccaggctggtctggaactcctgacctcatgatctgcccacctcgacctcccaaagtgctgggattacaggcgtgagccacctcaccgagcctgtttgtttgttttaatcaatgaatgaatgaagggaatcagatgtcactgatgaagaaaacttccataatttcttgtgaataaggtcaaagacaacgtattaggttcttagttgttggggtttttttaagtaaggaatagctgcttttcccctaagcctttagatcaggggcttaattttaatgcagtggtttctaaaatattggcccagtgacagccttgatgaaattttcacttatcctccacaaaaatgataaaagctaggacaatgtaggaaactttttataaaggtaatttgcatacctctgttatgarattatgttctctctgcttttcccatgtgaaaatgtgttctgttatgaacataggtgataatgataattgtgtgtctacatgtgggtgcttaatgtcctgactgggcaaaatacaaggtggtgaccctctactggtgctctaatttaaaaatatatgtatatttgaactttataatcagttaaactcagaagtatcctctaatcataccgggttaggctttgagtcctggagatagatcctgctctgctggttgaggaccttaatcataaggcacggtattaacagcaaggttccaggataactgtctgcagtgtcacagtgtaaaaggagaaatgtaaatttaaaaatgcttcaagacttttgtctaatacatattattcaaaaatttgaaactgttatttttgccaratgcttcagctattattgcaattwttttttataatcacaaaagatgttactatactggcatttgtttttaaaaagctgtcgatattcaaccagcatgccttggactttattgtgggaagaccctattatttaaaaatggctcaactgaaatatatggagaatgtggggtaagtcttatgtttgtatcttatttcattttgtaaaatctatttgcttttgaaatattttcacatacaacattttttgttattatactcattaatttataaaagaatatggaggaccaggcgcagtggctcatgcctgtaatcccagcactttgggaagcctaggtgggtagatcacttgaggtcaggagttcgagaccagcctgaccaatatggtgaaaccccatctctgctaaaaatagaaaaaaattagctgggcatagttgtgtgcgcctgtagtcccagctactcgggaggctgagacaggagaattgcttgaacctaggaggtggaggttgcagtgagccaagattgcaccactgcattccagcgtgggcaacagagggagactctgtctcaaaaaaaaaataaaataaggaaatataaaagaatatggaggcattaatatagkcattgttyatgttggcattttgatgtctatattattttttaaaacatttaataattttataataatttctaatttatgatttggtaccgtgtcttgtacagtaagttgaacatcatgaatccagaacatttatctgcagttattcttatataatgttaataactaggtttttcattgaatgttagtcaactattttagtaacttagtaaaaggaatcttctaagagcattgtacaaatatagcacatacaatatagatttctttttattttacttatgccctcttttttatttctaaaagctgcacatgtaaacttaaatatttaaactgaaatgggatgtcttatagaatgatttgggggggtgttaatgttgtaaaataatatctgtacacaaaatattggttttatatrttataggtatgcccaagaggacagagaacgaatgcacagaaatattgtcagccttgcacagaatctcctgaactttatgattggctctatcttggatttatggcartgcttcctctggttttacattggttcttcattgaatggtactcggggaaaaagaggttagcacatttctatgaacatayctggctggactaatgtkggaataattatcactcagaagaccttattaagtaattatgcttcttctgttttaaaagtggtaaacatgtttttctttatcttcagattattcttaactgtgacaagaaaacttaacaatagggcatgacttagtaatttttaagggaactgtccttagtctgttttactctcagtgatcttgaaggaatacttttacttctcaactataatccttattggttttctacacaaaattggttatgattacaagctatttattgttatggaacacattctttgtaatttaatttaatactaataatctagtatgatgtagttaaaaatgatayagctgtaacctaatacaaaaactcatattaacatattaaatcarcacacatttactaagcactgcattttatgtttggaagatcagggaaggagatataaaaataactgacatggcttatagtcataatcttgtggagaaaacaagtgtgtacataattataaatcagtcttagaaatgtagtggaagagttataaacaaagtactctggagttacaaagaacagagagataaattatgcctcatgggatctgaaagatttcaaaaaaggaacattttaggcagaagaaacagcatgaataatggcatagaggtatgaaatatgtgatctgtggtaggcaggaatggaagtaatctggggtagtcaagagtgggttgcaaatgaagaaaagtaatataaaggggagtaggaaagataggttgaggccagaatgtgaaggttcttgataagcatgtgaactttaatctgctgggaatgggaagtcaaattctgccttactgattttcttttagttcctccaacttctcaggatctttcctactttaggttctttcccttcctgcaaactctttctgctgtctgaaatactctcttcatctgactgcaacttgttacctagctaccttcttttccttctgatttcagtttaaaagtcactcagaaagttgagtactaaaaacaaaacaacaacaacaaaacaaagagtgcccaattaaaagagaaaaataaggaagacagcctactttctattctttccttctaggcctctgggcctgtggtcggacaggcagtctgaaagacttctgaaatgccttcaagcctttttctcattgtgttggctattagcacttggctctcttttagccatgctaacctctctagcaagttgctgtacagcctggttgaattcctctcctgaaaatgcttttcttctctaccacatggccaggctgcacattttccaaacttttagactccgctttcctttttaagtataagtcccaatttttaagtcattcctttgctcccacatctatctgatcataggctgttagaagcagccacagcacatcttggatgttttgttgcttaatgatttcttccactagataccctaagtcatcactcttaagttccaacttccacagatgcctaggacatggacacaatgcagcagagttctttgctagggcatagtatggatgacctttactacagttcctgataacttccttawttccatgtgagacctcatcagcctggccttcactgtctacatttctgtcagcattttggtcacarccacttaaggctctaagatgttccacgctttccctcaccttcctgtcttcttctgagacctccaaacactttcagcctctgtctggtacccagctccaaagctgggtatctttatagcactgccctacccttcagtttcagttttctgttagtccatttccattactataaaggaatacctgagactgggtaatttataaagaaaagaggtttaattggcccatggttttgcaggctgtacatgaagcatagtactggcatctgcttctggtgatggcttgaggaagcttacaatcatggcagaaggcaaaggggaaccagtgtgagaggaggcaggaggcaaaggggaaccacatggtgatagggggaggaggtacctctttcattttttttaatgttttattttttaatttatcttttcgtttttatttttcgagacaatgtcctggtttgtcacctaggctgtattgcagtggtgtgatcactggttactgcaaccttgacttcctaggctcaagtgatcttcccatctcagccttccaagtagctgggactacaggcgtgtaccaccataccctgctaattttttatattttgtagagacagggtctctctatgttgcccaggctggtctcgatctcctgggcgcaagcagtcctcctgcctcagcctcccaaagtgctgggattatagatgtgagccaccatgcccagccaccaggatcttttaaacaaccaaatctcacatgaactcacagagtgagaactcactcattactgtgagcacagctccaagtcattcatgaggcttccactcccatgacccaaatacttcccactaggccccacctcactgaggattacatttcaacatgagatttggagggaatgagcatccaaaaaaatcactccgtatttgagtgaatcgtttattggtgaaggtctggtgtatggaagtggcatcatttgatgtatattttaggaagaaaatttctgtggagggtaggtagattagaggtgagatatttaatagaagactgttgtcaaagaaatagactatggtagttggaatggaaatggaaaggatggtcagatagaaatagaatcagcagttttctggggcctacctaataaatccagggtggttatttacattgggaaagcatttataattttttagaataatttataaaaatactttaaaaatagcagctttcatccagtttttaatttctgttatattaatagaatgatgagagatggggtgagaaaggagatatgacaaagctgaaatagaataattgtccagtcaattggtgggaagttctcagcccacagtaaagaagagctaacaggcataggtatgtcttcaccaaatgcgtttgaattcagacgtcagctatgttttgagggagagacttgaagcagagactagagggtggtttgagggaaggcgaggagtgactaatgctcagacaggaaaggaggtgggtttaaaaagagggagttgtacaactgtgctttgcctaggaaattggtaacaaggaccacaagggccatctcttacagtttcctgaaattttgcacttacagtccagatagatgggggctggaggtgtcttaacaaatgttcataaaaactggggataacccctgagctgatctggaaggatgcatggtttggcagataggtaaaatgtgtttgaggtggagggtgatgcatgcccagatgtgtggaggcacaagtgaacttaaagtcatttagcatggccaggaaatagagaagacgatgctggtgggggtatttttccagaaagacaaaaagactcaaaattagtttaatgagaggagttctaaaattgtatttcattttgtaaagattatgtgtctggctgtagataggttgaaagagaacatgacaagaagaccagttaagaaggttatcaaagtaatggcaagaaataatgaagttgggattttgcctctgaaaatattaattctataaggaagcaaaatgtcaaattatgtaatgtgaatgtgtgtttatgttttcagtgttttcatctttgtaaaatggcacaggagttctgtttccaacaatgtgagttaattaggagctccaagtgacccacctgcatgaaataactaaagtctgggaaagataaactatgtgagacattgctggtcccagctggagatggagagatctccaggaactcttctctttcaaaacacaaaccagcccaccctgagttaggccagagtgacaaggcaggcagttgggatgagagggttgtctgaggtcaattgctggtagcagcagtgttatctggatactgaatcttgggtagcctctgctaagactagaccctcaagggcctgaagcctaaggtagtagtggccatggctgctgacaaaagtagcagagcctctttgctggaaagcttccccattctcaatttaaccctgtaagactcttgctcattaaaatctagtaatggcctcatagtctgtggttactaaataaaatagcactaggacttattggtacatgcaacaaacaatatatttatgctctgagaggacacagataatggactttcacctacaggatatgtaactgctayctataaagaaagtaaggatgtagtcacaagctgtccataacaataagattattaggaataaatacatgtgatggggaagaaaaggaaacttttagaaatgaaagtttatacttgccaaaataaaaaaaaaggtagtcagcagattaaacagttgaagatagaattagtgaactagaaaaaratrcatagaaataatggaatattgcactgagaaagaaggagatggaaaatcaggtgcaagaaggtgagatccatgttgggtaggtgtgggagtggtccaggcttaaagtcttacacctcacagaagccagtctctcttataacaattccatgaacttctggggtcctgcaagtgacatgccaattataagagtcactgaactcaagaaagccaaaccatggtatcccyatcaggcatttatagttcatttatggttctccccagtcgagatataatttaccaggcaaggatcatttgtatcataagcagtgttgcctagcaatatagttgacattctatccttatcaggcttccagaggaaaagagctagagagttacctgaagcccagattctcatgcacagcataaatgttttgttaagtctttgcccaaagtatctaattagggtctctggaaaaatagagactatgaaggagagctgctatttttttttttttttttttgagacgagtcttgctctgttgcccaggctggagtgcggtggtgcgacctyggctcactgcaagcttcgcctcccaggttcacgtcattctcctgcctcagcctcccgagtagctgggactacaggcgcctgccaccacgcccggccaatttttttgtatctttagtagagacggggtttcactgtgttagccaggatggtctygatttcctgacctcgtgatccaccygccccggcctcccaaagtgctgggattacaggcgtgagccaccrcgcccrgccaaggagagctggtattttaagagataactggcttcaggttttacaaaaataatgagaaaccgattcacagatcccagaaggaaaacacatcccaagcagaataaacagaaattcacacctgcatgcatcataattaaactgcagagtactgaaaacaaragagaagccatatggaagagaaccaaggcacacctgttaacagccttggttgtgcttccagctaacagccagcacttactgcagccatgtgagttagtccttttaaatgctgcagcatggtcaagcctctagaccagtgcttcccaaattgacaccatgtggagcagaaagaactgcccagttsagcccagtcacatcacaaaatagtgagaaatgatcagtggttcttgtttcaagccactaagtattgaggtagtttgctatgcaatgatacataatggaaacagtgttcaagtagaaaactcaaaatcacctatagactagatattagaaataacaagacagtttaataaaaaggttgactataagataaatatatgaaactatttcctrtattccatgtacagtacaagtactgtgacatagctcagaccattaagttacataggatttatctgagcacttgacaagccaattttaaaatttatatggaagagcaaagggccaggaatagccaagaccaccaaagaagtagaaaaaatgtacatgacatcaaggattatgatcatattattcttctggctcaggaatagataaatggactcaagaaacagaatagagacccaaaacacagacaattatatatgaaactttatatgaaagaagtgccatggcaaattagttgggaaggtaggggtgggaaggagtacctgttcagtaaaatgctgctgctgggacaactggcaattcaaatgggaaaatgtaaagttagatcctaccttacgttaggcacagaaatctcttctaggtgaattaaagataaatgtgaaaagcaaaaccttaaaatttttagaagaaaatttgggtgtgtktgtgtgtgtgtgtgtgagatacacacacatctcagggtgtggaaggactttttaaaacatttaaactgctaagtagaaaaaaaaataaaagcctggtgtattaaaatttagaacatgtttataaaaaggcttcacaaagaaagtgaaaattgagcccacaaacaggtacacatttgcaacacatttaactaaccacagaatggataaacaaatcacagtattgtcacacagtggaatcctaacacaatagcgaaaatgactgaacctcagctataagcaataacatggatgaaacttggaaatgtaattttgagtagaaaaaaaatctcagaagacttccattagtgtgatatcattcaaaaataagcaaaactaaccagaatagttgtgaagcagaaatacarttgggataaaaactttctggaaaaaagtggtaaaagcagtttggtacatggttgcctctaagggagagacagaggtatggatggggaggaacaaagawgtagttacaaattgttgacagtgttctagttattgggtaggagatgagcttataatattataattactatactttctaacaaacaygttacataccatcttttatgtgcatattaagattaaaatgatacacagataactaagaaatttttagcaacaatttggcaagatactaaagatgcagggtagatataatttctgcttttctgttacacatttagataatactgctacagtgttatttatcccttttgagaaaaaaaggttatactcgagtagtttttgacttttcttatagatttagaaatctgtatcttgacacatgtacatgttttattaaagccatttaaatattgcaatttttctagtaatcatgcctcttttccttctctagttccagcgcacttttccaacacatcactgcattatttgaatgcagcatggcagctattatcaccttacttgtgagtgatccagttggtgttctttatattcgttcatgtcgagtattgatgctttctgactggtacacgatgctttacaacccaagtccagattacgttaccacagtacactgtactcatgaagccgtctacccactgtaagtgtttatttygacttaagatcattgtttttttttaaatctctgaggattattatagattttatggcgtttggagacaaaaacaggtgtgggtttgagttctgggtctgccagcggctttattaccttgaacatgtaaacagcctcttgtaacttcagttttctctttggtaaaatgggaataatgatmcttataaggtgtcgtgaggattaaattaatccacacattctagataccatataacttacatataggaggcactttatartaaatggcattattacagtgtttggattagtgttttttctttttttctccccaaataagtgtaatttctgttagaatgttttgttttcaaaatattaaattcataaaattctgtatgcaattatgccagactattccagtttcagaatttttatgaatttttgtaaattctagaactagaaaatgaatcaaattcattttgatattttttgggggaaagggaaaatagaagtctggtatttatattctcataattgtagcaggctttcagtacataatatgctcagggaaattagtcctttttgagcaagttcttaataataaaacatcaaaaacatagaaatgcaaataggtacaaaacaaccagatatcttagaaaaaatgaaaatcttcttttctacctgccagttttttgtttgtttttgagacagagtctcgttctgtcacccaggctggagtgcagtggcacgagatctcagctcactgcaacctctgccttctgggttcaagtgattcttgtgcctcagcctcccaagtagctgggattacaggcatgtgccactatgcctggctaatttttgtatttttagtagagagacggggttttgccatgttggccaggctggtcttgaactcctggccttaagtgatctacccaccttggcctcccaaagtgatgggattacaggcgtgagccactgtgcccggcctctccctgccagttcttaggtatggcaaattattttatagatatatatatatagctataatttatatataaaatactatataaaacactgataatgtcctttttgttgattcattgattcrtagagcttaactctaagcattaattaccctcttgtcatataactctcctaaggccttgcataacttaacgtggtcctatttggaaaacttaataaatgaattgaatattatatttaaataagatataatgtaatcttatttaaaacaaaatcagacttatttascgatagtctcatttatgttatttattgtaatatttataaagcctattacagtaggagggtcagaaaatataagattagaagagaaatggcaaacaggtactaccaaccctcatctgcacctgtaatagtcacttctaatttattgtagcactttttctgctgatttgagtgtagcctaagaatcttgtggcagcactctctgtcaatcagaatcatcacacagcttcattgattaggacattttttgtctattcactatccctgaatcaagattgtttgtttttcttcctcagcacccttaccaacagtcattgtagaacagcttgcctgccttgttttattattatacaaaacagtgatttttaaaattawgagatattatatagtatcttatagcattgggtttaggcatattatttatttacctaagcattctaaatataaatgtatggtcagactgggctaagcacttccgaaggttgyagggctaccacaagtcatagtaattttttttttttttttttgcaagtcaacaaaaagcaatagcacacarttaccagaaacctttggaacactagtgcattgacaaatgaaggctgtttttcccaatgtatatatagcctagtttcttacaaattgaaaaataccacaggactttactgataattatagttttaaggggaaacagatgaggcatgaaaaaacatgtaagcttctatcattataacttactgcaaaaaaataacttttacattactaaaactttaagaatgagttatggaaaatgagcagttattactcttatagcagkaattagctttagtttgtcaaatttaaactatccccacatgtaggcagcatggattgaaagaggggaagagtggaatgggatgaggtcttctggtggaaggcaggagtgggaaacgtaatcacttccagaaactagtttcctagttcatttggagaaacacaggatggtttcctcctgattaaagtgaatctttttggagctcttaaggaattacaagttgtggaaatggacagattttttttcttttgctgttgataagaggtagcaaacaagactaggaaactaattcattagaagaggtaacacataatggtttcctcttgattaaaatcatcttttttagagctcttaaggaactacaagttgcaggaatggatagattttgttttcttttgatgttgtttgggggtggtataacaagacaaaaaaattatcacccaagagatcaaacatgtactaatgcattactgtacaggactgaacctaaaagcatcataggaacacaggattatggtatcatgatgctgtgtggggaggaagcatgtggtccgtgatctgaaatgactgctgacttcctaggacactcccctgtatagggagagggtttgagtagcaagatagtaaaaatgatttgaaaatactcaggaaaattaaggtagaactatgtggataaaagtcccattattcaaaataaagtgctagaaatctggtgacacatagctctttctacagctttttttttctgattataaaaattacattaaaaatgggacattcaaaaacagaataaaagcacacacagaataaaataatctgtaattctrttccttgwgatgattctgctacaaattttatctttccagttttatttctgcatgtgtatgcattttaaggaatattaaggctatactatgacatgctatcttgtaagttgttggcacttaatgtattaggcacagttaattttgttaacatttatttcataactagatttttatgtctgcataatattgcagcatgaatatactataaaatataaccagtttcttacatttgaatatttattttcttctgggctttattataagtgattcaataaaaatccttgtacagtaggtttttttatgtatccctggttgtttcccttggataaatttctacaggtaaaattgctgaatcaaawgggataaacagttttaggatttttggtacatatttccagactgcctaagaaagcaaccattgtacccttgctagccgtgtatgacagcctgtttggccagctttccaccaatctgaatatccaatggatagagtaaatatgctttttaaacctcttttaggctctttcatttaaaaatgatcaagattaaaaacatttttaaaacatttttgatgttacaaattctytattttattttacagatataccattgtatttatctattacgcattctgcttggtattaatgatgctgctccgacctcttctggtgaagaagattgcatgtgggttagggaaatctgatcgatttaaaagtatttatgctgcactttacttcttcccaattttaaccgtgcttcaggcagttggtggaggccttttatgtaagtttgatgggtaaagtcaatgaaatatatttattattgtatgtagtaatatttcctctagatttaattttggagmtttttccttaagatagtttgtttaatcctttttttttttttttttttttttttttgtgatggaatctcactctatcaccaggctggagtacagtggcatgatctyggttcactgcaacctccgcctcctgggttcaattgattctcctgcctcagcctcccaagtagctgggactacaggcatgtgccaccacacccagctaatttttgtatttttttttagtagagayggggtttcaccatgttggccacattgatctcgatctcctgacctcatgatctgcccacctctctttgcatttgaagttcatgacsaaattaaaatattttaaaaatctaagtatgtaataagaaataaaaactggtttttatttaggaatttatgaaaattagtcttgataatgtatactgtttattattaagtagggtcttaggtttctaagtgtatttatgaaaaccttttatagtaaaaagtcctcaatatatcttttattttaatgtaaccattaattcatttgtttagtaaccatttagaccaaactgtgactcaaaagaataagacaaattcactgttaaaaacctcacttactaccaggagataaagtaggcaagccagtggctgagaaaatgtagtgtggttcttttgaatatgtgacattgaacgtcccaaggatgttggacaccatcctttatatggagcttggtaatgtaatttggtaatatagtttgggaatgtaatttggttcaaggtgatggtggggcttgagggtaagaccaagggaaccagaaattctgttatccgccatattctggtttacagatgaactgtttcatttggcctgcacaggatttgaaaatctatagttccctctagctcctctatttccctgttagatttggcccattcccttataccttcctggctaccctctctgtcttttgaggttgccattcttgctctagggaatagggacctgttcttaaaaggatttaggcagaagagtgacatgattacatttgcactgatttgcactaatttgggcttagttagaaacttcctctttattcctttttactgtatatggctttttactaccaggtcttaaatttgtatcattagcaacattgtttagctacttataagttaagtagagtttttgttttgttttgttttgaaaagttgattgaggacctaataactgtctatgaaataaaaagttataaatgtcaaataagtcattcagttctttagtaagttggaatcaggcctgtatagataattcagtttctagctgctgaatccygagttaacatttgaaattgttccaaatgggttctactrcaatgataagtagtttcataaactgaagtcatttacaaataatgtatgaaaaaaattcaaagtttttttctcaatttgtccatttattttagtgtgttataaatttgaaacattttaagagaaaagtggtgttttagaggaaaaaatttgcttaaagtattactgtactgtatttaaagtagagattgcaggaattttgatattaagaatactgaatgatctctttatcctttaaggtttattgctaaatgaccttttctaaagattaattaaagctgagttactcttatagataacctttttcaactgcggttccccaccttgaccacaaaacacagaaaattatttgaccatttttttgaattctcctaaatttagtacataactggtactattctagaatgcagaggagagaagttaattatttacattcactggatgccttaataaggcaaggttcttcaaagctggcccaaggatagtttttacaattttttatggttaaaaaatcaaaagacttatatwtctagatgtgagtatgaaacgtatgttttattgtccataaagtttttattggaacacagccgtgcccattcatgtatgtattctctatggctgctttcccactacaactgcagagctgggtaatcgagacagagaaatgcagggctgaaactatttactatcttgccctttccagaaaaagcttgctggccactgcctcagaaccttaggttgtaagtctcacagaactggttgagaaagratttgactctaaggaaaattactatttgaatttatttgatggtttattgagaaaatttgtttcatttccaacataataccaatgcttatctttcagattacgccttcccatacattatattagtgttatctttggttactctggctgtgtacatgtctgcttctgaaatagaggtaggaagtctttttttcctttgttaaagactttttgataaatttgacaattcaatatcagaatagtccatatgatatgatatagtacaactaattgttttagtaatctttggctgattgatgccacttggtagcttttggctygttaactttatgaaaagttgtgtactggactatatatttccctgggaaattagcaaaatagtgaagtagtcaggcccaactatccagcatgaaggagaaatgtcatttcacataattttcccatgtagcaaacatataattattgaaatgttgaaacttattaacastattttgagaaaaaccataaaaatgttttatatttagaactaattttaaactttattttacaatggcaacattaatagtcatcagtaattgtgcattccatatccttctgtgttttatcacaaattttattttcctgattatggatgtttacttttaccccataatgtttgggggatttggagctaacattaatagccacattattctgatactgttactttttcacagtattcattttgtacctctaatattttaatatttcagtggaaggccactattataaagaactccttttaaaaaattgtgtatgtctttattttcagaatatttttggccaaaaaagtatcttttgacacatttgtagtcrctgggtagaatagaacatcatatcataacgtttatattttcaaatattctaaaggaactaagctattggttaaaaccatgaagaacaaatgagaagtagtagtgtatttgactctatatctagggaaaaatgtattcattaaactttgaatcaaaatgggcattcttgtacattatttgttcatatgcaatctgacattttctttctaaaataattatatttattattgttactaatatattagtaactgttatacatattacatttaaatgattgcttttaaatacgttaatggctctgatttaagaactctttgttctaaggccaaactctagmggaagcagaagtataaagtgtctcagtactcttccatcctatacttgctaatctagggactatgaactgtctcagactacccatgacagttgatctgtgctttctcataattcctaacagagaaaactcaaccaagagaaaataagttgtaaactattttggagtggttactgctgatgccactttttctattaccttagtgagagagtgagtgggggraaacatctaggaatcatagtgacttttaggtaagataatagtggaggaactagacagaatatttttatagtgattattcagttgttttcatctgtagatgatcctcatttttcctttgtaatcatctttaaccagcattgaaatataattaaagaagataggaaaattagttttggcacttttatcaactctagggaaagatttgagggagaaaatagttggatatttggatatttgaataaaatgagatttttgtttttttttttttttgttttttttttttttttttgcrgagtctcactctgtcgcttaggcatgagtgcagtggtgcagtcttggctcactgcaacttccacctctcgggttcaagtgattctcctgcctcagcttcctgagtagctgggattacaggtgcatgccaccacacctggctaatttttgtgtttttagtagacggggtttcaccatgttgatcaggctggtctcraactcctgacctcataacccacccacctcggcctcccacagtgctgagattacaggggtgagccaccacgcctggccttgaatttttacagcttatccatagttaagaattagctatacactgttaaattagcttgaacttatttgtttctctgcccctgtgaatctcctatataaaatgttcacatacttcagttagcatgaatcagaaatggggacctaaaacggaaaaagacagcttagtactggttgagttgatgagctgtttaataagagaaagttagtaactaacctgttgcaaattacgttttaatgtgtttattagcacatttagatattttgtatttcattcttctaatttctgcatagyatacaggtgtattaaggattaaaagaaaatcagagtgttcatgtgtcatttctgcccccttactattcatgcagcaggctccaggaatgttagaggttaaggaggttgggtttctgtayctcctatttcccacctgtagatccatagcaacagtggatcagggcaggaagcaagcacataaagtggagtttcccttctagttcgtatctttgagaagaaactatagtgtttccaggagtgaatgatggcatagactaggacttaagagacatgatgaygtagctttcgtctgggtgcctctactgagtgcttatatgaccttaggagcctcactttcctcatctataaagtggagtggctagactgagtgatttcttaagtcttttttagctcaaacattttatgattctgagattataaataatacattttatattaagttatattaaattacccagctgacttagcctgataatctgtatttctcttttctttcttttacaaaattatatagaactgctatgatcttctggtcagaaagaaaagacttattgttctcttcagccactggttacttcatgcctatggaataatctccatttccagagtggataaacttgagcaagatttgccccttttggctttggtacctacaccagcccttttttacttgttcactgcaaaatttaccgaaccttcaaggatactctcagaaggagccaatggacactgagtgtagacatgtgaaatgccaaaaacctgagaagtgctcctaataaaaaagtaaatcaatcttaacagtgtatgagaactattctatcatatatgggaacaagattgtcagtatatcttaatgtttgggtttgtctttgttttgtttatggytagacttacagacttggaaaatgcaaaactctgtaatactctgttacacagggtaatattatctgctacactggaaggccgctaggaagcccttgcktctctcaacagttcakctgttctttagggcaaaatcatgtttctgtgtacctagcaatgtgttcccattttattaagaaaagctttaacacgtgtaatctgcagtccttaacagtggcgtaattgtacktacctgttgtgtttcagtttgtttttcacctataatgaattgtaaaaacaaacatacttgtggggtctgatagcaaacatagaaatgatgtatattgttttttgttatctatttattttcatcaatacagtattttgatgtattgcaaaaatagataataatttatataacaggttttctgtttatagattggttcaagatttgtttggattattgttcctgtaaagaaaacaataataaaaagcttacctacataaaatttcaatgttttgacacttaattgttgtttggcacaatagtatggaagtaattcaaactggtaaatagtttcctctcatatctcgggtatatatacataccatattttattgatccagagatacttatttcactttgtgacatctctgaattaggatgcatcttacaactgatggcttattaggtttaatgaaatacagaagatacacagaataaaaagggttttcctgtggttggtttgtggtttgtgataggtgttctgtgatgtttatgctttgaaggccttaagactcatggttgcaaccatggaagcaaaatgaaatttttagctcttaacctaacaacctgaccatgtttatccatttttattgtttagaagtttatttactgatacttggtggaggttgtgtgaattagttaaattttaaatgtttaagacttctattaacagctgcaaaatatgaaagtaagtgcactcacttttcctgtagtagtctgtcttttgaattcacagcagttgtatccttgagttactttgttaatgtatttttctcagtacatttaaccactgggaaatgaacccttgtacgaatgtgtttcttcttctctgtaggaataaaaaataaatataaaaattttatttgtattgcacacatttggggggttattagtgttcattaaaattctgagttgcccaaagaatcctcaattgagtaattgtataatcggggtagagtagggagggtgtcatgtgtctgattactaggactatatcttttggtccacttggggccatttttacaatcatttttttcatatgtcctgttctagcagaaaagtatatatgcaaaagaagaaattacaattacaaggcctcacgggcaaataatttccacaatacttaatatgtatctgcatttttaatttgctttggtaaaaataagactagaacaacttatagccactgtagttgctaattttactaaataatttgttaaaacgtggtcataagaaatttaaaaatcaacccttgtctttgttaagttttgacttaggcccttgtagcacatcacaatccttatcactacagtgtatggtacttttgctaaccagtcctgaagaggtaatttaaaagtcaaaatacaggttgaatatctcatattcaaaaatgcttgagaccagaagtgtttcgaatttcgggtattttcagattttggaatatttgcattatacttacagttcagtatccgtaatcctaaaatctgaaatcttaaattctcaaagaggattttctttgagcgtcatattggtgctgaaaaagctttgagttttggagcactttggatttttggattttcagaccagggatactaaatctgtgttttcttgattaatttgggtcagttagttgataaatttaataactaccttgttatatagttgtctaaaactattggtttgcgagactattgcacattgaagccatctggagagatttaaaaaaataatgcctgggccccacacccagagattcatgttgaattggtctgtgtttgagcacagggattttttttttttttctttttttttttttgagacagtgtctcgctctgtcacccaggctgaaagtgcagtgatgcgatctcggctcactgcaacctccacctcctgggttcaagtgattctcatgcctcagcctcccaagcagctgggattataggtgcccgccatgacacccagctaatttttgtatttgtagtagaaatggggtttcaccctgttggtcaggctggtcttgcactcctgacctcaagtgatctgctcacctcagcctcccaaagtactgggattagaggcatgggccaccacacccagctgagcacaggggttttttaaaatctccaggtgattctaatgtttgagaaccactgatctaaactcctcctatttcagatcttaatttttccaagagacaagtactaggcaaatgattttctttcttctcactgaaattttgattctgctttaattataaggaggtgtttttctagacttaatcaaaatgtagatgattgtatcaagcccctcatcacaataacagagataactttgacagttatatacattgatttttttaatgtttcttttaaagtacctcatcctaaaaatgtcttccatagcccatgtatcaatatatttggttaatacacaaattatttatgtaacctaacataatatatgatgtaatactcaaggacttttgtaattttaagacaaaattctttttactttaaaaataactgtactaagttactgtttagcttacatatacactaagaattaacttatttacctttgatttacaagaaataaaattaaggcaaaaagtaagtttttagtaattagttttcaggaagaagtctggcctttaatgttctgacaagcctattccacacttgctggttggttcccccagcagatctccactcagccttgctacttggcagttcttgaccagcttatgtctgtgcttctcctttgggaagatatccctgtgtactccaacatccaataagacacagctttaccctctgatagccactttctagaaggaatccaatgtattttcatcagctcttcaattgtcttgtttctcacagggtatgcactttaaggttcagggcctggagtttattcaactttgtcactgtaacatctgctccagtgtcaggctccaaagtgcccaatgttaatgaagctagtgcagtgatcctggagagggcaggacctgcagggctgcagtgactatcatggccagaagaggacagtagaggggtgctgaactgagataagggcttctccagaagtcctgtggcagaacccattcaacagggaacattcaaaagctgggaggttacaggtggctcagagatggccaaggacttgaatagtaaattcagattttactatcacctctccaggagggtggtaggtttcagggatctgatgagtgcctaatatgggtctggtgttttataactcctgttagttttatcagtggtattttacaactggggagactgaggagtggaggttagataacatgtaagaagcagagcttagctggcatggtggctcacacctgtagggagctgaaggcctgtgggatgtgaccaactcagcattccgctggaggctatatgaccaaacagcaaactgtttatcatgaacgcaggatgtgagcaaactcacactgccttgccaccaaaaggtttgctgagggcctcactccctggcactgggttccttgaagttacctattgagaaatctagtgcctattgttctaagaatgcagtcttacaagcctgctgtgaatcaagctgctggcggacaatcacccccgaccccccacacacctcactatctcttttgcttaataaatacagagggctgtgtaaagttcagggcacttgtccactagaggcaaggtgccccctgaccccttcttccaaatatactctcttgtctttgtcttttattcccgcgttcgccccgctttgtttagtccaataggtccatggcacacacatataatcccagcactttaggaggctgaggcagaaggattgcttgagctcaggaggtcaagaccagcctggtcaacatggcataacctcgtctccaaaatacacacacacacacacacacacacacacacacacacacactgcagccaggcacagtggcacgtgcctgtagtccctgctacttgggagactgaggtgagaggattgcttgagactgggaggcagaggttgcagtccaacctgggcaacagggtgagaggccctgtctcaaaaaaaaaaaaaaaaaaaagagagaaaagcaagtaatcctggctgctatggtctgagagtttgtgtctcctccaaaattcctatgttgaaacaatctccagtgtgtattaggtgtggcctttgggaggtgattaggtcttgggattcgtgcccttatcaaagaggccccaaagtgctgccttaccccttaaatgatttgaggacacaatgaggaagcaccattctatgaaccagaaagtgggccctcagcagaagccaaacctgccagtgccttgatcttggacttcccagcctccagaactgtgataaataaattcgtgttatttataagctacccagtgtacagaatgttatggtagcccgaacgaactaagacagtgcctggctccattgctatagcaagttctgcataaacagcctctgcttattctcatttgggtggtctttttatttacacactgccagtctctacttgtcatagattatccatcagacctcaaaatatatgaaaaaggaaatatgatattagtaattcagtgaaactttctctaagagtctatttaaatttgttgcaacacaaagattccatcgggtttcagataaaaacagaagattaattcatgtgaagacagtgcccttgacacttacagatgatttagctctcaaaattttgcttgatctatagttggaaggaatggtctggcctagcaaaggaaatacaaatagaagcaaggcccacaaaggatcctttatgcattcgtacatcataagtatcaccaggctcatcatgatcaccaggcaggaccatcaaaatgactttgcagctaagagggtttacccacaaagttcttcattggccactgaaacgttatttcttctgtcaagcaatgccccagaacacaggttttcccaaatactggaatgtttttaatcttatcactatccctctttttacatttattttaagacagggtctcactctgtcatccaggctggagtgcagtggcacaatcatggctaactgcaggctcgacctcccaggctcaagcaattctcccatctcaaccttccgagtagctgaggcagaggcactaccataccctgctaactttaaaattatttttgtagagacagggtctcattatgttgctcaggctggtctcgaacacttggtctcaagcaatcctcctgcctcagcctcccaaagtgctgggattataaccatgagtcactgcatgcagctctttttacttttatcccattttactttctacatcctaccttcaaaattgcttatctagtgattatgctctttaaaattaagccttgataagcacaaatagatttgtacacttgccagatgacagtattcttgtttcatcactccatctctcttctaaactctgttctctttccttctcccaagctccctctacccccacatcccatcttcccagatgattctgtcactgggacctctgggctgtacctgtgcaaggactcaccttcaattctcaccactgccctaatctggagagttctgtggctatgtctaacatgacattattgtggggattgaggatgaagctgatacgcctctggagagactggactgcttgctcatgagtcaagcatgttagatatgatgtgttaacatctcagaagcccccgcagccatcactagatttttctgagaaggtaacagttgctatttttaatgctaaactcagttcaggaagaaaatgtaaaattatattcaacttctgtttaagaagactaaaaaatgtgtaaaagagtttaaaaagccttctctggaaaaatgtttaaaataaactttttaaaaaaattataaagaagatttagttatctagaaaattctcttaggtgaaaggcagaattggataacactacaagagtattcaaccccaaataagtatcaatgttcaattgaatgtttgtggcataattggggataactaagtcacttagttgacacgttttttcttcttttgatgttaccagctatatagtaaaatagcaggaagtcccatgttaccaaagctctaagctgttgcttactaagaaggtccattggtgattcctgttccacaagcaaacgcagcccttcaagactccctcgtagccatgtactgacatgctgcattttttcatctctttcacgcagcttgtctgttagattgtttatgtcttgcaaggtctcttcaccattgtccaccaagatctaaagaaatggcattttaggctgtgtcaatataaattgctacaacataaataaatacacattctaagtggatcatgtccaaaaaaaaatattatatatgcataattggtatcagtcataaaaataagtgcttgtgtacacagccaattcacaaagttctgtacataatcttggaaaaatggattatgaagtgagaagaataatggaatgctcactgaactcaaatttttaagtggataatggtagccatggtggtggcagcataaaaagctagtttcaccctcagagaagcacagagctgaagagattcagcctaacagaaggaactttggaatcaggcaggatctgggttgtaaattcccatacgttcatgaactgtttggtcttggacaagttacataaaccctctgggcctccgcagctccatgtgaaaaagacattttaacgctttcctagtccagtgttttaatacttaaatgaggattatgtgtaaactttaaatacttagaaagtggcagagccaggattttgaccccagcct

SEQ ID NO: 94909 - DNA, 37734 bp, Homo sapiens
  misc_feature (1)...(37734): n = A,T,C or G
tgttgggttccctttgacatgctgccagtcctctgatgtggtgacataagtcttgttacctcccatcacttgggcctcaggaaattctagagtccttgccacacccagtaatggtcttataggcagccccactgtggtccctctgtctgctttgccatctcacttctcacttctcttttccctgcttaattaagtctgctgcctgagcaaaagctaacagctgtctcccttctcgccagtctcccttctttcaggtgtcccaattcctgtgagcttccctgcgcttgtcttagaggagggagcactcactttccctttgcatgaggaaggaggaaaaagccatgggccttccctgaggctgttgactcactgcctcatttcccacaactctctctgacatctccttccaggacaggttaaaaatgggagagggaatcattggggtcatgttgaggagtggcatgacaggttcttttcctatgaataagcccaaggagatgactggctctttttagaatatggattgtgcaagatgtatcttttttctcagagctggattctagtggccaattctgaggccacaagaaaatttccactcaacatcctattagggatgattctgaggtttgggggctgcacaaatagagtatcatttactaagatgggagaacactgcaggtacgaacagtttagaggtaggaatcatgagttctgttttagatattttaagattgagatgaggattaggcaactagtgaggatgtgagtttggacctgacaggagaggtcagtgccagaaacacacttttgcaactcatgagagtacagagaacaccagcatatatgaatagatggaggagaaaaggaaggtcgaagactgtcctggggtactccaaattcaaaggctaggaaaaggaaaaggagaacccagcaatggagactgagaaggaaccagcacctatgagctaatgaagtagcaccactgtctggggtacacacctggggctcgttgtctcacgccaaggaaatcaaggacaccaacacaagaagtcagtttaggagcggaggtttaaaaggcaaaagaaagagaaagaacagctctgcctcttgcgagagagaggggcacccaaatcagacttccagtccacagctgagtgcaccagattttatagacaggcttgaggaggcggtgtctgatttacatagggcccacagattggttggaccagatgtgacatttacataatatgtggggaagctggctgccccaccctaatcttactatgcaaatggggtcttcacctggccattgtcatgttttctcctccttactgtacacgtggtttgtcaaaaagaagggaagatggggccgtcattctgatcatgcctagtcccaagtcgccttttcctattgacccaactgctggcattcacccatgcaggcttccagctttcttgtctctgtctgcagcttgattttacaggctactctgcgttagaaaagaaaatgatttggggactgcttttcattaaaaggaaaaccttaccctatctgcctaaataatttctttttaacttctatatcagtaagagggaaatcactggaaaccaagtaaaaaaaaagagggtttgaaaaataaggaaatgaccagctgtgtcgaatgctgttgagaggttgagtaagatgaagactgaccactgatcatttaatatatcaagatggggatcactggtgacaataagaagagtggtttcagtggaatagtagggacaaaagcctgaccggcataagtagaagagagaatgaagatgatgaagtggaaacactgcacatagataactattgaattttgatttaaaggggtgcagagaaaaatgaaacaataactggagaagaatgtgggggatcaaagaaatgttttttctttaagatggaacatattgtgcatgttttatgctgatgcaaatttacagaggaaaaaatttatgatggaggagagaaaataacatgagtaaaattgcaattataattaaggtcaaaattataataaagtcataattatgatgatctttataaaataaaagtaaaaagcactatattgtgtaggactcttggttgcaagtgacagaaattcaatttaaactagttgaaaaaaaactagttgagttaaaaaaaggaaagaagttrttgacacaaatatcaatgggaagaatacagaatgggtcatagaactaggggagaagcctcaaaaactagggatttaacagtgaccaagctctcctcattcatctttcatgtctgtttctgcttttctttgcatgttgttctcattctatcatagttcaaatgtgcctcttccacctggtcagtgagtttggtcacattttcccaaagcaacagaaaatctcccccaacagcactagccagtgagtccttggagggatgctgagtggttggctgggctcatgtgtccatcccagaactcatcagttagactgggggaatgagcattctttggccaggtgttggtcacatatgcagccactggctgactagtgcttacacacttttcttcccttattattttttaaagtgccccttaatgacaaaatgcaactcttctgtatataatccatgcattgcttcccaaagaaagacaacccaaagtcactggcattcaccttcaagtctggtacctgttgatgtatattcctttggtgcaggtgtggtccaaatatatttaaatatattaaataatacatgtaaaaacctccaacacacacaatatccaatgttagagggaaagacaactacaatgagacctcccactgatccatggcatagtcatgtcctgcgctgcagggacaggaaggcctcactccttgagagaaaattgccagtctggttatggtaagctctgcacaccagaaggaacaaaggtaagggtttgtcttcccttccctgcactgttattggagccagtgaggggtatgagaactgcctcagagattgtgccatttaggcccaaagttctctgacaacacaactcccttaccaggcagtccactctgtttcctgggaaccctgtgattggtgaggaatcctgatgagggaaagggtgcagacctggcctagctaagggggtgtttcctggagacacagggggagacattacacagagggcacagcctgtcatgtgtgcttttcagcaaaactccgttaaaaaaaaacaaactttttttttttttattccctcaatccacctgcccaagggcaactgtccagggcgtcctctttgctacatgccaggtaatgaatttatccacaaattgtgcaaacaagacgtattgttccctggctgcttgtacttttgtctctctcttcacccttttaaataatgctttgcctttgttccttgaatcttctctttcatgtatataagtaagctatctacttgcaataactaactctttctgaagtattattttttgagacaggctcttgctctgtttcccaggctggagtgcagtggcacaatcatggctcaccacagcctcctgggctcatgtgatcctcctgcctcagcctccagagtagctgggactacaggtgtgtgctaccatgcctggctaatttttttgatttttttataaaaatgagatcttgcttcgttgtccaggctggtctcaaacttatgagctcaagcaatcctcccacctctgcttcccaaagtgctgggattagaggtgtgagccaccacgcccaacttaagtattattttgacactagtgaaaactttaaaaagttcccacactcctaggaaaaatttacagccaggatacaagatcaaccaccagaaatgattttaaatctacttaatccgtcaacaactcacctctgcaagcatgattctggaagccaacccagcagcgaaaaccccttgcttgtgaaagcaaaccacctgggaatggactgcttcaatgaacacaccactgagtgccaatctactaaagtctcactcaagtaactacagttcttcagctgacatcaacctactctgccagtcaccaaactccatgcttctgcagagctgtattaagatcagttccctgatctgcttagagagactgggcctggtcagcatagctctcccttatatacctaagcaataaattcagctttattttttgtttattgtgatggtctgaattgtgttctcctgaaattaatatgttgaagttttaactcctagtacctcagaatgagactgtatttggggatgagcttgttaaagaggtggttaaggtaaaacgaggtcatgtcagtgggccctgatccaatatgattgatgatgtccttataagaagaggagattaggacacagatgcacacagagaaaagactatgtgaagacaggaagaagacgaccatctgctatagcaggacgagccacagacaaaactccttagataccgggttaaagaaggaaggagctttattcagctgggagcttctgcagacttgcatctcaaaagccgagctccctgggagagaaattcctgccccctttaagggcttacaactctaaggtggtctacgtgaaagggttgtgatcgattgagcaagcatggggtatgggacttgggctgcatgcaccggtaatcaagacagagcagaacagaacagaacagaaaatttcacaatgcttcttcacacaatgcctggaatctatggataatacaagcagttaggtcaggggttgatttttaactaccaggctggaggtgctgcagtgggctgtctgactattgatcttatttttgcctttctgtaacttttgaattctctttctttttctgaggtatgagacaaggagagggggtggtcttcaagtcaaggagggggacctcagaggaaaccagccctgtcagcaccttgaccttgaacttctagactccagcactgtgagaaaataaatttctgttgtttaagccatccagtctgtgatattttgttatggcggccctagaaaattaatatattaatgtttattttggatattgaggtctctagacactagaaatcaacatcaaaattcttaccaaatgaaggtaatgaccctggactctgcctgagcacttctgtctccaagtaacaggcctcagtgctgtgcttgggctcctggcccacaggttagtggttttcacctggacctcaggttggttgcagaggcaggccacatccttagggtaggggatttacctatgggggcacaaatacattccttaacatttctcgtaagctaattttagtgggtctctgccatttgcgattgagagtaccgactgattgagacattggtacccagaagtagagtgctagaaatgaaatatcctaaaatgtgaactactgtgtcaaggtggagtaggaggcagtgaggctctctccatctccctccatccctgggtgggaagtgggcagtctttatgatatggtaatgaagcagctcattaagatgttattgtagtttctttgggattcagacctgtacatactaaggtagaagcttcagggaatccagcagaacaaaattaggctgctctggtgtgagaggcagtattatatggtggttcaagagcaaagactgaaattagactacctaggttcaaagaccctgtctcctagctgtgtgacctagggcaagttacttaatcacaattaagcttcctcatcagggaaatgggaattaaaatagtacctaattaactggattattgtgaagattaagggatttaatatatataaagcacttagaataggcctggcaattagaaagcatatggacaggttaactcttgttgtcttggttacttcttgtggctcctgtcaagatcctactagaaagagataagccttggtcttagatagctgggaacagcatacggctttgttaaaagagatcacgctcctcactgctctcatgccccatctcagcagacagcaatccaagactgcttagggttcggaattacaaaamcaaattccctgctaaggctaaagttgatctgaacaaaagtaagggcaaggcaaagagaatagacattagacagggacctgaaaggatccagaaatgggactttacatcccacagaggaaacaggtaaggtgtttccatacagtgacagagaatagatcagtggctgcctagggaaggggtggaggatgggtggatttcaaagggtcaccccttttgggggtgattgaaatgtttaccttgattgtggtgatggtttcacaggtgtatatatttgacaaactcatcaagttgtataccttaaatatgtgcagtttcttgtactcgaattatactttagtaaaggtataaacaagagagagcaagaggtagaagctgcaatagcttctgtgacctatccttgggagtcacacactcatcatttctgcagcattctgctggttacagtgatcaaccctgatacaacctgggagggaaatacatggtggtttgcacacaggaggtgagcattgttggatccatctgggggatttytggccatccctctatgtggagagaacagtatgtacaaggccttgaggtgggctggtattccagaaagccttaactgattaactctactcacctctgctgaaaagttgactgttacttggtgcaatggttttttttttttttttttttttttttttggtttcttttgtttgtttgttttgtttttttaagacagggtcttgctctgttgcccaggctggagtgcagtgacaccatcagtctcggctcactgcaacttctgccttccaggcagtctcaagcaatcctcccacttcagcctcggtgcaatgtatgttaacatatcatctgtcacatcttccaaaatttgagtcccaggttctccaaaacttcaatgggttagttagactaaccactttcaatgcctaagtgttctaatatgtcaagttctcctctgaccttatgctttggtttatgaagagtgaaattatgaggagtgtcagcatgtttgcaagccaatgggatggagtatgatttaagaagcaagaaagaattttgtttttcttaaatctgagaccataaatttctgttcactctgcttatctccaaggctggtcctggctggagaggggagaaaaaagagaaggagaggaaaaagcattgatcagttttagaattttaagaaaatatttgcatattttaagaaatttaacctaatttttttaactttttactttaaaatgattatagattcacaggaagttgcaaagatggaacagacgtgtactctgtaccccgttctccccactagtaaattttacataattttagaacaataacagaaccagggaattggtattggcaaaatccacagacctcgttcaaatttcaccagctttgcatgtactcatgtgtgcatgagtgtttgaagttctagattagaataacaaccaccactactaaatcatggacaagatatataaagggaagtttgaaacagagcatttaagggagagagaatgagagctataaactgcttatgtttaagagacccaagatactgtggaaattggctaatctaaacaaaatatcaatgcactgatatggggaactgcatgtggtgaacagtgcagtgagatattcctattgagggatcccatgagattactaaaggtaagaaagtaagttatattttcttataaataagactctaggtaagaccttgtctgcctgaagaatatcagaaaactagaccatgacctgaacgcttgtagctggggtacagccaggcaggtgtaagccagagcttgtggagggaggctgctaatagattgcagagctcctctccaccgtggccaggttgcaggatttctgagtaagggtgctgtgagcttttggggcagggcaattctttgttgggtatgtctttacatagtgcccagatckttagcactctgatgacaccctggctagctggcactatggccactgttcatccaacacatttccaaaagcatctaagggatgtgaaaacatcctcaatcaaaaaccacaaaccccttattgttcttgaggaagaatattccctccctagattcctcagtccctgtttccactcacagtttccactcactctttttttcccccgcctagggactgccgatcttggaggatctggatttttaaagttatttttgtataatgcttttgttatggaagatggcaattgcttacgcacaactgccttcatcttagctgmcctgaatgggccttagctgccmtgaatgggccttagctgccatgaatgggcctgaccccagaccatcaaaagtgaccattactaaaaggagggaaggcagggtaccattctattacatctggaattaaaaatgaaggttaccagttatagaaaagactttyggactttattcaaagcattttaataatacttagagaagattgatttattaaatgctagcaactctcattttaacattaacttccgaacttcaaggaggttttaaaaaattgaattttaatttttaatttttgtgggtacacagtaggtgtatatatttatggagtacatgagatactttgatacaggcatacaatgtgtaataatcacatcatggtaaatggggtatccaccccctcaagcatttatcctttatgttacaaacaatccaattatactcttctggttgttttaaaacatacaactaaattattattgactataggcaccccattgcactatcaaatactaggtcttattcattctttctattttttgtatccgttaaccatctccacgtcccccccaaccctcccactactcttctcagcctctggtaactatccttctactctctatcaaggaggtttaaatttcaaggaaaggagaattcaatcaacgtgggcttattgcttctcatgtcaacactaagctatgtattccagactcttcaaaagaagcatcagatttgctactttatttcaaggattctaaagttccattggaacaatactatattaaccctgaaaataattaaaaaacaatttcagatatagttcagaagtaattgtgaaaagaggtgagattagggaaagatgactctgagtccagataaccccaaaaagctttttagagaaggatgagggtggggaggcaggtagggggtttataataggatttaaaaagagaaggaagagctatttaaggaaatttgattactgcaagtaacattcttcaaaacatttaaagaaaaacaaaagtttggcaggcaagactagaaaaagaaaacaacactggggagggaagtcactgcttcttttatttccatgactgttttaaagtcatatttagtttcagccaaggaagagcctttgacatcagagcacacaaagtactctaggaaatgaagaggatgaaagttctactgcatcaacgcccagaactttctccatttggccacaggtcgttctcatacatggcctagtttctatgcactctaactgggtccctctgaggcttgtgaatggaaaaccctcttgctttcaaatgcttgaaaacaagaaagatgctactattgatgcctcaaatacatgtaggtatttagtgggaagcaattaaatgttttgaaggtcatttcaaacggaaattaatcaaaaacagtattttactcttttgtgtattagagtaggcaagaccttggtgttttcattacattctctgtttttatttgctgtttacattaggatgtgaataatggcttgggtaaggggaggatttggtaccaacctaggctttggttgccaaacagacaccagagtaaatttgtgtgtggtcagaatcaggttgtaaggtgccaacacagcacatggcttcagtctttttttctctaattgtaaaaggaccttgtccccatggagggaccattgccttggcttgtggggtcttgagtgatagccacagtctttcttcagcactttctcgacctcatgaaaagatactgaagcttgaaaaggggatgttctttctgaataggaatggagaagaggggccaagcaagaatgattctatctgtctcctggccgttgatagtgtccctgtacagagaggaaataacgtagtataatatgtagcttatgtttgaatcagcttctttaaaaatactggaattttatttatttatttttggtagacacagggtttcctcatgttgcccaggctggtctcggacacttgaattcaagcaatctgccggccccgccgggtgtgscgcatgagggcgcgggccgcccaaggaccgcgagtggggccgcgagtgctgagcccggcgcgcccgagccgctcctcctcccggcctgctccctgggcggagccggggcagtgcggctctgggctggccgaaggggtggcgctgcgatcccgcagggcagcgacgcgactctggtgcgggccgtcttcttccccccgagctgggcgtgcgcggccgcaatgaactgggagctgctgctgtggctgctggtgctgtgcgcgctgctcctgctcttggtgcagctgctgcgcttcctgagggctgacggcgacctgacgctactatgggccgagtggcagggacgacgcccaggtgaggaccggccaaagcctctcccgagtgggaggccgggctcggagctgccgaggcgtgtccgggtctccgggggttctgcagtgatcccgggtcctttgtgggttgcgtggagcttcccgaaggcccggctgccccttacgcaggggctgcgggttggggaggaagaggcgagggctaaaaagcccctttgtcttctgtactggtcggaagatggcatggacttgccattcaggctaggaaacctctccagggagtgccaaactgttaagagagcactggagtcggcggtgctcctgaggactctgacatcttacgcaggactcaagggattctggtgttgtctcagaggacgatactttgagaaacagtgagcgtccccctgcgtttgtaagggaaactcctttgtaagtaccggaagcccggtcgttctactacctgaagtagtctgtcctccacttcccactcctgcagttttgaaataaaatctgagataatccgaagtccttcacctacttactcattctagtcaaacactagaaagaactaaaaatggcagtttgctggagcgagatcattattggcatactgcctatctcactttatctgtgtcttgcttaatatttgacatcgtgtacatttgctgtatgttggctcagcgctttacacacataacatttaacttttacaacaactcttacaaggtaggcattattaatcttattttccagatagggaaactgatgttcagagaaattaaatgacctaccgaaagctaggctttggatccttaaggacttggggaaatggggtttccctggaccaagtttctggtataaaaatactcaaagcatgttacaaagtttgcttggaagagatagtagctcgaaagatagactatgtttggggggggcgttatgggttgggcgttgaggggggtgatattgatcccaaggtgagaattggttcctgtggacaaaaaaaaaaaaaaaaaaaaatctggtaatacagtggtttgtgcccctccaaagcttaaccccacccgagaaaatattattccttagtatttcatttttctggttggrttttcttgggtatagcatgtgcagcactgacattgagttcacgaaaaatacacaacatggacgccacagcagtgctacaaaactatggcaagtgattgggctttctccttttaaagcaggaatcccaaatactgcacaacttcattaaccaagggctttctcttgatcgattgttccacctcagcgggggaatatgtgtgcctattggctgccattggctgccttgcagacgttgtttgtgtttgatctttagtgcttttgtgttcacttggacttggagaattaaacgaaaatagattatattttattatttaatcctacaaaaaatattcaacccatcaaattatgtcaagtgctaaaaagcaaaattattgacaacatctgaatgaatatctctaagctactaagttaaaagttattttctcatattaaggaaaagttaaaagttaagatcattgaaaattttaagaaattcatttaatattttcagttgtgttttgtcggaaaagaacagtttgaaggattttaaatttaattacattgttatcattatgtagttatataatttgcaaatttgcacatgtagtttgataaattgctatttatctaagtaagttacataaaagttattcagcaaaaatctggcgtggtggcatgtacctgcaatcccaactactctggaggctaaggtaggagggtcatttgagcccaggagttcaagaccagcctgggcagcatagtgagacactgtctcaaaaaccataaaaatgtttttcagcaaatacagttataaagttagaagttaataacttttaaattttaatttaacatttaacttaattttaaaatttagtcatatgcttatttagtcatatgcttattaactaaggagtaagctttttttctttttctttttttttttgagacagagtctcgctctgttggccaggctggagtgcagtggtatgatcttggctcactgcaacctctatctcctgggttcaagtgattctcctgcttcagcctccctagtagctgggattacaggtgygtgccaccacgcatgggtaagttttgtatttttagtagacctggggtttcgccatgttggccaggctagtctcaaacccctgacctcaggtgatccaccccgctctgcctcccaaagtgttgggattacaggcattagccactgcgcctggcaggagtaaactttatagaactccttttatgtataaagcacagatatatgtacagtacataaatgatatacagtatatctgtggaattaacatttcacaggagagttttaggggaaaaaaaagtctaaaaagactcctggtggaggtagggagtgagaaagaagaaaagattaaaggaaaattgaaatagactcagattcccaaaacagctcagactggagagatgggcagactctatcaagatgaaaaaagaaaaaaaaatccttcttgacttctctgtaggtttattattttttgtcacttaaaaaaatagcacactcacataatacaaaagtaaaaatacaaaaagatatatagtaaaaagtaaagagctttctctgacccttgtgccctagctacctagtgtgcttctctcgaggcagccaccatttcctgcctcctctgtatccgtctrgagaaattctgtgcatttccaagcatatatctcacatggtgatttttttttttttttaatagagagacaaggtcttgctttgtcacccagcctggagtgcagtggcatgatcatagctcactgcagcctcgaactcctgggctcaggcaatcctcccacctcagcctccccagtagctaggactacaggtgcaaaccaccacacctggatatttttaaactttttgtagaaacaggctctcactatgttccaggctggtcttgaactcctggcctcaagtgatccttccaccttggcctctcaaagtgctaggataacagatgtgaactgccaagcccagccacatatggtgaaatttaagggtgactaattttagacattaaaatggtccagaaaaatccatggcacaagtctagaggaggaaaaatttcaacagcagcacatgtgagcaaaactcaggtttttgttaacagtaacctcaataggagtcaactgtgaagtggctgccagaaaagatcaggcaaccttgggttgcatttgtagacytcagtgtctgaagcaacaactgcaaacaacagatgtctcctgactagctgcttgtatgtgccggcctctgtgctggggcactggggacactgcagtgactgaatcasccacagtccaggccctcatagaccctaccttctgggggacaagggaagtgatttttgacatctcatcctgctctgcactgtccagaccctaccgaatcctgtgtcctgccctagccagctccctttaataaagaggaacattaaccaactagaattggtgcaggtgggtgtgagcagaagagtgaggaaacctgataccatgtcatgtgagggaaggtggcagaaattggataggtttatttagccttagagaaggtaagagatgaaaggacttagggaagacataatggctgtcttccctaacagctgtgagggattgtcatttagaagacaggtttcatttcttttcttttcttcctgaaacagctttttgtaaaacaagaaagcagaattgcaacacaatttaaatgtctgtctaggtcacaaaagggatgcaaaatgtttgtaatatgattagtatgtattcatatagtgagtcattcttacacctatacataagattattccatgattaaaggtagcccagctctaataaccataagctatattagtggatcccttttcctattataacattttagtattacttctgatattgattcccttaacaaatggagtctacaaactgaattttaaaaaattgttaaaagtgactaaaactctgtaaacagaggagttgagtttacaaaaaattctgggagaacaagcaggataaaactgagcaagattatcaataagtgtacatctgaaactcccatttttcacagttctgatactaatacattcttaaggaattttgcaaaagttaatctgctgagtagaaatataccttgagaccaaactctttgtaactgttctcttccagatgtggtacataagattagtcaaagttggccagatgcggtagctcacgcctgtaatcccagcactttgggaggctgaggtgggcaaatcgctagagctcacaagttcgagaccagcctaggcaacatggcaaaacctcatatctacaaaaaaatacacacaaaaaaattagccgggcatgatggtacacgcctgtagtcccagctacttgggaggctgaggtgggaggttggcttgagcctgagccgtggaggttgcagggagccaagatcatgccactgcactccagcttgggtgacagagccaggccttgtcccctccccccgtccccccgccaaaaaacaggttagtcgagcttaatctactctcatatatttcccaaaagatctactctgtgccagagataacaaaaatctggagtgaaaatatttggagttggttactagtattttcccaagtacttttccatcctatttctattttcccttaagcttttctattttaaacacacacgaccataatttatatcttttcagatacaaagtaggtaattttgtaaaaaaaaaaaaaaaaaagaagttttttttttgttttttgttttttgagatagagtctcactttgttgcccaggctggagtgcaggctcactgcaaaccccacctcctagaggttcaagcaattctccctgcctcagcctcccaagtagctgggattacaggcacccaccaccacgcccagctaatttttgtatttttagtagagatggggtttcgccatgttggccaggctgggcttgaactcctgatctcaggtgatcctcctgcctcggcctcccaaagtgctgggattacaggcgtgagccactgtacctggccraaaagaagtttttgacaacaaaaaattatcttcccagattgacaattcagtttcaatgaaaaatcttcatttttatagtctctttttgttttcaattgattaaagagaaaccagcaattctatcttagtattaaatatcacaaatgagaagctctagctgagaaaatgtcttcatttggttaagttttgacaattaaagttcaggttactctcagagatgattaagtattaaaattgcttttacaaatatgaaaccagtttttccctgggggaggggagataggaaggaagaagccagtggagaaggggcccaagaagatggatagggtacatgaatctgtgcagtcagtacctgattggggtcactttttcacagcatgatggttattttcttgtatatcttactaagcctataataaaagacagggctaaacccacaaatcagagcaaatttgataaaacattcatcttaagtttcataaatatgtgctattctaaattaagtttccaatacatttgcacattctcatagactaacataatacacaaacttatggaagtttcctgttatgctatgaatgttgcctacatctgacattagcttcataaatattcaatgaaaccacaaacaaaggtactatcacttttgaaatctgtccaacatataaagaaaggtcagcagcaattccataaaacagaagggcttcaattctgtattttcttttgctttttgtgtcagttgtttgaaaaacactagaagcygacatgaaattttctgtgtattgtctaagaaacttggttttctgattttagcttgagattttcttccgtaaccgcatctcctctgacagggagatcttgaagtgtatgttggggttccaacacttgattaataagctgtgtttttccctccaattccaaatgattttcagcatcaactgcatccatgtcaatatttgtcgtcttgggtaacaaacttttgggccttggatacaaaatccttgatgaatgtttgaggtgctgggagaggaagggatggggaggatgcctcaggctggacacttggacccaccgacaccagaagtttgatttcttctttgtcaaaccacaaggcaggattactgcccactgctactggttgatagcatttaaaagcttatcatatcagtataaaaaagatccctggaatgattagactttcccaaaaaaggagctgaagccttcagagataattagcttcctcatcctgtgagggaattagagatgggtcaagggcttgagaagagaattctcaaactggagtgggggttgaactatcactttcctttcaactcttaagaatctactttcaggggctcttaaagggaggccattatgtataccagattctgtggaatcgggaaacaaacggtgctaaataaaaaagtttcttcagggtgggaggaagaggccagaattgtgattgtattaaaagtttacaccatcagctttaaatatttgcttatgtgtgtaaatatcaagaggtctttgttagctcgacactagttagtaaatcctgtgtttctaaaacaaatgatattcactctagagtgtgatgattgcagaacttgggaacaacaagtagtcaatgaatgaataaatgattatctgaatagatgttatgttgttcttgataaagtcctataggaaggtggcccaattgtgccttttcacaaaagtacrttatatgacaggaaagcattgtagcccagacatagtatttgggatgtttccatccttagttgagattttttttttttttttttttttttccgacagagtctcactctgtcacccatgctggagtgcagtggagcaatcttggctcactgcaacctctgcctcccaggttcaagcaattcttgcacctcagcctcctgagtagttggggttacaacgatgcgccaccacacctggctaatttttgtatttttcatagagaacaggttccatcatgttggccaggctggtctcgaactcctggcctcaagtgatctgcccgccttggcctcccaaagtgctgggattacagatgtgagccaccgtacctggccttagttgagatatttacatggaacctttttcttaaggacaagtggtattttcttgaatgtctaagaaacagttgggttttaaaatattgatcatatgtaaatgtgtatatcatgaaatagtggacagtgtgggctttggagctagatatacctgggcttatatcccggctctgccagggttcttgggtgttkattcagtagttatttatggagccttttcaatattccagtctttgctaagcactgaggccacagcaatgaacaaggtagacagggtcctacccttaatggaatctatggtctagtgggacaaattaatctctgtaaacctcagttaccttttctgtaaaactgagataataatacctttccatacagtkctggtgaggcttttagtagacaatgtgctaagtacataggaagtaatgtaaaaaygttaagccattagaattggtaactctgttttcctggctggagaagttaggagacatacgttattaagtgactgttctatgttttgctgtagtaaagtccatctgttaaaaaacttgagcaataattataattgacgtttattaaacactgagtatgtactagatactgccctgagtgctttccatgttttaactcatttctcaacaatcctgtgaaggatgtgttcttattcatcacatttccagttgtggaaaattaaggcaccaagttctcacctgggagcatttcagtgctgtgtgtgatggagctggcatttgaaccctggcagtctccagggatggtactgttaacatcacagttaggatttagagctgtttaaaacagtacaatcatttcctgattttaacttttctgatctaaaatcggaaatgtgatgttaagtgatacgatatttgatatttttgataaataacatatattttagtaaataagkcacccaggaactttgcataacagtgactttacgggttcagagagacagtgaatatcatctcctgmagtgctaataagtttttcattggagaaaagaataaaccatttgtcattgctttagtactgtaacatttgtagtcttttaagaggaacataattggagaagcagagtacaatatttcatctctctgtaatatgcatttgttcttgggtgaattactatattctcctaagatgaaagctcaggcatctggggaacatttttacaaaatgaccttgagctgataggcatcaggcattattggcaaatggggaaaatactactttaaaaatctaggatgtttccatcaacagcacagaacttggtatatttagattcttcatcaacctccattgcaaaatattagaataatagaattaaaaactggatgtgaccttcagccatcatctaatctgaatgcctcatttaatggctaaggaaaagtgagtccagacagtgatttttgtatttacttagcctgtttatcttatctatcatatttatcttacctgtttgtgttaaatagagccttagagtgaaaccatgaggttataaggcttaccttgaagtaaagtctggaaaagtcatgaaggttctgtaatatacaaatactgtgttgataactgttactagtatgatttgyattaatgcttttttttttttttagttaagaaggagatgctttcttagaatatttcaaattttaactctatacatcatgccttcatatttagtggtattgtttaaggctttyttttttttttctaatcttggatttatgagcgtaattcattgcttattttcttccttccatttacattccttccatagaatgggagctgactgatatggtggtgtgggtgactggagcctcgagtggaattggtgaggagctggcttaccagttgtctaaactaggagtttctcttgtgctgtcagccagaagrgtgcatgagctggaaagggtgaaaagaagatgcctaggtaagcggatctgaaatagcagcggtgcttcctagaaataaatcagtccaaactcaaatacagttttgggacttttagagaggagtgagatttccccccggctccaaatgttctacatgcttcatctcagttcctctcctttttgccttaattggctgccctcgcctttttcttcttttctgccacctttctatgctttttttgcactgactcttggcattagggagtgaccaacaattatataaaatgctggtggatttttagtgaccaagtatcttagatttttgtcttagagaaaaaacagttgggttcttatccatgacatacatgtatctgatcatagaaattaggaagaatccttactcattttattaaagtatcagatattaaaatcatatgggataaracttattatataggataaaagaacaggaatggaattagctttaaaaaatacaacttgaggtaatactttcatattcacataaagggcaacagtgttaatatttttgtttgaattttggtgtagttatgtttacttttttctttttgagatgaagtctcactttgttgcccaggctggagtacaatggtgtgatcttggctcattgcaacttccgcctcacaggttcaagygattcttgtacctcagcctcctgagtagctggggccacagacgtgcaccaccacacccagctaatttttgtatttttaatggagacggggtttcaccatgttggccatgctggtctcgacctcctgacctcaggtgatctgcctgcctcggcctcccaaaatgctgggattacaggtgtgagccaccgcacccagccattatgttcacattgaaagcaacttcaagtataaagttattatttttcatggaacatttattaatagtacctaaactgagataattttgaattttccaacagaccattttttgggccatctctctacctgtcattcttttaaatctttaactttgctgatcgagctaaccacccagaaatgagagttagttgccacagtagtgctcagcagggcaacaggcctctttcatgatactgctttcaaaggcctcttgtgtttttgcactgggccacttcttttgatagttgttcctctactgctgtgacttgcaagtcctgtactggtggagtagatgaaccaggtcagcatttcttacctggcacaaggctgtttccttttatcttgcagatctgtagtgcccactttttcatttaatacagttgatgtttcacgcttaactcttttgcccatgaagtctttttacctcttctattttctatacttgcttgtttttcttactgatgttacttgtatttcaaggttagagtccaggaaaattagtttcagttgttcttttgatgaacagaaagccaatcacaaagcagcagcatgtttcttggttgggaatttcaggcatgtgtccttttccctgtttacctccaggaatccttagcctctggagagaagcttctatatgtcatttgactgtaggactctgagcttcttactgattttaagcacaagtagttgttttgtgtgtagaagagcaactcatctttgtgagcctatcacaaaacaaaggtacctctgtacttctaaagaaattgctctaaaatatttgctcttttctagtttgtagtataatcttgatttctatcagaaatcaaattgtaaagttagactgcatattcaagttgccattctacttcctgtgaggccagccagctttttgtctgatataaccactagtcctcttcctgaccaccgagaggaactttcacagggccacccagaaatgagtttgttgccaagtcctgttgcagkgtgggtgttagtgggagtagcaaggagcttgactgaactatggcatgacttccacacaaatttttgtctttatttagagaatggcaatttaaaagaaaaagatatacttgttttgcccyttgacctgaccgacactggttcccatgaagyggctaccaaagctgttctccaggagtttggtagagtaagtagcatcttatattgatatagtcttgctttgaagtaactgcagaagagattcccatccgtggtgctgtcatacaaagggctttaggcaagtggggtccatgcagtgagatcgggcccatgagttgggccccttaatctctgagcctttgtcattatggaattagtacttttcatgtcttaacaagtacaaattcctccatgtagaacaaaagaagctaaaaattcacggctgcttttatttatttatttatgtattttgagacaaagtcttgctctgtcgcccaggctggagtgcagtggtgtgatatcggttcactgcaatctccgcctcccaggtttaagggattctcctgcctcagcctcctgagtagctgggattacaggcatgcaccatcacgcccagctaatttttrtattttttagtagagatggggtttcaccatgttggtcaggctggtcttgaactcctgacctcatggtccaccctcctcagcctcccaaagtgcagggattacaggctactgtgcccagctggctgcttttatttattttaatgacaattattaactttcacaaaaagtcacctaaaacgggaatttaattccacaggtaaattcagggytttattttatctttttaattgctgacttctggaaatataccattgttccattgattctttaagttaacaaaataaccaaccatccataggaattccatcaatctatccacaagacatcccccaaacaccccttttctgattttatttaactagatcgacattctggtcaacaatggtggaatgtcccagcgttctctgtgcatggataccagcttkgatgtctacagaaagctaatagakcttaactacttagggacggtgtccttgacaaaatgtgttctgcctcacatgatcgagaggaagcaaggaaagattgttactgtgaatagcatcctgggtatcatatctgtacctctttccattggatactgtgctagcaagcatgctctccgggtaaggctgctcaaactcaactctgatagaactgacttaaatgtgtatatgggggatatggccatcactgtgtgaggtccttggaactggaagtgatgtggggagacagagagacccaaggagacttttggtagaggacacccccagtagatgctaaaaaagacttgatccacacatgcctctaacttgttgaacaaataaatatgtatcaagcactgcattgtgccatgtactacaacagaccctggggatataaagataataagatgtggtctctgccctcaaaaagtgtatcatctakttaacatgttactcttcaccttatccttattcctactamatcttcatggaaaattgggggtccacttctcctttcttctacatacacttcaggatgtactttttcctccccatttctgtgacttcttttccttgccccttgtagttggtgtttattttgcctggtctaattatataygcatgtcagaaataggtacttcccacaggatgattagtcctggtctcatatccttactgggaaaaatmttgactgtattctctctggtttcattggaagaagaaaatctagtcaaggcagaggcaaggagagaagcttgatttggactgcataacttacgatgtataaatattagaaatggatgaatttttaatggtggcttaagactggatataaagaaattataaggccaataggaaaagaatgattaaggaagacacaaaatttatatttaaagctgttgaagtcagtttaagtagaatgtttcactgttggaatcatgagatgcaatagctacatggtcatcatggtttcatgaaaatttgargctttggttctttaggacatcttttttctgctgcaaagtgcagacaattgcagacagtgatgaagcrgaatgctatactgatgatttcctcatatttagtaacaggcatcagtcacttcctgtggagcagttgggcaagcctcaggcaggcagatgagggagggcggccacccatctgtttggcaccacgtgtctcataagatatgcyggatgctttcagtaaacacagatgagctgtctggcctgccctccaagactcattattttattactggatttgatcctatgataaaatgtggcaggttgagactgtagttaccaggaagctctttttgaagagcacatttccttctcagattctcagtaaactacagaattaacttgtttatcattgaaaagtttacacacaatactagatgtgatttcaaacaaggagaggttttagtgtttgatatattggcttgcttggtgtcctctctcctcttttgctacagagaggcagaaggttaaagttatgggagttttccattcaattagcaagcttttttttttttttkgggttcatctctgagtctggcactgtattggtctctgatcataaaccctcatagcccctctgtttgttggggtcagcatttcagagctgataactgtttaacatttttggatcatatacaatgtactgtgggttagctgtttaggcttttcaatagataacccagccttataacaatgtagtcttggaacatttcctaatttaggaagagatgagaggcagtagatttctgtttactccccattggtttagaaatggtcagtatctttttaagtctagaaggtctagtctgttttacacaagtcattcagtaggcaatcatattacatttttaattagccacataccctcttattacccaaaaagataaatgtttgctaaaatgaattaatactgttaaaatagaaatataaatggaaaaagttgaattcattctttctgatactttctgtgaagtactaatcccatcttcctcacctttgccccaaaaatttgcactttagactactttggggaataaatagaaacctgacctcagtgattctcagtggaggacatayaccccttttggagtggggagaggaggactggtatgaagagcatatatcagaatctwyagggatagttctttttacctatccagtgcatgcctaccataaaaatcattgatgggaagacccctcactatcaaagggggtgaaccatttatacctggaaagagctgagaatgtctgttctagattgcctccagtctactgttaaaagtgccttatacactattcacaatagcaaagacttggaaccaactcaaatgtccatcaatgatggactggattaagaaaatgtggcacatatacaccatggaatactatgcatccataaaaaaggatgagttcatgtcctttgtaggggcatggatgaasctagaaaccatcattctcagcaaactattgcaaggacaaaaaaccaaacactgcatgttctcactcataggtgggaattgaacaatgagaacacytggacacaggaaggggaacatcacacagtggggcctgtcwtggggtggggggagtggggacggatagcattaggagatatgcctaatgtaaatgaccagttaatgggtgcagcacaccaacgtggcacatgtatacatatgtaacaaacctgcatgttgtgcacatgtaccctagaacttaaaatataataataaaaaaaagtgcctaataagcttgcatgattacactacctgtcctttactcacacattttagaacatattttgataaatcatgagatatgtgtctgtatttatttgcctttttcctttttttttttttttgyctgttagggtttttttaatggccttcraacagaacttgccacatacccaggtataatagtttctaacatttgcccaggacctgtgcaatcaaatattgtggagaattccctagctggagaagtcacaaaggtaaaaatttctagttgggaataatttgaatgtttactagttatatattggcattatatattggtgttgtatcactgtatatcatagtttttgccttagaagtgcttttatgtgaattattcacaaaactcctsccattatgaaaattgtttatggaatttcatttgctaaatgcattgtcttaatagtttgatttttattacaaaagtgataattgtcattaagcacattagggtgatgcaattctaattaaaagcaaagaatcttcatcttttagttarcctgcactatattatctagtaagcatatggtttctgttaggctttttgaaatattacaaatagtttataaactcccattagtacctatggagactcctaaggggcatgaagctccactaaaggaaccactcaactagacggcatttgagtcctttctagcttaaagttatgtgaaatcgcttggataaattcacttaatttttaacttttcttagactataggcaataatggagaccagtcccacaaratgacaaccagtcgttgtgtgcggctgatgttaatcagcatggccaatgatttgaaagaagtttggatctcagaacaacctttcttgttagtaacatatttgtggcaatacatgccaacctgggcctggtggataaccaacaagatggggaagaaaaggattgagaactttaagagtggtgtggtaagaccaatttctaagtttcttaatantatgtaccaatcttgcaggaaggtacagaattttccagtgtttaaaaaactttctggctgggtgcagtggctcatgtctgtaatcccagcactttgggaggccaaggcagatcacttgaggccagganttcaagaccaacctggccaacatagtgaaaccccatctctactaaaaatacaaaaagtagctgggcatggtggtgcatgcctgtaatcccagctactcgggaggctgaggcatgagaattgcttgaaccgaggaggcggaggttgcagtgagccaggatggtgccactgcactccagcccgggtgatagagngagactctatttcaaaatcaaaaaacctttctaaccctccaccaatctcatgatataaagaaaaataaataaaaaatattttatccccatgcatatmttttggttkactataaattattactagtcttggagagagaagtttcttacaaggtaaaatcaaatcaaagattgccatgtttttcttctatacatattgtttgaccagtgtgtgtgtcaaaatgctctttccctactgtttctccccaccaactcctacccatcctaccagtctcaactcccatgtcacctccttggaatggtacctggccttccctcccacttctccccaggaccaagtgcacctcagcccctatgctttcctgtcaaagcacttactgtgttgttaaaacagatgcatgcagttttacctcattcccgaagtactcagcacatctaagatgtgcctattcccctgtctaaggaaatatgctgattatcattctttcagcactcattctttatagcaaytagtcagggaatactattaaccatttctgagaaattgtgaccctcaaaagaatttaatttatagmcagtacaggaaatgtaatgaagtaaaccaaaaattatagatgattatgcagcaaaagattattgctgaggatggtttttactgttagcctttgatatactttgttaccaccttcttttagaaattaatcaatggggattgacagataaaaaaagaattataaaacaagatcatactatatatacctgcaaaaatttaagcaatccactaattgttagacatttaatttattccaactctttgcaggacagtgaaaatgaattagggggtaaaaagttacaaacacaacaaaatgcttaagagacataaaaggttatcagactgggtcatgacacactaaaatgtccagagtgtgaaaaatcaaaaaggagcttttcgttttctaccaagtagtaatgtggaacagtttgctttgggccagatcccttatgagtgttttggtattgttgggacttggtagtgtgggtagaagctctaaaggtagagtttcatcaaagagtatacctgagttttaaatatggaggacagctgatgcagtagctttgtgcccagtgatggaaagagttgagagggacaggccaccttactacagaggaagcacagcctcctggcagagcatgcagcctggtgctaggctacctgggttcaaatcccagctctgccccatgcccttaaagcaagttacttctctatcactcagtctccccatctattaatataagatggagattaatgatgataatagtgcccagtcacaggattgttatgggaattacatgaatttaatatatgaaaagcacttaaaacacaacttggagtgttctaagtgttagctattgtgctttttcccccttctcagcttgagttagatatagcaggatattcagcttccttaatgatcaaagattttctttataattgacacataaaaattatatatatttaaggtatacattgtgatgatctaatatacastgtaaaatgattaccacaatcaagctaattaatacatgtcacccagttacctttttktgtgtgtggtgagaacacttaaaatcttcttagcaaatttcaaatatgctatacagtattattaactgtagtcaccatgckgtatattagatccttagaatctgtaarttataataacataagttatttatcttataactgaaaatatctaccattttttttctttgagacagggtctcgccctgtcacccaggctggagtctgcagtggcgtgatcatggctcactsccatctctacctcccaggctcaagcaatcctcccaccccagcctcctgagtagctgagactataggcgcacaccaccatgcctggctaggttttgtagtttttgtagagacgggtttttgccacgttgcccaggctagtctcaaactcctgggctcaggcgatccacctaccttggcctcccaaagtgttgggatcataggtgtgagccactgtgcctggccaaaatgtgtaccttttgaccaagatctccccatttcctccatcttctggctcctggcaaccatcattctactctgcttttgagtatgactttttagattccacakaagtgaaatcacatagtacttgtttttctgtatcttgcttatatcacttagcattaacgtccattcattatccatgttttcacaaatgccaggagttccattgttttatggctgaaaaatattccattgtggaataatattccatatatatatatayacacacagacacacacacacattttctttatccattcattcactaatggacacttaggttgtttccatatcttggctattatgaataatgctaaaatgaacatgggagtgtaggtatcacttcaaggtactgatttcacttcctttagatttatacccttaagtggaattgctggatcagatggtaattctatttttaattttttgaggaatttccgtattttccataatgtctgtactggttcacattctcaatttaaataatagggcagagaaagaatatattatagaagtgatttttttttcaaaggggaaagagggaccagggactagagaatttcagtcccactgtagtagtacttccagaaatgtccatatgaaggatattttgttttgtttagagaatatctaactgtaaaatataaacatcatttagcaaatctcrcattttttttacatctaggtttttctaaaaaaatgacagcctttttcttcctaccaccatctttgaaatattgcttattatatagtcttactactttgtcactctttattataagctgggcattctgtcatttctcaaagcaatttttaggacataatacctcattctttatagtctgtactcttcctctctcccaytattttatattttatatatatgtatatatataaattttcttattgataagcrtctaagttaagaaaatgctagcatagcttatttcaagctaatagtacttgttaactagaatttgcttctttagtctgtatgtctggaactttgtttttatgaatctttattatttttagggatcaagaacagtggctacactgaattttgtattatcattattattattttgtctttcttagtgcaaagttttgaaagtggtaaatgcatatcttctgaaaagaaacatcacatcttggggattatcaggttgccttgttttattccttaagcaatatacaaaaagttcacaaataatttttttttctttttattttttttgagacagagtttccctcttgttggccaggctggagtgcaatggcgcagtctcagctcactgcaacctccgcctcctggattcaagcaattctcttgcctcagcctcccgggtagctgggattacaggtgcacaccaccacacccagctaatttttgtatttttagtagagatggggttttgccaggctggtctctaactcctgacctcaggtgatctgcccacctcggcctcccaaagtgctgggattacaggcatgagccacagtgcctgccyggccacaaataattttaaagagttatcttccatatatctcaattctacataatctgactcattgtttttatttattagggcaagtcagtgtaggtatgatatgctgatccagaaaagtcattatagagaatttagcattgcagtccaatgctatttatacctcctctaaaccagagatgatgctaaactcattagaagtacttttgtgtacatctanaattttggctatgatttttaaattctaatttaagcagtttctgaacttttgtaaagattcttaatagtgaatcataatgatacagctcctcaaaacagaaggacttaaatgttaaaaactggagtaaataggagtaggtactgatccatgtttctgtccctcttttacaggatgcagactcttcttattttaaaatctttaagacaaaacatgactgaaaagagcayctgtacttttcaagccactggagggaraaatggaaaacatgaaaacagcaatcttcttatgcttctgaataatcaaagactaatttgtgrttttactttttaatagatatgactttgcttccaacatggaatgaaataaaaaatwartaataaaagattgccatgaatcttgcaaaaaaggtattaactcatactatattcttggataaaataaccttttaaaatactttagcacatatgcttaaaatctaagttaacagatttgtcttagtccatttgtgytgctataacaaaataccacagatttggtaatttataaacaacagaaatctgtttttcctggctcttgaggctgggaattccaagaccaatgcaccagcagaattagtgtctggtgaaggctgatctctgcttccaagatggcacctcattgctgcatcctccacagtggaggaatgtatgtcctcacatggtggaagggacagaagggaaagaggagcaaaatgctttcaaaagagcatttaatctcattcattactcagtcacctcttaaaggccacatcctttaatactgttgctttggggattaagtttcgacatgaattttggaggggacaaaaacatccaaaccatagcaacataaatgtatagaatatttcacacaaagcagagtgctgggtaatgaccagatataaagaagtatttgaaatgaccttacctccaagatgcttatactcttagaaaagttgacaggtacagatggctgtaatttgaagcagcaggtaggattcattgcacctattattcattaaacacctgttgtatgtcttctactgtactggagtgcttagtattagttaattaactcattcctcataacagcccactaagatagatggtattacctaccttgatagatgaagaaagaccaacaaggttttacttttccaaggtcaaggtcacaaagctagtaaggggtaaagccatgattagattcagctcaggaagattccactggcaactccttacttctactattattaattttactttaacatttaacaccttacagcagaaaacatgcacaggcactaataggaaatcagcaggagtaacaggtaaagaaaaacatggtccttatctacaagcagttcacaattgagctggagccaaagtaacatacataaaataactgtagaatagttgttgggcaagttggaagccacccaagtggctgtccttggaaaagggggaagatgacatgtggtagaggtacacgatgaggtatagcgggtagaagcaatggaataaatgcatacataacaacatggatatgtactagaggcatagtcataagtgaagaaataaagaagcaacgctaacacaatactgttcacatacacaaatatatgtgcacagaagatagtgctcattttgcaagaaaacatacaacctaattagatatatatttaggtatggtaatagttacttaggatggggaggaaacggggtgaactatggggataaaatataataaagagaggactcttgcgtgaccagtgatgaaaactggaataacaacattatttattgaatacaacacaccaattataagaatgaaaagattggaataattctagaatgccacaaaataacatatgtcatgtggcctggtacagactataagcataatagttcagaaaagggagatttgcagatagaatcatgtggaagcccttcctgatgaaggtgtcacttgcactgggccttgaaagaaaggaatttagacagatgaagagaagcttcaggaggccaggttccaggtcagttttgttttattcatcactgaatctccagtgcctgcctagcattgtgcctgctgatgtctgttcaactactccagccaatgartggtagaagaggtatatataaattaaaatctttaaagattcatctgtatggcatttttttctttctttctttctttcttttggagatggagtcttactgtgtcgcccaggctagagtacagtggcactatctcagttcaccgcaatctctgcctcctgggttcaagcgatcctcctgcctcaacctcccaagtagctgggactacaggtgtgcaccaccatgcccggctaagttttgtatttttagtagagacgggggtttcaccatgttggccaggctggtctcaaactcctgacctcaaatgatccacccgccctggcctcccaaagtgccaccgctcccggcctgtgtatggtatttttctatggcatgtaattttctgtacacaccctctttctttcttaggcttttttgtcagcagcccaagatggaaaaggcagctttatgtcaaggttcgccaaagacagtcaagagctgtgaaagccaaatgttcacatttaactttttttaaagtatttattactcggcatcaatgtatttcttaatcattatcctgagtggacttttaagtaggaagaaaatggtgtgttcattactccaaagctgaaacacagttggggttgtgtaaggtgacagcaggtgagttggtaaaagagttagcagaagtgacggctttcgtttcctcaactactggattcaccagtaagccacatgagacctcagtcacaatcggtaattcaaaggtagatttaaatataaatatcctgttatttctgacacctttactgaggtataattgatgtatgataaactgcatatatttaaagtgtacaatttgttaagttttgccatatggctacacttgtgaaccataaccacaatcaagagagtaaacacatatatcagccccagaagtttccctttgcccttttgtaatcatttcccctcgcccaccccattccaggcaaccaatgatgtgcttgcattattatagattagtttgcattttatagttttacataaatgtaattatacattttgtacacataaactgctggcgggaatgtcaaaaggtacaattaacttgaaaaagacttttagcagttccttaaaaatttaaatatacacttatcatatgatttagccatcccagtcctaggtatttgcccaagagaaatgaaagcttatgtccacataaagacttgtaaatgaatgctcatagcagctttacataatagcccaaaactggaaccaacaaatgtccatcaacaggtgaatggtataaacaaactgttatattctataccatgcagcactactcagcgataaaaaataatgaatgattgatacataaaacaacatggaagaacctcaaagaagccagggcatctgggtctggagatttcttttatcaggagattttaaattatgaatttaattctttaatggttataggatattcagattatttcatcttggttgagttttaatagtttgtggttttcaagaatcagattatttcttctaagttgtcatgtgtataagccgaaagttacagtatttcctcattatctttttaatgactgcctgatttatagtgatactcttcatttcattcttgataataatgatttgtgttttttctttttgtcagtctttctacaggtttatggattttcttgattgttttttgaagaaccagttttttgtttatgtatttttctatttgcagtttcattgatttctgcttttggttatttcctttcttttgcctgctttgggcttattttgctattctttttcttgtttcttgtggtgggaacttaggttattgtgctgagacctttcctcatttctaatatgctatcttcctaggtattccctgggatgtaggagacagctcttggagacacatggggttggctatctggcttttggagagactttgtctaccacaagaatagagtaaaagcagactctttcaggaagggaagaggatggctgcctctttcatctttataagtagggaaaattaattttccctgtcccttgcctatgcagtatttggccacttacatagccaaaatcccatgagtttcttatcaggttgctctgggggatatggacgagtgcaaaggtgggcaggtgcacttgtttaccctgagtaataagaaatctatctctgactctgaacatcttatgtgcatactcaagataagaaaaataaagatgaatattaaaaagcaaactttttatgagtggatactggtttatcaaatactttttctggatctactgaaatattatttttctcctttcattctgttaatgtgttgaatcatattgattgatttgcaactatcacaccaacctcactttttcaggaagaaacccaacttgattgtgattattctgtgtgtgtaggggtgtgtgtgtgtgtgtgtatgtgtgtagtttagtttgctagtattttgtttgggatttttgcattgatgttggggggaatgaaataggtccctttctcataaagtttttgccaggttttggtatctaggttttctggcatcataaaatgagttggggagggttcctgcatttctactgctctttgtaagaatttaagattgtctttccattgacgaatcaatccatctaggcttgttgtttcactatggaaaagcaaataaagtaactataggttccacttctttagcagatagggaactactcgaattttctattttttcatttgtcaattttggctcttccatagtttaaagaatttattcacttcatctaaaatttccaactaattggcatgaagttgtgcacatattttgtcagatgactctaggatttgtaatatcctttcattcctgatattggttgtttgtgtttcttcctttttcagtctaccagacacttatcaattatcttttcaaagaatcaacttttggcttagttgatccactttatcttcattttctactccattaattcttgttctttattatttcctttattttcttcaggtttaatttgctattcttagaatattttaactactaggttcattttcaatcttttttttttaatgtgcgtttaagactataaatttccttctaagcatggctttaggcgtctaccataagttttgacatgtagcactttcactactcagttcaaatatattctaattttcattgtaatttattgtctgatccatgagttatttaaaagtgtatttcttaatttatgaacttaatagaatttttctatttttgaaattattattgatttctaagtgaatgatacatggccaaagaatatattccattcctatgacttggaatatggtcagttttgataaatattctatctgcatttgaaaataatgtgtattttgcagttgttgggtattctgtttcatatatgccaattaggttaagttttaaagtattattccaatctttacatatttacgtatttttgcatggctgctgttctgttactgagtatattaaaatctgggaatgcagacttgtcttttctcattttagttctgttcatttctgcttatatatttgaggctatattgttaaatcattaaaatattagacctgttgaaactttctggtgaatcaaatcttttatcattacaaattgtctctctttgtaatacttttcaccttaaggtctacattgaataatgttgcaatagccaccatagtcccctgccctatcgtttttgttttttgtatttcatattataatttttccattcttgtttacttcaaacctttgtattcctatacttaagacatctcttgcataaaggtactttgtgggttttctttcttttcactttgatgatctttgcatttaattggtacactgtctattcatatgaatgttgtaactgatatttaaacctcctaatctactgtttgatttctatttgtcctatttgttctatattttctctacctttttgccttattattccactttagccctgtattagctttgtagttctacgattgttttattttgctttttgctgttcttttagtggttaccctatagatgacacagcagtcttatttatactttaatcttctttctgataattctgaccttagaattcctgcaccaaatttgtatattattgtcacattttaacattatttattttaacctcgaagactattttatatagttaatattcacttaaactgtatatatatatttttaaattactgttcattcctacctttatctctaacctttttctgggatctttttccttctgtctgaagaataccctttactatcacctttaatgacaatctgctattaaatttgttgcgtttgaaagtgtctttgccttcattcttaagaattgtttttggggaaaggctgggtattgaattctaaaattgcagatattttctttcagtaacctgaaaatatcatgccattgatttctgcttcccatattttctgttgagaagttagctgtcagtttaataaaattgtgcctcctttaaaagtaatgtcttttatcattgtctggctcctttaatgattttctttttgtgttttattttttcttaggatgtgctaagttgtaattttgtttttatttatcatgctttgatcttgcaggtcttcatgtcttaaaaacttggagaattctcagtcattatctcctcacaggttgcttctgccatattctctcttctcctggaaatccagttacgtgtatgttagatcttctcaagttaactctatgtctcttatactctctactatattttctattcttttgtctcttagtttttcacatctggtatttacttctgacataacttctagttcactaattcttacttcactgtatgcactttctatcaaatct

SEQ ID NO: 94910 - DNA, 48490 bp, Homo sapiens
  misc_feature (1)...(48490): n = A,T,C or G
gcaccctccttgcagctcggaggcaccaacacaaaagccagggagaggaggagagagggaggagagtggacgagccgcgagccttctgcctgtgtgcgccctcggaccggatgctctggcgaaggaccctaccgcgctgctccagccgccgccgcgcctcggcccacaccctcccctgcctgcattcccgggacggacccgagggaagaagcctcaggaggaaagagacggggtggggacagcggcacacgccaccccgggatagacttctttctccttgcccccgtttatgttataggtttcgggctccccacccccactggctcgagcgcacggggtcagcgggcagggagcacagctggggaggacaaagagctgcaccttaagacatcactggatcacttcggcctccctggagcaacgcaactctgcggggatggggtgggggcggaggcacctctttcacctcgggagcagcgggcagctgagccgcgccttcccggtccccgctaccccgtcccctctacccccaccctctacccgacccgcgccttgggataaagggatgctctgtcttaatgagtgagcaggtgcactcgcgggccccaggcagcctgggaggccgctgccaagacacgcagtgggttgtccggggcctgtacagctgagaggagggagccagcgggcacgcgtgtgcgtgtgtagggggtgtaactgtttctgttacagacttgccagatgtaggggggcgcgtaccaggcgccaacatccccttatcacaccacgcgcacccatcctctgaatgttcaggagagcggctcctattggctgccgcagtcggttgtgtttggctggccaatggggaaggcccgccgcgggagaggrccacacagaggctaggagaagggggggaagctagtggtggcagttccagcaaaaggggactttgtttacggggctagccattactggcccaggtggaggatcttgggacaatggcataagctccacagtgccttccattcccaagccctccatataaccataagtccctccagaacgctggagtttcagagggagttgggaatccctaggagggttcacctccccctgcagctgaatgtagaacaaagtggttgggtctaatttgccagaagcctagattatgcttggaagatgataaatgaacacaacctccttacagtattagggggctgctgcccaaagcttactaatcatcacacacatcttggtcaagaccagtattccttctccctaaagtcattcgcgggttcagaatttgtttgaaatcgactttactgggggtacaatttacatacgataaagtgcacccatttgtttmttttaagactttacctctccccctacatatttcataagctaaggtaacactgacacatgtcactagcactgactcgtgagttattgctaatgccatcaaggtcagggattcaaacagcacagttgagctgccatcttatttgggaggttgagctgcaggaagagacaaacatgaccaaatccatttctgctgagagaaaaacaattcagtgcatcagtgatatacctgaaagcaaattggaatgtgactactcaaggacgtccaagttactcagaatggcatcttccagttaataagtttattagctgagctagcagatatatttacagctaacccttttatcatatatgtgggtcgcccatttctaaaacccyacattatactactcagcattaaaactacccagataaggatttcctcttagttggctaatccaaaatcatccttatgaataccaattttcattgtattatgtatcaatcatcattgtacagtatttttggttttgattagtctgatgcctagtttgctggatcgttcccctctgtattggaagttaatgcccctgatgatctttatctacagaatagctttaaggtggagaggggtaactattaattaggtacatcctgtacacaaagtagaaaggggctttgccctttgccaattcacagctagaattaatgctaacttcctgagagatattaaaaaaacatatgtacataataagattatttcaatgtaagcttctagcaaaaacttgtcactgagtctacttttgtaaggaagaaactttgatttctgaaaatatgatatctcaaaatgggcttcttgccctaataaaaggtgtctgttacttctgtggggtgagactttgggggatttccacttatattttttggaattaattcaatgagtatatattgcttttgaaaaaagataaaaatataatttttaattaaaaggacaggaaaactaccttattgtacctattgtaaaaaaattaaatgtactgtacaatgccctttgtgttaattgtgcattattaaattactttcaaatacatgcagttgttttcataggtacctgattatcatgattttgacagtgttttccagtctcttttgccatcagatataattaactttgtatttaatcaatccatgattattggtttttacaaatatcaataaaaatcaatgcaaggctgttaaaatgttaagtaaatataaataatttttaccttactttggaattgatactttttttttttttttttgagatggagtctcgctctgtcacccgggctggagtgcagtgacacaatctcggctcactgcaagctccgcctcccaggttcacgccattctcctgcctcagcctcccaagtagctgggactacaggcgcccgccaccacgcctggctaatttttttgtatttttagtagagacggggtttcactgtgttagccaggctggtctcgatctccggacctcgtgatccgcccgccttggcctcccaaagtgctgagattacaggcatgagccaccgtgcccggcctggaattgatactttcaatatttatcccctggcctaaagtgatccaccctcctcggcctcccaaagtgctgggattacaggcatgagccacagagcctgaccatattttcaatatttatccaaaggagctctagataaaatgtcacccattgcctgcacttctgaacactgatctactctgcttaatgggtaagggagccctggatcatcttcaccacataatgactacttcctaggcctggcacagtggctcacacgtgtaatcccaacactttgagaggctgaggcagcaggattgcttgagcccaggagttcaagaccagcctgggcaacgtaatgagactgtctcttaaagaaaaccaaaaaacaaaactacttcctgggttaaacttcacagaagggtgtctttgtaggccgggcgaggtggctcatgcctgtaatccaagcactttgggaggccgaggcgggcgatcacctgagatcaggagttcaagaccagcctggacaacattgtggaaccccgtctctactaaaaatagaaaaattagcagggcgcggtggcatctgcctgtaatcccagctactcgggaggctgaggcaggagaattgcttgaacctgggaggcagaagttgcagtgagccgagatactgccactgcactccagcctgggtgacaaagggagactccgtctcaagaaaaaaaaaaaaaaaaaaagagtatctttgtaatttctttctttttcttttttgaaatagggtctcgctctgtcatccaggctggagtgcacgggagcaatcactgctcactgcagtctcgatctcctaggctcaagtgatcctcccatctcagcctcctgagtagctggaaccacaggcacataccaccacgcctggctaatttaaaaaaaaaatggtagagatgatgtctcattatgtgctcaggctggtctggaactcctggcctcaagcaatcttcccactcgtcctcccaaagtactggcattacaggcatgagccactgcacccggccctgtaatttcattctctatccccattccaccaaaaaaaaaaaaaaagtaacttcattacctccaaagttagggcccaactcttgccagttcaaatctggccccccaccatacttgcctgtctttatcactacttctttatttttttctttttggagacagagtcttgctccatcatccaggctggagtgcagtggcacaatcttggctcactgcagcctccacctggcaggttcaagcgagtctcctgcctcagtctccctagtagctgggattacaggcgcatgccatggcgcccggctaatttttggattttttgtagagacggggtttcaccatgttggccagactggtcttaaactcctgacctaaagtgattcacccgcctaggcctcccaaagtgctgggattacaggcatgagccacggagcctgaccacatcaatacttcttagtatgtactctctatcattgtcccccgaaaatgtgctgggttttggttttttaaaacagttccaagccttttcatttaacaaacagcatggtgcttcctctaagacactttacaaatattagctcatttagtcttccgaacaccctcctgagatttgtagatgaggaaaatgaggcacaattaagtgacttgcccaggtggcagagccaggattcaatgtgggttggtctggatccaaggtcaacatgtttaacaatgaaaaatgttatctttggtccgaaagtattcaccatctgaaatatcaatccttttcctccactgtttgaattttactactcatccttcaagacacaactcaaataacttcttacacgaagttctaccatagtgattccatcccatagtcttctctcttgctctgtccggcactacgccagatattatttcaatgaccggtatatgtcatctccccaactagacagtggccacttcctatatagatgctatgtccaaataaacccattgtaaactgaaaatatcgttaagtcgaaactgcatttaataccctgataaacccatcataaagtcaaaaaaccgtaagttgaaccatgcttaagtccagatgctcctcgactgacatggggttaggtctcattaaacccatcataaagtcgaaaaattgtaagtcgaaccattgtgaggggtaagtcggggaccatccgtacttttcatacccaacagagccccttttatagtacaatccaagaggtaagtgctcaataaatacttgttaaatgaatatgtaagctgaatctttgaaacaggcacattgtatgttctgcatgcagccaaaacattatttccaatttagcttatatctggcagagtcaaaacacttatttacactcagcccctcaccctactcccataactgaaagttctgcttagcagacttctcttcccagaaagtccgagaagcacgaacgctttttgctaacatcctgctcccaagcacagaaaccacagcaggagactgtgtgtatctgtagcacctggtatacagcatctaggacacacaactgaactaataaataaaggtgacaggcgggaagaagagcgcagaattacttgtccaggaaacgggttgggtgggaaagagccggcaactggtaaaagatggaagtacacgccggatctgggaagccaggttccgcgcctcggactcatggaaaaactggatctggatcactgcaaaagaatcaggaaggcttcggtatcaagtaactggtgtcctaaaaccaaaaaacaaagtgcgatgccggggctacgctgttgtgagatgctgttatcagttctcgtcaccaacacagcggcagcaccaggcacaaccgccaatcaaagcggccccacgagtccctccttgaacaggttccttaactcgttcagtccaacactgtgccacaaactcgcgaaaaccggctacctagagccagcgtctttgcgagcttgcggccagctagtgcatgcgcaaatcctctcgccgtgcggaccaatcgcaatgcggcagcgagtgctacgcctgcgcagtaggcctccggtcgccgttccccttccccggctctagcaggccggcttctctgtccaatgcccacccggagctgggaggaggagtctgcgtaatgtgcgtgtgaagagactgggggagctggccggggctcacggtgtttgacccgtcggtcgtgcgtgagaggaaagggaaggaggaggtcccgaatagcggtcgccgaaatgttccggtgtggaggcctggcggcgggtgctttgaagcagaagctggtgcccttggtgcggaccgtgtgcgtccgaagcccgaggcagaggaaccggctcycaggtgactgacccattccaggcaacctccaagtccgagggcctggcgccttaggctccctgtgccttgcagccctctacccccgcgtccccgcgagaaacttaacacatagtcacgtgaattccaaattggcagactccgaaccctgagtcttgcaagcggaggaattggctcagccatgccgacctgaccttcaagagatttgaacccagtagtcggcttgaggccttttcccgggagcgtttgctgttcagggatcccagaacaactggctgtcggcgcctccccggcatccccaccccccacccccctttttagagcaatgaggtcaagtagactttgtcatttaccgattgagactttaaacaggacgtttaagccctacgcctaagtttcttgtgtaaatgagggtgttatctgctcagccttccaaaccacagatgagatccatggatttgaatgcccagtgaaacagaaacggtgcagggcaagtaaggagtcggttggttgtgtaccagacacccagagaattggcccagacttaattggagatgcctgagccgtgtacttcttggtggtctttaaggcttcaaagaaacagtttgcagaacgcattgtattttgttctccattaagttgtttcatcaaattttagagctggaagggattttgtggtaaaggtcaacccactcattttatagataataaactgaggcacagagaggtgaaattacttgccaaaggtcacatagttaattaataggtagagctaaggatagtttgctagcctccaggtccttaatcccttcgctgcaactccatactgcttcctaaagttgacctcaaaaagttaagaatgaattcgggtctcttcccagtaattagcccattgtacatcagatatccgtgaatttatctgagcatggcttgagcctgcttcttttcgtactgcgttacttcatgggggcaatgaatgatccacctgtaggagttgctttgaaaaaaaaatcagtaatccttcaatgtccacccctagggcatttgcaatgtcagaagttatccttgaggcttttacaatacagaaacacctgggtgctttaaaaataaaaagtggaaaatattttccttgggttgttagggtctttgcaaatgtgcatttgaacagtttttccagttgctatgcacaatgaaaatgtttcctgataggtgtatttgagttatgtcctgggacatactgctcttggaacttaaaacctctgcttagcttttaaactaatgccttatcaatggatgtcatctttgagggttttgtgtattgaaatgatggtgctctgtgcttgttgcacagaaattgagataacctgaattttttttttttttttttgarayggartctcgctttgtcgcccaggctkgagwgcagtggcgsgatctyggctcactgcaatctccgcctcccggattcacgccattcttctgcctcagcctccagagtagctgggactacaggcaccygccamcacgcccggctaattttttttttttttttttgtatttttagtagagacaaggtttcaccatgttaaccaggatggtctcgatctcctgacctcgtgatccgcccacctcggcctcccaaagcgctgggattacaggcgtgagccacygcgcccggcgataacctgaattttttcatccacactggcctttcaaactttgagtagttgttttgcttaagtctcacaacttttaccagcattctaaagtctgaccaaaagttctcatcaattaaatatgcatttgcaaagttaagttgatttattagacattggaaagtggttggtgttgttagaactactgaaaaatacagactcaaatggttttttccactgcatgtctttgtttgaaggcagtctactgtagaatatattcggacttcctgacatatccatccatctctttgcatacacttgttctttgtcctttggccgtgcaccaaagtatgacatcatctgcctttaaaaatgggtgagggtagtgttaaattttcaaaaagaagttctgatactctcattttaggaattaactctgttttgtggcttgattcctaactgcttttaatctgatttctttttcatgtagtagcatctaccgtgtgtttttgcacaggtgggaaagagcaaggttcgtttatacaccatttctccctccaccttacctttaaacttttttttttttttttttttgagrcggagtctcgctcagtttcccagagtgcagtggcacgatcttggctcactgcaacctctgcctgctgggttcaagcaattctcctgcgtcagcctcccaagtagytgggactacaggcatgcaccaccacgccgggctaattttttgtatttttmgtagagayggggtttcaccatgctrgccaggctggtctcraacycctgaccttktgatccacctgcttcagcctcccaaacctttaaactttaaacctgccttgcaactatctcgttgacatctgtcaccattgtcaggttcatttccattatatgttgcattctgccttaaaaccatgatagctactatttgtttatttactttatttatttggatgctctgcctccttccagagatgattgaaggtaactcatagtcatcactctatgtctgcattcagacacagaggagcagataggttagataatagacattttctgttctataatattttgtttggtcaccaaacagtgctgcccatgttatcaaactgatcaccgactccctgactttaggttcaaatgtttgaacrtttttctctatttggaatccttctcacctctttaaaaaggaaactgagctccttgtgggcaaggatcctggcttcctggacactgccaaatgtgacttcgttttgaagcctaaaagatgagtcttcccccgttgtttctgctgagacaaggctttgcagaagaaattctttggcagctcagccctttctgtaaccagttaataagttacattttctagaaatgttctaactttttgagggagttactgcatgtcttagctttcttctagatcatgtttccaaaagttgcctgstcatgtgaatcgagtagagraccagttcctaaccttctccaggagataattctgggaatctgtattttaacaagccccttgacattcatatgatcagacaagtttggtatatactgttttggatgagtagtgactcttccccttctgttttgctgacgtaaggattaaaaaaccaaactgagcaatctggagtctcttgtgatttgtatcaagctcattttctcatattcagaatagtagcagccattctcctaaattaaacactacctgaggacatggattatgtcctatttatttttgtgtccttagcatcttgtaccatctctggcacatggtaaattctcgtgactgaaccctagtacagcattgtgaaggacttaactttgcagaagagagattttattttgttatctaaataatttttccttgtgtgtctttcatcagaatggttcacgctgtactatagttattactactctgtttcttctaaaattccagcaagggttgatattaaaaaattaaaaaaggctgatagctaggcgtggtggctcacgcctgtaatcccagcactttggtatgccaaggtgggcagatcacttgaggttggaagttcaagaccagcctgaccaacakggagaaaccccgtctctactaaaaatcaaaaattagccaagcgtggtggcacatgcctgtaatccctgctactcgggaggctgaggcaggagwattgcttgaacccgggaagtggaggttgcggtgaaccgagatcacaccactgcactccagcctggacgacagagcgagaatctgtctcaaaaaaaaaaaaaaaaggctgataaatagttgttggatcccttgtaaagaatcatttatctacaatggacagactatctaggcttgtcctgtgtttttttkkttttttttttcttcaaacagagtcttgctctgttgcccaggctggagtgcagtgacacaatctcrgctcactgcaacctctgtctcctgggttcaagtkattctcctgcctcagcctcccragtagvtgggattrcaggcacctgccaccacgcccagctaatttttgtatttttagtggagacggggtttcactgtattggccaggctggtctcgaactcctgacctcgtgatccgcccrcctcggcctcccaaagtgctgggattacaagtgtgagccaccgcacctggctgtcctgtgttttctccatgctggaaaaatcagtttgaccctcaggaaacaagtctcaagaacgtatagatctcttaaccatttaggatccctgggtgcctcaattgtgaagttgtgtttttggaaaacgccttttgggagtatggaaaaacaggaaatcacaaaacctacagaaatgaacttgctagtttagctactattctaatgctggtctatggtgtttgaggttactcatttatgattaagcaacctaaaataaatggaatctggctaaagctttttttaaaaaaaactcttaagtttattttttcattttatttatttatttatttatttatttatttatttttaagtagagacggggtttcaccatgttggccaggctggtctcaaactcgtggtctcaagtgatccaccaacctcggcctcccaaggtgctgggattacagatgtgagccaccgcgcctgccctggctaaaatttctttgcaaagaattatttaaaatgttcagttatccgggcacgatggtgcatgcctgtagtcccagctattctggaggctaaggtggaaggatcacttgagcccaggagtttgagtctagtctgggcaacatactgataccttttcatttaaaaaaaattttaatagtaataagaatgttcagtcaatatcaatagaattaggaagaatttctatttccttccttcattaattcaacaaatatttattgagcaaacatctgtgtgtcgtctggcgctgttgcacaggtcaaactggcttcttaagaatgaaatcctaagtgtgaggaagaaattgcattgtatgtgtggtctgactgcagaaaacctaaaataagtaaactgctgccatgatgaaaagtcaaggagtaagttggcttttccatgttagtaagacaagtgaaaaggcatgtttcagtcacgatgtaatatttcctaaaattttgaagctatggggagaaaggtttgggaggaatttcatagggaaaagaaaatgtggggagggggaatgtaagcaaacaatacttagtacattttacaaaattaaagtcactttgtaggtatataaaaagttttaaaagttggtttattaatgagagtagtgtattacatttcttttcaagcagtagtttaaatattaaccagtttacttttttttaaagtcaatttacttttccagcctggacaacatggtgaaacctcgtatctacaaaaaatagaaaaattagctgggcgttggtggctcacgcctgtagtcccagctacacaggaggctgaggctggtgaatsgcttgagcccaggaagcataggttgcagtgagccgagattgtgccactgcactccagcttggggacagagtgagaccctgtctcaaaaaaaaaaagtccatttacttttaaatgcttttttcttttttttttggcarattgagacaaaagctgctgaactttcctaaatctacactgttagtattatcagtttgtgaaaagcaagcagaaggagaataaacatgagtatgatattaaaacaaatttgttataatgtctgtatttagggtcttctggaggaataaacagaattaaaaaaaagaaaaacaaaaacaaaaaaaatttatttttagtaaatgaaccaggggtagaggtggaggacaaactaaattcattgaactaaatcacatggaacttttcctaaccagtttcattttctaagctctgagagttaccactttctacttctgatggttcattatttttgtaagcttctgaaaatcaaaagcttgcccagattgagataagtttctgccccgctcacgtttttattttcatgatttgtcattatttccaaatctcaaccattttatttcatgtggtgatgaagagttctaaaagcaggtaagaagaacagtaaagaaaaatacatttccttttctaagagtgtagatctaaagtctcttatctgtaattcagaaattgaaattgtagaatgaccaaaatttaagactatcaagttttcataactcatttgccagtaaaacctgacctgaactggagagaggctactttataatctttttaaaatatcacttagcgtgattggtcatattaatatgtttaactatgaattgctgccctttaccttgctaggtgtcactatgtggtatatgccccatatacttaagaccagataattcaaagttccaaawtatacatggtccccaggatttcagatgagagaccacagatccacattgggcttgtttttacccgtctgtggcctaacgttatgaaagcaagggggaaattccttctctaatctctgcaagtatacatgggatgctactaccagtgtccattctgtttgtcttttaaagcctagacaggacagggacataagtatcagcctctagactaagcttgtccaacctgcagcccaacacaaatttgtaaactttcttaaaacattatgagatttttttgkgattttttttttttttttttttttttttttagctcatcagctatggttagtgttagtgtattttatatgtggcccaggacaattcttcttcttcccatgtggctcggggaagccaaaagataggatatacctgctctagacagatggttctcaatgtgtggtccccaccctaacagcagcagcagcaacagcagcatcccctgggaacttgttagaaatgcacattcttgagccccatcccagatctattgaatcagaacctctgggcctggggcctggccagctttgttttataaaaccttcagggcattgggatacactctcaagtttgaaaaccactgctctagatcggggtctgccaactacagccacaggccaaagccagtcagtcacctgcttttgtatgccccaggagccatgagtgggttttgcattttttttcttttttctttttctctttttttttctttgaaatggagtttcgctctcgttgcccagtctggagtgcgatggcacaatctcggctcactgcaacctccgcctcctgsgttcaagctattctcctgcctcakcctcccgagyagctgggattataggcataagccaccacgcccggctaattttttgtatttttagtagaracagggtttctccatgttggtcaggctggtctctaactcccaacctcaggtgattcaccctcctcggccttccaaagtgctggsattacaggcgtgagccactgcacctggtcttttttcttttctttttttttttttttgagacggagtmtcactctgttgccaggctsgagtgcagtggtgcgatctcrgmtcactgcaayctccgcctcccgggttcaagcgattctcctgcytcakcctsccgagtagctgggactacaagcatgccccaccacacctgcccagctaatttttaacggggtttcaccatgttggccaggatggtctcgatctcttgacctcgtgatctgcccrcctaggcctcccaaagtgctgggattacaggcgtgagccaccacgcctgacctacattttttaaacggctgaaaaaaaaaagaatttcgtgacacatgaaaattatataaaatttaaacttcagtgtccataaagttttattggaacatggccacatccattcatttatgtattgtctttggctgcttttatgcagcatcagtggaattgagtagttgcagcagacaccaaatggcccagaaagctgaaaatatttaccatctggttctttgcagaaaaaatttgctgctctaggttgatagtcaacaaacacgaggagtaatcacagaataatcagagactgagaccttcctttatctgaaaatgtcagcgtctccctagaaaaagaaatctacagaactcttatatttctatgtacaggtgctgttatgatcatcacatcattacatagctctgcatagttttacgtcaaaataacctttgtattattttggaggagtaagagtcaaggagttgctggacacttyacattttgtcattataaaaaatatttcatagtccaaaattttttagttctttgggggagagaaactcattaaaatttttttttctgattttcttctgagctttaacatttctgtattccaggacacattacctttcatgcaagattgaactgtgtcctggttagagtgttgcgttttattttgtgcaagattggaaccatctagattactccttaaatggttgttataatgtcccaggtagcccatggttaactttgtatatctacctattcagtcatctctctgtgtttacttaatttatgggaaagacatgaaggaagaggtatttgatgaactgttcgtgtttttcatgatcttttctggaagctgaaaattttctcactggacagcattaaattttactcttaaaaacttcagcaacttaagagcgttcattcagctgtctgtagtatttatatatgcagttttgatgatatttttcttgrtcatttaacggtgaatatctgtgggcaataagtcttgtacagtgcattgacatttaatcataaatatgtattaactattttatttttgtatgtgtgtgtcttaataaattatgtttcttaggcaacttgttccagcgatggcatgttcctctagaactccagatgacaagacaaatggctagctctggtgcatcagggggcaaaatcgataattctgtgttagtccttattgtgggcttatcaacagtaggagctggtgcctatgtaagtagaaaagcagcgtgtataaagaagctgccaaacagctcccattaatagactcgatagtattctgctttaaaacttttgcaactaattcccmtttctccttttggaaaaattttcaaaaagccttctcttaagtgcctgctgcctaatatcttatgggagccaattctggaatgactgaaatttaatctcatgttgattgatttctgctcttttcacttgtctttttcttctttacttgaaagccactatgttttcctagattcgagtaacccacaaaattgtacctgttttcttggatgtcacacactaacctgtgaataaagtcaaaatccattgcagctccttagcacaatatttgattttgacctatttgtcagacattttatttcctcagcttgaggttcacattaaaaaaacaacagccttcaatcaaaaatattaagtgttcctaaaaggaaagctatccctgaatcttacccaaagactaaattacagaaacagggctagtatcactgattttagaatggagtttgtttgaggtgagaaatatggtgtttaattgctatgtagtattagcaccattatatctccttaaatgaactccgatcagcttagcaggtcacagaggaattattttgtgggtgtttttttcctaacttggcagggtttactgtgactaagccgatcagtctaaagttggatcctgtaaggttgagtgaaccaacttagataacacctagtaacacccttgattgaaggaagctgtttgttttacttaagccattacaagtttaggggtttttttctacattggtaagacaatgaatttatctttgttccttggttgctagcttaaagaaagggacatgaaaattatttgaagctacctatatcctcatcccctgatgtgactcccaaacggacaagaaaagtagatagttcttgcctattgtgagtcaaatcagagtaagaaataggcgagagctgtctgataatgtggtttgatgaaatacacattctgcaatcctggagcagcatttttttctttttccttttttagcacagggtaaccaaaactgcttctctgcctttgtattgaatgtttcttcattaatacttagtactctgtttccttttgtttctctcttggccttatctttacctacagttgtgcagtctcatcacctaggatccccttctagatcactagcatctacaggtgcttctgggaaagatggcagcaacctagtgtacttcttaattgtaggagcaacagtcactggggcaggagtttattatgtaagatgcttacactaaaacatattttggggtagggtgggtgagcccatggcactaatgaaaacttgatacattagaatatagtaaaatattcacagcatgtgctttctctaggtgtttattaaagggacattgtcagtcactagagagtcctcaaatctcattcttcaaactgttgaagtcctaccagatatagctaaagccacaagtctaatgatgatcacaaatcctcatcattaactctttctttgaaacttttgccaattttataatgattttgtatgataccaaattatattgtgctttagtgctgcatatctaacaagacagtctcagagtaaatgttaaataagcaaataaaggtaatgtgaacatcatccatttttgaatcattttaggtaaaatgtaatgtttgtgttttgtgggaaacgatcaaccagactttgactatgaaaaggcattttattgaatgcttctgaggagatccaaaaagccatagaaactgcaatattctccccatccacctttccacccacagcctctatttcaaagtaaattcatttggcagtgtccctttgtaatctctaatttggtcaaactagtggctgaagcggtacaagctaacacattcatgtagattgctttctgtaatgcctctcattcgtaattcagatactaccctctgagccttactttttgcatttcatatctctcaacttttcccatcagttccaccccattcattcaaaaatagatttaaagcctttgtgttcagtatgttggtaacaatttaaacctgataaattcctggtccgtgttgctgtaccagagttggatggcctccacagagttgaccatgcaaattttcttgatgccaagctacaagacagggctggtcactgttcctttctcctgccttagaaatatctaagaagcacaagttcctctcaagtcattcatttaaatgcctcattgtactctgtgtttatccaacactggtaataataaagctaccgtattataaagtggttccaggttaaatgataagcttttgtctacctacaactgttattgaactgttatgtacagttttgttttaggttctaaattattgaaaacttgatctgaggtggcttagtttttttgtccgaaattggtattagtctcaagagaactatgaacttaaaatcagtgttcagatttgatgagatatagctgtaagttgttgaacgtttgtattagtttcttgggctgccataacaaaacaccacggactgagtggcttaaacaacagaggtttattttctcatagttctgaaggctggaaaggccaagatcaaggtcacacagggttcagtttctggtgagggctctcttcttagctttcagacagcctaccctcttgctgtgtcctcacatggttttgcggggtgggggacggagagggagaaagagtgagcaagggaactccggtgtcttccccttcctgtatgagctccagctctatctgattagggccccacccttaagacttcattcaatcattatcacctccccaatgccccattgccaaataccatcacatagtgggttaaggcttcaatataggaataggaaacattcagtccataacagtgaatagcgtttcttcgtaacttttttctgtcatttgaagaaatgttcctaacttaagtataactattactttggcaattcctgtattgggagctctttacctccctcccactttaccctccaaaaaaagggagtaaactgccgacttttttttttttttttttttttgaaacggagtctctctgtgtcgcccaggctggagtgcagtggcgcgatctcggctaactgatacgtccgcctcccgggttcatgccattttcctgcctcagcctcccgaggagtagctgggactacaggcgcctgccaccatgcccrgctaatttttttttkttttttttttttgtatttttarkagagayggggtttcacygtgttagccagaatggtctccatctcctgacctcgggtgatccacccgcctcggcctcccaaagtrctgggattacagrcgtgagccaccgtgcccagcctaaactgtcgacttttaaaaatttttaccatgatctgcagtgagaaatacatttcttttacaacccattttatgactacaaatacataaaaagaaacaaagcttcaaaaactactcttactaggtatcatacacttactctagcttctgttctcttctatttgtgtttgcgtctaatgctggttgcagcctactaaattgacttcacagcccactaatggcatgcaaccacagtttgaaaaacactgatttcaacagtgcttctgctgctcggattgtaaatatgaacttctgattcgcattgatgkgagagtttttcctctttttgctggtaactttccctaggacctgaggcagattcccaaatctcagtcctctattttttgttggtgggcagagccaaagtggcctttagaatagttaatgagatttagtatttgggccctttgctattgttaagctataggattgcattgcctcactcagaaaatgacctgtttcctttcaaatcccattaagttgaataaatgccaccatattcatctgtttagaaaagttgtcttcactaatatttttcataaatttgtagtctttcttaacctgacatgtattcatgtcattaattggaaatctgtgcaaactaggagtacagaaacccttgggggaaaggtaaagaaataaatacatttatatatatatatcagacagatcgacctcattcttgccctttccccactaaacctctagatatttcttggtctgctcttcccttcatgtgtgagccattagcaagtgtgagctgggcttaggctattttgggatattcctctcaatgaacatggcccctgtttatttctcttttcattcatgttgaccagagtaagccatctttttaggtaaaacttttcttttttttcttttcttttttcttttcttttctcttctcttctcttctcttcccttttttggaaaagctttcccctctaggttttttttgttgtgtttttgtttttgagacagagtctcrctctgtcmcccaggctggagtgcagtggtgcaatctcggctcactgcagccgccacctcaggggttcaggtggttctcgtgtctcagcctccctagtagctgggattacaggcgtgccccaccacacccaggtactttttgtatttttaatagagacgggtttgctcttttggccaggctagtctcgaactcctggcctcaagtgatctccacaacttggcctcccaaagtgctggaattataggcatcagccactgcgcctggctaaagtccctttcttaaaagaaatgtttttaagatatgagtaaatactggacttgtgtatagtatctgataccaagataaaaactcttcctgaaattaatgttaattgaattcatttattcgatacatttagtagtaaattcaaggagtaactattgtcttttcccatacagtacttaactttctacttcatttgtcacaacgttaaatgcttccaggttgaacccagctctcagggttcaggttcctcaattgcagcacattgcctgatgggctgttctggaaggaagtcatagaagtattcttagaatatgttttatggggccrggtgtggtggctcacgcatgtaatcccagcactttgggaggccaaggtgggtggatcasaaggtcaggagttcaagaccagmctggccaacatagtgaaaccccacctctactaaaaatacaaaaattagcygggcatrrtggcgtgygcctgtagtcccagctactcaggaggctgaggcagcagaatcgcttgaacccaggaggcagaggttgtagtaagccgagatcacgccactgcactccagcctgggcaacagagtgagactacatctcaaaaaaaaaaagaaaagaatatgttttatgatagttcctctgattgtctttactttctcctacaattaatctgagatttcatttgacatatgttcacctaaattcctgttttgttgaccctgtggggtacaaaagagcaaaagcattgtaggtttttcttttcttttttttttttttttttgagacagagtctcactctatcgcccaggctggagtgcagtgatgtgatctcagctcactgctgcaacctccacctcctgggttcaagcaattcccatgcctcaacctcccaagtagctgggactacaggcgtgcatcacctcacccagctaatttttgtatttttrgtagagatggggtttcaccatgttggccaggctggtctcaaactcctcacctcaggtggtctgcccacctcagcctcccaaagtgctgkgattacaggtgtgagtcaccatgcccggccaaaagcattgtaatgttaagtcattcttgcctaccttttctttaaaaagtctccaataggccgggcgcggtggctcacgcctgtaatcccagcactttgggaggccgaggcgggcagatcacgaggtcaggagatcgagaccatyccggctaaaacggtgaaaccccgtctctactaaaaayacaaaaaattagcygggcatagtggcgggcgcctgtagtcccagctacttgggaggctgaggcaggasaatggcgtgaacycgggaggcrgagcttgcagtgagccgagatccmgccactgcactccagcctgggcaacagarcragrhtscgtctcaaaaaaaaaaaaaaaaaaaaaaaaaaagtctccaataaactctggtactgtatgttaaaaaagaacaacacacaactggtcataatggtaaaattacccttttccaatttgaaaggatagagaagatagaatatttgaaatgtaacaggtgtgtttaagcaaggtgtttgaccccctagtaaatatctgtgtgtagtttttctgaatgagattccttctacctcgtgagtttaagaaaaggatagaccattgagggaatgatgggtaactctctaaaaatagaatacaggcagccatgtttctgaccactgtgtgagtacttagcaaaagccggaatgttgaccaggaaaacttatgtcccagcttcctacccgggaccctatagattgatttcacagctagtgtccagcgtagtccaaaccccgtttctgtgcttcatatatagattagccctttctagcactttattcttctagtataaaatgattttttcttttttcttaaactgtaccttcagaataaaatatggggagaattctttatagagagcctaaaaatctgaaactggaatattttcatctgcttacacatattttttccataccaagcatgtgcacacccagtattttttatttcttaagaaaacaactttgtcttagtggttttgacatagaggaactaacatcagatagacaaaagcttctcatttaattgaaagataatattacttacagtatgagctagctgtatggtgaaataaactttctccatgtttggatccgcaggcctacaagactatgaaagaggaygaaaaaagatacaatgaaagaatttcagggttagggctgacaccagaacagaaacagaaaaaggccgcgttatctggtgagtattcccttaagtcttgctatgatttgagactcacaaagggaaagttataaacagtttgggtgctgtgatttatggatgtcttgtagaagcaatggtggtatgagattgcaagcatctagaaagtatggtattaccctagaactgggagtgatttaaagcatttggctgaaatttgggtttgagaataaagctagtgataattatgattggttgtttatctgtatattaatattagtctcttggctgggcacggtggctcacgcctgtcatcccagcactttgtgaggccgagatgtgcgggtcagctgaggttaggagctcaagaccagcctggccaacatggtaaaaccccatctatactaaaaatacaaaaattagccaggcgtggtggtgcacgcctgtaatccctggtgctcgggaggctgaggcatgagaatctcttgaactgaagtggcggaggttgcagtgagccaagatcacgctgctgcactccagcttgggtgacagagcaagactctgtctaaaaaaaaaaaaaaaaaagtctcttaaaaggcaagcttagcaaggaaaactattggaaaagatggaaaagagatgaaaaccttttttttttttttttttttttttttgagatggagtttcactctttttgcccaggctggagtgcagtggcccgatctcatctcactgcaacctccgcctcctgggttcaagcaattstcccgcctcagcctctggagtagctaggattacaggtgtgtgccaccatgcctggctaattttgtatgtttagtagagacagggtttcaccatgttggycaggctggtctcaaacccctgacctcaggtgatccrcctgcttyggcctcccaaagtgctgggattacaggtgggagccaccacgcccagccgaaagctgttttttaaatgaggaaattcttctagtctgttttgttccccttttgagtctttgcagtttcgagttgctaaaggtatatttgctttcctaaagcacataccctagccatcacttccatttcacatgattcacttcaattttcagagaggactgttttaatcctttaataagccccacaactctgggtgggcaatttgttctgcttttttcaaaagcacccccttattcttgaacattgtatgataatccccaattgacctcctggattttctccctttgttgctaacrgaaggtgaaactgagcctgatattttcctggtgatcactaggaaattgatgggaagggcaaaagcctactgatgtatactttctaaatgttttagaagtaactaaatatttaagctatgtcctagtaccagttcagacctgatgaatgaatgacattggtgaaatcattctcctatttttcacttatgaaatgaaagggatacttgcttttcctctcccatcaggatgctgtgaagattgttaagattagcgtaggtcatatgttttgctagctttatgtggaggattgagayaagtgcaaggtgatttttttttaacagtggcaaagaatcatctgagacttcaagaagattcatccagtctgttctgttgctttcagcttcaraaggagaggaagttcctcaagacaaggcgccaagtcatgttcctttcctgctaattggtggaggcacagctgcttttgctgcagccagatccatccgggctcgggatcctggggccagggtaaggtgcatgtttttttgcttggcacagagggtacagtctgcaagcatttagctaatgtgaatgctttgacatttgccccttaaatgacttggctctgataagcgtcatgatttttatgtctgaaggtactgattgtatctgaagatcctgagctgccgtacatgcgacctcctctttcaaaagaactgtggttttcagatgacccaaatgtcacaaagacactgcgattcaaacagtggaatggaaaagagagaaggtgtgtttgcttatgtaaaatgagcctatcaacttcagctaagcacagagaataggttaggattttgccactgactgtgtacagtaataggagggatggcttggctgtccactagagtctactgtggtccacacttggtacagcttagagataacagtctacaaagggcaagagtcctggattctgttaccagatctaccaacagttgatggtgtaatgttggcctctgaaatactaatgctcctatttctggaacctttatgttaagcttctttaggtgaagatcaacttggcctgtattgtcacttctttttttatttttattttttgagatggagtcttgctgctctgtcaccaggctggagtgcagtrgkrcsatctcagctcactgcaacctccacctcccgrgttcaagcaattcccctgcctcagcttctcaagtagctgggattacaagcacgtaccaccacacccggctaattttttgtattttatagtagagatggggttttatcacattggccaagatggtctcgatctcctgacctcatgatccgccttcctcggcctcccaaattgctgggattacaggcgtgagccactgcccccagccatcacttctttatacttgcctagacatgtcctacaagagcagaagaaaagaaactttttaacggcactctctttgacagcctagcargcatttagaatttcaggagtagagtaggaaggctgtaaggaagagccygtgttagaatttttgcacgacagacttggagatacaggtccagaagctttttccttttgatggacaacttagatctcaattctagtaccatgttctttgggttccaattttttttctcattagtgacccctttgatacctgaccaaattttacaaacttacccttttccctcacccccactagttccattttcaaacaggatgtatactttcaattaagttagtggctaactttatatgtatacatatgcatacacacacacacacacacacacacacacacacacacacacatattttgagagacagggtctggctctgtcacccatgctggagtgcagtggccgaatcatagctcactgcagcctcaamctcctgggctcaagtgatcctcycacctcagcctcccgagtagctaggactacaggtgcgtaccaccaygtgccttttattaattaaaaaaatttttttctagagacgagatgttgctatgttgcccaatctggtctcaaactcctggcctcaagtgatcctcccaacttgggctcccaaagcactggggttatagacctgagccactgcactcagccaatattaatatattaactaattaatattaatatatcatagttgataactgcttgaggcagagtcttctcaggagctataattagttgttccattgaagagcaccattctggacaacccatttgggtggatatgtgaataccagctctttgggtgctccacttgttcttactttgaaatgaacctaaatctagagcaggatcctcagcctcagcactattgacatttggagcaggataacgctttgctgggggtggggagctgtccagtgcatcataggatgtttagcagcatccctggccattacccactggatatgagtagcatccctacccaagttattacaacccagattgtctctggacactggcaaacatcccctgggagcaaaattgccccaagttgagaaccactgatctggatacctgtatgtaagcaagtcatgaccatgatttaatagacttggagacttactttggaaaacgtcccttaaagtttctgataatggaaacagttttattaaagctacgggggaagctgataacagttccacatgcttataatattctccctctcttctccatacagcatatatttccagccaccttctttctatgtctctgctcaggacctgcctcatattgagaatggtggtgtggctgtcctcactgggaagaaggtgagctagtagaccgcttcttttgtcaggctctacgtacttgcccaccagccagtatggtgatgtgtgtttccattaccatttatgtctgtcctgccattgtagttcatcaaagaaggatcgagctgctttaggtttaataatgctgagtgtgtctttctggggaaagcactagtatcaaagcctaggttagcatgctgactcaacttgaccctaaaagctgttatctctcctatttgctcttctgcccttcctcatccttcctgttttcccacactaacttctctctgggattatcgatgagaaaagattgacaaatatgtattactcatagtaaaataatttgggcataactcagcacggaatatattgttagactttaaaaggtgagtgtctgagtaataaggtcagttattagcaggtatttgtggagtcccaggatggttttgttatattttattgttgttaatggcaggtactagagtgtgtgtgtaaactaatggcagtgttccaatagggacgcattctctgaaggagcaaagcccagagtagatgagatacacagcataagtggaaggattgtccttcgttaggaacatactcacttctcctgtaaggggacattagacagagaagatggatataggtttgttgataagccggtaatgagacatttagtgtcccctatgtgtaaacaacattcaggccctgccctctaggggctaactgtattaggcagaaacataaatacataatcataacacataggtgtgtagtaagagagatctgcgcagtatgttgtgggaaatactgggaagggtgcccagtagagtgatgacatcaggaaaggctttctggaggagaaggtcttacagaatgggcaatcttatggaatgaagaggcattcaccagactagagaagactgaagagcatccaagtaaaaaagaacagcataagcaaaagcacaagggcacaaaaaagcatgtttggtgccaggaaatagaagcagctcgatactgatagagcagttaggtacaagttaggaagtggcaagagatgaacctgagaagttatgcaaggggcctgattgtggagggctttgcgtgaaagagctttttctgcactggggagctgttgcattttaggcaattgaattttaaataatcaccattggccgtgaggaggatggatttcagtgagacaagactagagagagaccatttcagagattattgcaataatctaggcaagagatgatgagagcccaaattagaatagtagtggtatgatgatgatgaagaagaagaagaaagtaagaggtaaaatttgtatagtacctattctaatcttgtaagcacagttcttaaatgctttatgtgcaccatctcattttatcctcccaataatcttatgaggtaggtattatttccctcttacagagaaataagttgaaatttttaaaaataaataaattttaaataatttgcctaaactcacatagctagtaagtggtagagagagaatttgagcccgggtctgtctgagccacagaattggaacccagmtattctgattccagagcctaagctattaataacatcagtgtacagtgtacagtactttttttttttgagacagattctcactctgtcgcccaggctggagtacggtggcatgatctcagctcgctgcaacctctgcctcccakgttcaagcgattctcctgcctcagcctcccaagtagctgcatgcgccaccatgcctggctattttttttttttgtctttttagtagagatggggttttaccatgtaggccaggttggtctcgaactcctgacctcaggtgatccacccacctcggcttcccaaagtgctgagattacaggcatgagccatcgtgtccagccagtattacttcttgatagaaaggtgatgagaagtagggaacacacttgaggcatgcttaggagtcatgcttgatgaggcttggtggttggttaaaggtagaagatgaaggagatggaggaggcaaagatgattttctaatttctagcctgcatgtctgagtggatggcagtgtacccacagctgagaaagacattacaagaggaagagctagtttaagggggaagataaaattcagttttggaccattaagtatgaagtggaatatctgcgtgaaggtgtcttctgggcagttggacatatgactgccacgcccaggggacttgggctcagatrgagagctgagaatcatctgcatatgtgtagaagttgaaaccatgagagtaggtgaagcctcccagggagaactgatctggtgagaagaggaggaaggcaaggatagagccctggggmaccccaatttttaggaagcaggcttaagaagaacccacaaaggagactaggaaagaacttaaagagcagtatgaggaaacctgaggacaggagccaaggttgtagggagtttcaagaaaaagaatgtgatccacagtgttaccgtggcagaggaatctgggaagaaaagaaccgtaaaatgcactgtgagatttggcggttcagatacctttgggaggctgaggcaggtggatcacttgaggtctggagttmgagaccagcctggccaacatggtgaaaacacatcyctactaaaaatacaaaaattagccaggygtgrtggygcacacctgtaatcccagctactcaggaggctgargcacgagaatcgcttgaacccaggaggcggaggttgcagtgagccaagattgcatcagtgcactccagcctgggtgacagaacaagactccatttcaaaaaattaataaaataaaacagataccattgggaagttagaaaagagggtaaagcactctttcaaaagatttaaatgagaaaagagagatggcaatcggataaaagcgtgaagaggacatagaatcaaaggtgggacctattggatgggacaagcatgttaataggctggacgggggtggtggggagccctcatgcctcatgggaagctatggaagatcacatctaatggcttcatttgtttttgcaatacaatagaacataagatggttatctgagagcgaacaccgtgagggttgagtagcgggattggattgaagagggagcttaccaaggacaaatcaaaggaggctaaagaagctgcttatccatcagatctcagttcatgtcattgcctctagaaagctttacccaacccaacctgactagattgcacatgtcatatgttcccagcgctacctgcactgttcttaccacttacatcacatttgtcactcttgattattgttagtgcttgttaaattgtcttggccactaaactctgaaagcagcaaggatcactgtctcaacttgatacatagtaggtgcttaattgaatggtctcagctagtaaagagtggtgcaaagactggggccctattctctctgactccaaagctcaagctcttaaccataagaaggagtagggtgcaagggaattaaaggtactggcaaaagaacagtttgggtgttctaccattggcccaaattagttagaatggagcagctagtcaaataaacagagaaaattgaaagcaagcataggagacagactgagcgaaagctgaagggatggaaaattgtgaccaacaagtagaataattgaggtaggaggagaggtttaggagataacaagatgaggaaaagtatgagccaggttccaaggtcttcagtgaatcaggaggagtagccaggaggtggctcaaaacagtgattcgtaggaatataggactcctctgatgtccctcagaagagaatgaaagtacaagaatctggaagcagcagaccagtaacctcaagaagcttgcagaatgccaacacctcctcctggccttgtgatgtggagtgtgggggaacgaacagcctctatgtgtaagctctccttaagagagagccaagtttccgtgaaggctacaagttggagaaagcattctgtaaaaatgttgtagatgtaggagacttattaataaagtaataataagtaattccaaacagccatataagaaaggctgttccgattctccttttccacacatgggtcagggctttgggactgtcatgacttgctctaatgttgcctgccttctcattgccaatttccaacatatgactgcctaaaaaaactgggtaccagaaactgtggttcccatgattacttggatrtggtttcttaaggatcgctttaggtcaagaactcattcttcttattgggctgacaactttttttgtttttgtttttgtttgtttttgttgttgtggttttggggtttttttgttttgttttgtttttgagacagaatcttgmtctgttgcccaggctggagtgcagtggcrygatctcggctcactgcaamctctgcctcccaggttcaagcrattctcctgcctcagcctccccagtagctgggaccacaggcatatgccrccacacctggccaatttttgtatttttagtagagacggggtttcgccatgttggccaggctggtctcaaactcgtggcctcagtgatctgcctgcctcagcctcccaaagtgttgggattacaggcatgagtcactgtgcctgtcctgggctgacaacttcttattgacctggagttttggggtggtgatggaaatgttctgaaatcagatagtggtgatggtggcacaaccttgtgaatatactgaaatccacagaattccacactttaaaatggtgaatttgatgtgaattatatctcaataaaactttttcaatgctaattcatctctacctcttttgtgtatgtgtgtgactgtaccaggtagtacagctggatgtgagagacaacatggtgaaacttaatgatggctctcaaataacctatgaaaagtgcttgattgcaacaggtgagcatttctggagatggctttcttccctgatacagctcattcaagttttagagtccagccttctctatggaaggcattactacttaagaaaatggaaacccagactctctgaagtgagtgtcttctcttggtacaaaagctggctgtgtcaaagcatcctggatcaccagcccttctggatgatccttgctgttctcccggtagaggcatgaagaagttgcccttttttctctccctgcttaaccctcaccctgtgccctgtgccttgaaagtgatgtcgtttgtggcttcattgccagttgcaatcagaaaccaagagaggagacagaagcaatttatcaaacccatgtagctatgctagctggcaaatcctcatgagaaactagaagagaacatggaagccaaaagtaaggccttttggccacctaggggcagggtgtaccccttgaagacagactctcaaatctgcttctcaaaggaaactgacagaaagcctgctgtgaggcaagctgaaggcaaacaaagccttggtatcctatcctgttgttgccgccatggtgctaagtgaagagggctccacctttrtgtggtggagggagtattgtttgggctggctcctgcttgttgggctaaagggttttccttctcttatttccaggaggtactccaagaagtctgtctgccattgatagggctggagcagaggtgaagagtagaacaacgcttttcagaaaggtaattgtctgctttagtgttttccttgtgttgtttttgaagaagtagtataatcttgcagtccccaagtgcccacccgggacttgggagatccaagttctatttatggctcttctccagacttgttatctggccttgaacaagtcacttcctctctctgcacctcagatacctcactcaagggttttaagctcctagggaaaaaatggagtgtttgtattgcttgcaatagatccttctgattgctcttccatagttgttttttcctgatgtgtttgattcattggaaccccttacagcctcttggcatttttcattgcaagtgctgtgtagagacttctgagaaaaaagttaagagtacctaaataaaaagcaaggaggtgttctgcttcttaacactgtgcttataaaaactgctgtcatttttcagggataagatttgtcctgtctttttttttttttcgagactgaatctcgctctatcacccaggctggagtgcggtggtgcgatcttggctcacygcaacctccgcctcccgggttcaagcgattcttgtgcctcagccttccaagtagctagaattacaggcatgtgccaccacgaccggctaattttttttttttttgtatttttagtagggacgttttaccctgttggccaggctgtgtactgtcttttaagttcttcctagaacaaggcttgtcagcctctgcagtattggcattttgagctggataattgtagtgggggctgtcttatgccattgtagtatgttagcagcatcctggcctctgcacactaaatgctgggagcacctacttgccctgacaaccaaaaatgtcttcagatattgccagatgtcctcctggggaagatagggacaaaactgccaccaattgagaaccactgtttatagaaggaattttaccatgaagaaataaatttgcattaataacatagaagttataattgagtcactttatacaaggagaaaatttacttttgccaaagatttagaagaaactactttctagtattattatcctatgccccttttggaaattaatggactaaactgatgtgatcctgcagattggagactttagaagcttggagaagatttcacgggaagtcaaatcaattacgattatyggtgggggcttccttggtagcgaactggcctgtgctcttggcagaaagggtgagtattgaggagtgaccttgattttctttctctagtcttatatarcttttctgtgaatcccagagatgtgtttggcaggatcagtaggaagagtttaattaaggtttatttatttatttttttytgagatggagtctcgytctgtcacccaggytggagtgcagtggcgcgatctcggctcactgcaagctycgcttcccgggttcaggccattctcctgcctcagcctcccgagtagctgggactacaggcgcctgtaaccacgcctggctaattttttgtatttttagtagagatggggtttcaccgtgttagccaggactgtctcgatctcctgacctggtgatccgcccaccttggcctcccaaagtgctgggattacaggcgtgagccaccacacccagcctaattaaggtttatatagtgaaaagctaaacactgagattagttctggtgagggatcccttggtgaccaaaaagctgtcacctgagcaacttaacagcgatgcttttttttttttttttttgagatggagtttcactcttgttgcccaggctggagtgcaatggtgtgatctctgctcaccacaacctccgcctcccaggttcaagcgattctcctgtctcagcctctggagtarctgggattacasgcaygcaccamcacacctggctaattttgtatttttggtagagacagggtttctccatgttgstcaggctggtcytgaactcccaacctcaggtgatccacccacctcggccacccaaagtgctgggattataggtgtgagtcactgcacctggccaacagcaatactttctttcctttcttttcctctaccctctatgccaggactccttagaaataaaatattaaggaaagtgagttatgaagatgataagggcaatgcagactacagaattatgggtgtctttgaactgctgcttcctgtaaaatgccaaaaacttctttgggcacatgatggttcccagcttgagagatctgtgagctccagttggaatgtttcatggcaactagttttcttaatgttctttttcagatatatgaaatcagggcatcttttcaggaggatgcttcctattcagaggttgcaaagcacttatgtaagccttaggtgactgcatgggtggaagtgcacagagttcaccatctgaagcttaatctggggccagcagttctgatacctgttgtatttgcgttacaaatgaacttgagcaccgaggccctcatgcccactgtcctgtaagtgggcgctcggcctggattgcagctctgccctgtctgtagtgagggctgcctgctgctcctttacttctcttcctgtattcctaggattgacttttgcttcctgctgtaactactctgtttcttcttcccagctcgagccttgggcacagaagtgattcarctcttccccgagaaaggaaatatgggaaagatcctccccgaatacctcagcaactggaccatggaaaaagtcagacgaggtagagagactgtttctatatgctgccactctatttcctttgagtgtgacctaaggcaaacttcgcttctataggaacccccttgacataagccctatcacctggcctgtaaaatgtttccaccattctccagtcagctaagttcatctaggtgttctgaatcagatgcyccaaattcctggaagtgctgaaaatgaaccatgggtgtaggttcttgcagctctccaaaactgcctgtgtactgataattggttttaccgtggaggagaccgctggtcagctttcctacttcccatgaaagtgatagccttgtaggctcactctcaggtcttgtttgcctttacagagggggttaaggtgatgcccaatgctattgtgcaatccgttggagtcagcagtggcaagttacttatcaagctgaaagacggcaggaaggtaaggaaggaaaagatagtctgccaagaggccttccagttctccactccccttgcctcatttttactccttcatttgacaccagtagattagttttcctggcagttgccattaacctgatataattttccgaattaaccatccctccattaaaacagaatgatgagagccagagtaggctcctgtgaaccactttcccttagccccattctatctgtctcacagagttttgagtcctggctagggtggcagatttctgttcgaatgacatgggggatgtgcatgggatggggtggtggaggcttatgaaatagaacttaaaatccatttatcagaggtaagttaacccatgattttttaaagtcccaattcttaatggcatgaagggccattgttacgcctgtaggcataaatggaaactgtggtaattgactgaattatttcttttttgcctcaggtagaaactgaccacatagtggcagctgtgggcctggagcccaatgttgagttggccaagackggtggcctggaaatagactcagattttggtggcttccgggtaaatgcagagctacaagcacgctctaacatctgggtggtaagtgtgctacagcatgaccaggcataattcattctcnctagcctgtgaacaagtctgcccggtggtgtgctaaagctcatcaacagcctaaccaaatagggtcagagtgtttggaggctgagggtacagaatagaaatgtgtgaactgcttgattcagaagaccaggtatggcctcatctgcaagctagtggcagatgaaatgaacagtgtgcatgcctgcaggggtagagctcttscggttctacttattggcagcagctactggcataacccctggtgggcatgcacataagccttcagatggatctgctgttccctttgctcaaacttgaatccggaggatggaggatgaagcaatgttataacctgttccctagaaaggaaaattactctgttttcattttccttgagtactatttttagctgttttttacaatctattatgacataaacaagactatagtatgtaggaaccatgaggtaatttccccattgctagttacaagtgtattgtgtttgtttatggactctgcaactaaggacgtaggtaccttggaggaatttttttccccctccaaaccttgttttttttttttttttttaaaaaaaaaaagatgtactggatctttttaacctgttataaaagtaatacgtgggccaggagaagtggcttacacctgtaatcccagcactttgggaggctgaggcaggtggatcacttgagatcaggagtttgagrccagcctggctaacatggtgaaaccctgtctctcctaaaaatacaaaaattagccgggtgtggtggcacaggcctgtaatcccagctacttgggaggctgagtgaggcaggagaatcacttgaactaaggaggcagaggctgcagtgagtggagatcatgccactgccctccagcctgggcaacaacagagcaagactcagtctcaaaaaaaaaaaaaaagtaatatgtggtcaatgtagaagacagacaagaaggagagaggagaggaaagtcacctgcagcaaccattaatattttggtgtatttccttccctgtgtttccttgcatgtaggttttattgttggtttgttttattcgtggcaagcatactatatataatattctgctcttttccacttaacaccataaatgtaagcattttctatgttgcttcagactttgtaaacagtttaatgactatatattccattaagcgaatttcacagtttacggttgctcactcgttggatttttaggttgctttgggggagtctaaatagccacaaagatgaacaaagggttagagagctcaaatgccacatccttcatgaagctggtccagttcacccccggctggaggttctcgccctctgcttgaaatacttgactcctttaatctgtacctctcatatggcacactactgtttacattgctctgtagttgtgagcaaggctgtatctttctgtactaggttgtatgctcctcatagtcaaggtccatgtcagttttgtctcagcaacccggacaacataatacttttgtatataataagtactccataaatatttgtcgaatgaatgaatactgagtgacaaaaagaaatctaagaaaacatttctaggtgagwggcagtcacatccaaaaactggtttctacatatagaaaagaatattctgcaaatcatggttattaaatatcctgtctgttaaggaaagaacaggaagtagacataagtaaacaaaactatagaagatttaggttagctttatggaagcagaatagatttttttttctttttttttttgaggcggtgtctcgctctgtttcccagtctggagttcagtggcacgatctcagctcactgcaacctccgcctcctgggttcaagccrttctcctgtctcagcctcccaagtagctgggattacaggcgcttgccaccacacacgcctaattttttgtatttttagtagagatgggrtttcaccatattggccaggcttgtctcgaactccttgtgatccacccaccttggtctcccaaagtgctgggattacgggcatttgccactgcacctggcctggaatagatgttttaaaatgagatctcaggccaggcgtggtgactcaygcctgtaatcccagcactttggaaggctgaggcaggcacattgcttgagcccaggagttcaaaaccagcctgcgcaacatggcaacaccccatctctaccaaaaaaaaaaaaaaawtttagccaggcatggtggtgcattcctgtagtcccagytacttgggaggctgaggcgggaggatcatctgagcctggaggtccaggctgtggtgagccatgatcgcaccactgcactccagcccaggcaatagagtgagaccctgtctaaaagaaaaaaaaaaatttaaatgggttatcagctgtttttgttagtttaagtacaactctggcctgtagatggaaaacatgaattagttaccattacaagtgttctttgagcccccaaagtttatattttgtctttaacttgctttttttttttttatcatgtgttcatgttatgtatttgtttccacaggcaggagatgctgcatgcttctacgatataaagttgggaaggaggcgggtagagcaccatgatcacgctgttgtgagtggaagattggctggagaaaatatgactggagctgctaagccgtactggcatcagtcaatgttctggtaatagtggtgtgccttggagacccaactgattacaactcagtatctctaggaccataacacagagttatggtttggttttattatgagccagttagcttcatacagaagggaaaaaagtccatcttatgtccacacattctaccctyaggtagccatctggcagaagtgtcctgtttagtttttcaccaaactgatccttttgtaaaacattaaaagagaaaaaaattattttaagtgttctgtctggcgtatgttagactaggtgaatgaatggagatggcaccagcacttccggcaaaataggtcagaggccgaggtgggcggatcacgaggccaggagtttgagaccagcctgaccaacatgrtgaaaccccgtctctactaaaaatacaaaaattagcyggakgtggtggtgcatgcctgtaatcccagctactcggtaggctgaggcaggagaattgcttggacccaggaggtggaggttgcagtgagccgagatcacaccactgcactccggcctgggtgacagagcgagactccgtctcaaaaaaaaaaaaaaaaaaaaaaggagtgtcagaaagcattccagtcctaaaagatgaaggctggtctggtatggttgctcatgcctctaatcccagcactttgggaggccaagrccgggggattgcttgagcccagaagttcgagaccaacctggacaacatagcaagagctcgtctgaattttttaaataaaaagtttttaaaagttaaaaaaaagaaaagtggaggctaaggggaaatactgtaggttaatgaagccataaaacatctcaaattctgaattccataaatgtggaacactctttaaagcttcaaaaagggaatttcaagacaaaagtagtgaatagcaaaagtgggaacctcatcactttccaaatgtggcatgggataaaagcacgaataaattcaagaacgtttcaatcaccgcatggatatgtggtcgtgtataatggctttttaaggaaaagtcaaagctattagggttaatcttactttctcatggtcatccctagatgctctagcaacagcagatcagttggcatctctcgtgatctgcatactaagttctttggttggcataagagtgcggtgttggtcgggtgcggtggctcacatctgtaatccctgcactttgggaggccaaggcgggcagattacttgaggtcaggagttcaagaccagcctggccaacatggtaaaaccccrtctctactaaaaatacaaaaattagccagggtggtagtgggtgcctgtaatcccakctactcaggaggctgagrctggagaatcacttgaacccaggagggagaggttgcaatgaactgagttcgcacycattgcactccagcctgggcaacgagygaaactccgtctcaaaaaaaaaaaaatgcagtgtcatggagaatatgtgctaccgtgtcattccttacagtcccttgacagaacaccctcttctctcttcttaggagtgatttgggccccgatgttggctatgaagctattggtcttgtggacagtagtttgcccacagttggtgtttttgcaaaagcaactgcacaagacaaccccaaatctgccacagagcagtcaggtaagaaagtcctagcactcctcttggagagtgttgagaagcagtggtccagattctcctgaacaaggggtttctgtattggccagaggggcttgtcagtgaaagcctctcttcatgttgtgctttaaaagaaaccaaaccccaagtcctcactctttagtggtctgagatttggcaaaatcaggtatcctggtcaaagcatagattcaaatattgtgggtatctgtcctagacagtggacagtggctagctcaaygacactgctgttttgtgtgtctctgggaagacctttctaaggaagaaaacaagaaaacctgaactttttagattgcgtttttatttttctttctttcagttgtcatttttattattttgcttcaggcgaatctcaagaacacggcctgataggcttagcttaagactggctatcctccatgggtcctgcgcagggaggaactgggctgagtagttatttagctgcctcccattccatttggcagatcttagtgccaggttttctttagatgggaggcacctctcttggaatggacttctctcccacacatgtctctttcattaactccgagaccttattccttgaccttagctcaagttatttaacttctgcatccttttgccagaggtgtctcaagggcaaggtgctgtttaagaaggagaaagcaagacattatatggatatgtaggtccttttcctgtgtaattctaatgtattccatattccttaattctgatctctcctagtaacctagtaagtggattcatgtcactgctttgtcgactggacagtattatttggaggctggtggttctcagcaaggtgcccccttcctatgccacccttcccttcccctctttctctaggaagaaatgcctccactatggtttttccaaatggaagtgccttctgctttgtctaaagtacctgtctaatagcactgtccaatagaactttctgctgcgatggaaatgttccatctctgctctgtccagtacgttagccaccagccacatgtggcttttgagctcatgaaacatggtgagtacagataaggaactgaattttacatcttactcagtttgaaatgatgttcatttacatggctgtggctagtggctactgtatttggaccatgcagctctagaattatttcttagaggacaagaaccagccttctgcagtttgaagaaatccagataccaggaaatattcatagcatgaatttaaaatgagataataagggagggaagtttagggtcagactgaccctgtgcccaggagctggcaaggaagacctttccttggctttgtcactggagaggggctggtgaaggccagggtttactgagggggcatagagaaataaatcctctagaagtagcttgaagcaggcctcgaaagactgttggcttctagaatttcccaagctcataataactgaagttttgattttgcttccatgtttatttgttttgggggctggccacaggaactggtatccgatcagagagtgagacagagtccgaggcctcagaaattactattcctcccagcaccccggcagttccacaggctcccgtccagggggaggactacggcaaaggtgtcatcttctacctcagrgacaaagtggtcgtggggattgtgctatggaacatctttaaccgaatgccaatagcaaggaaggtaggtgcctgtcataactcttagaggaagatgggaagtacggcttagaaacattcctgtaacttcatcgggtgccctgagatgcattgtcccccggccaggtcaaattgtgcctgagcagaacaaaggtatagccttggctcaggaacattctttttcacttgggacttggctgggtgacctgggagttggcaggctgcttgtttggggttagtagagaactgttcccacaactccctcccagtgtgatatggggactgccccaggtagccccattgtgtgggcatggcctgaacgcaatggagtaagttagggacctattgttactctctctccctcagatcattaaggacggtgagcagcatgaagatctcaatgaagtagccaaactattcaacattcatgaagactgaagccccacagtggaattggcaaacccactgcagcccctgagaggaggtcgaatgggtaaaggagcatttttttattcagcagactttctctgtgtatgagtgtgaatgatcaagtcctttgtgaatattttcaactatgtaggtaaattcttaatgttcacatagtgaaataaattctgattcttctaaattaaattctgttctcttgtcaagggggcaggtgggtgaaggtggaaagccacgcatattagaaagcaagcaaattgcagcaccgaccaagcacaggatttttctcagccatgtattcatgccctactccagacgcaaaactcctttcatttccgaacttccctcacccctccagacctctttrcacacacctgctgtggcctcggcccacaacacttgactcccctcctctcctctcaggaagttcactatctctgaagactttcccagccttccaagcctcatccttgtgtatgtgtctccctgctagcccatgacttcctggaagcagaagccctgatgttaaggccttgctcatggttttatctccagagcttagcacagggtctgcttcatagtaagtgcttcatagatcattgtcgaatgagtgaacaaataaatgtatggaatagactttgtttacctggaacaactcctgtcccagaactggattgggtcctgcaggggacagaaagggcacttactacaaatctgagttcagagacctggtgcttcacagttaaacctggagacggactcatggaaggaccatcatctcttgactcttctgcctgctgtcctcatgccagacatctgtcctctcttaagctccttttctctgaaatacgcttatgggcatacctcactttacagattatttcctgggaatacgattcaaagtttcacaagtcaactcattgtttggcattttagattgcttaacttttaaaaatcaaatcttattattattattttgagatggagttttgctcttgttgcccaggctggagtgcaatggtgcgacctaggctcatcacaacctctacctcccggattcaagtgattctgctgcctcagcctcccaaatagctgggattacaggcatgcgccaccacgcctggctaattttgtatttttagtagagatggggtttctccatgatggtcaggctggtctcaaactccctatctcaggttatctgcccgcctcggcctcccaaagtgctggggttacaggtgtgagtcaccgcgcccggcctaaaaacatcaaatcttatttaagaggaatttgttactactttcaagagtcctgttgttaaactccatgtatataaagagaaaattattaccagtctggattttttttaaatattgggtttgattaagggcagtttcagcttcaaccaaatcccttctgaacactgggagaacaggccaaatctccaccgtaagaatttgcagtacaggtataccgaacaatactatatagatacaggtttactcaaatgtgatcatatccaaatgatatatccaaatctatatgtagaaaactcatctagggttgcgcacagtggctcacgcctgtaatcccagcacttggggaggccaaggcaggtagatcacctgaggtcaggagttcgagaccatcctggccaacatggtaaaaccccatctctactaaaaatacaaaaattcgccaggcatggtggcatgcacctgtagtcccagctactcaggaggctgagacaggagaattgcttgaacctgggaggcggaggttacagtgagccaagatcacaccactgcactccagcctgggcaacacagcaatattccatctcaaaaaaaaaaaaaaaaggaaaactcatctagtatcctgtgacatcgaaattattatacagcagtaattgctgcttacagagatgggggtaagactaagatcctagtgttccacaaatcattaagaaaagatcaaattgtgatttgtcttgctttagtgttgtatacagttttgtcaaattctttgacagtagttatccttgtatagtatgtcattgtagttcagtggattgaaattaaatgatctattcatctaatcagtgttcattgggtgcctcctgtgagccaggtagatgtcagaatagaaacatagataaaacatagccactgcttttaaggacctcctggtgtccgtgaggaatgcagacatgtggatgcagaactccaatacaatgagctacgtccacagaaggacacaaaaagtactgtggccatgccaagaatggagagatcagccacagcagccatcctgagtcaaccactgctattagaccacttcctaaagccaccacttggtccatgtcccctccctgtttaaaaatgtacagtgattccctgtcaccaaccacatcaagttcaaagtctcctgtagtactaagcccactctgtttggctgactttccgcctgacttttaatatggacatacacacacacacacacacacacacacacctggtttattgccacctttaaacttgtgttcatgctcttcacatccggaacgccatccctcctccctttatctatccaaatcctactcatctttcaaggcctacatcaagtcctgccttggtggcatggtaccagttggactagtgcccatgcatgatttctctctgaactccagttgcacttagcacctttgagtgtaattgttctttaagtcattctaaaggaattgtcacctgtcccagagcagagcccatgttttcttttcaggatggggaccatattgctgcaccctggtgaagtgctgagcaagtccttggttgattggctggatgatgctagataacagggctgactgtaaaaatgcacctctgtcttgtaacctctgatctctgtaattcaggttgtttatgggaggatgttcagatcatcaccacttcactcagctgtcacaacttgccacttacccaggatgcatttaatctgcccaagcccctgaggatcctggggtccaaattctttctttcttttcttttttttttttctttttgagatggagtctcgctctgttgcccaggctggagtgcagtgggtgatctcagctcactgcaacctccacctcctgggttcaagcgattctcctgcctcagcctcccgggtagctgggattacaagcacacgccaccacacccggctaatttttgtatttttagtagagatggggtttcgccacgttggccaggctggtctcgaactcctgacctcaggtgatctgtcttgcctcggcctcccaaagtgctgagattacaggcatgagccactggcctctagggtctgatttctgactccacagacaagcagtgccagtcgaggtttggccctcaatagctggtctgtgataagstgggccacaccacagtgtggtgcaaggctagtcccaccctgggaagaagaggcaggctttgcccaaagagcagtcatctagagcccacccatttgacttcaacctcgctttccttggccatttcataaacggtatcagatggtccttggcaccacttagtgatggtcctaacctctgcctggctacctgtaaaccacagcagggggtgtcctaatgtttttaaaggtggagaggtggaactgagggaaggaaggaagtttgattggaaaggggttagattaagcctcttagtgaaggatgaggtcaacatttgtgattttttttgttgttgttctaatcaacagggcctgttttggagacaagaggctttaaacagaaagggctgggggtgggactccacagtgacctactgcaggctgcttccttgaaggaaaatcagcagcttctcaagagacccatttatacaaaggaactctcccctcccttcccccactgccccttccctttcccgctcctctccagtttggctgctgccatatcccttctgtacgtccttccctgactccacctaaagccaggcacccttgctgccctagagattgttgggactcgctcccagtgccttgctttctgggcagaggggaagttctgctgggcccagaggtgaagtaagactgcctctggtctctttcccatcttatcagggaattcctggcgggcacagacacgcgtacacaaaaccacacacagatacactcagcccaagccagtgatgacgttcccctgcctggctggttctacgtatgggtgtgactaggtcaaagaggacagggagggtctaaatatttagatactggactgccaagccctcgatggaaaccagagatcctctcaaaatgaacatttgctgaaagaaaagcagcctctggcgtctctggaagctcgcccggtactgtcggccaggacttggtgttgctaccaactggcctggcactcacagctagatctgggtgttctgctgaacatacattcatagggcatcagcattatacaaggctactctgtgaccatggtggattgagacaaaaacaagaccgctccataatcatgtgaacacagacaaaaacatgaagattgcctgaaccttgaaaatgaccgaacaacccccacccccatcctggtttttctgagtagctgctgcttccttaccaattgtggcttcagcctcgctcttgtctgccttcctcttggataagattgagttgataagatacccaatccaatcacagaatcaccagcatccagtccagaacaaagcctgacttccttaaaccttcctccaaatcccctgacccaacctgaatcctctaagtcttttctagcgccctcttcctgaagcatggcatagttcccccatggggcgccttctttcttgctgcagtgagcaataaacctaacttgtttgaccgtgttcctggtggtctttgaccagaaggggttgacaatttggacacaaatagccaaaatatcctctggaggaccactatcaggcagagaccccagtgaatttcacctagtcctgtgtctttctgaagaccttacctagtcctggtggagcctccaaggtctgtgtttcggttggggaaagcccaggagttgtgtcttgtgttgggggacagaggtacctggcttcccaggcaggttctcacctaggatgtcttggcatttgcagtacaacacagagatgcttctcagggagtatctagcataggtattgaatttataaataatatacaaataaatgtattcatttctttaacattttctgagcaactaatgtatgccatagtactgtactaggctctggagataggaagatgagtaatatattgtccctgtcttccttcaatggctttataaccgagtggtggccacagacaagtcaacagggattatcagtgtcacctaactgctgggagtatgataagtgagttccgattggaacttcattgcttctccagttgctttactgttctgcttctatctattctaggcatttttaaaaatagagatggggtctcactttgttgcctaggctgttcccaaactcctgggttcaagcgatcctcccacctcagcctcccatagtgctgggattactggcatgagccactgtgcccagcctattctaggcttttccttcacctaccaaatcatagttcccccgttttatggttgtgtcttctctgtcatcactttggaaagaatatggagagtgctctgcttcatagaggatggtgctgacattcctttcacccagagattacacatcttcctcttcactcttcctcagatctttcattctccctcctcgtctcagaatctctgcagtcttcccctcttgttttccttttttttttttttttttttttttttgagacagagtctccctctgtcacccaggctggagtgtagtgagtggtgtgatctcagctcactgcaacctccacctcccgggttcaagcgattctcctgcctcagcctcccgaatagctgagattacaggtgcccaccaccatgccgccatgctaattttttttgtattcttaatagagatgggattttgccatgttggccaggctggtcttgaactcctgacctcagtgatccatctcggcctcccacagtgttgggattacaggcgtgagccaccgtgcctggccaccccttgtttcccttttccctgtgtttcctctttgggttccaggggctgctcccr

SEQ ID NO: 94911 - DNA, 341034 bp, Homo sapiens
  misc_feature (1)...(341034): n = A,T,C or G
tgatcacagggagtagctgcattgctaattaggggtcacggaggtggtgagggcctcattcattcattcaccctttctttcagtgaatacatcttcaactgcaaacaattcttttgatgattatctgaatgttctcgcagcacggaggcctactttctaggacctccacgtctcatccgcacttggccgaccacggaatcaatgagatttgactcaccgaacatcagactcttcctataaaaaactcatctttttattcaacaaatatttcttgagtgatcactacctgtgagcactattctaggtattggagataaaacaataaacaaatgggacaaaatcatagccttcaagatgcttgttttctaggggggagaaatatacaacacatacaaaatactaacatttcagattatggtacattccatggagaaagctaaagaggtcaagagaataaggaatgtggatgcacacgtgcattacatagagagtagtcccagaaaactcctctgataaggcaacattgagcaaaactgggaggaagtcaaaagtcaagccatgcagaggtgtggaaaagaactttctaggcagagggaagtgtgaaagcaaaggtcctaatagaggagcaagtttttgtcttgtctgatgaatgaggataggtaagggtgagcaggaaaagtgataagagatgaggtcagagaaacaatggagccagattgagtaagacctcagaggctactctaggatgctgccttttactctgagtgcattggaagccactggcaagttttgagcagcaatggctattttggctgctctgaggagaatggaatatggggtgaaaggctgggagcaggcagaccagtcaggaggaacaacagaaattgctgattgccacatagtagccatctgccctttctttctttagcaatagaaccctgattcttatttgtggcagcaacgcacccagctaaagtctagatttcctagatactctctgtcccctgtcccttacaattagacagagtcatgtgattaatttctggccaatgacctataagaaggtagatttatagcacactttggagcactgcttaaaaagagcctactcagttgggagttctttgctcttttgcttccttctgctgccaacctggaacatagacataatagctggaactctagcagccatctgcaaccataaggagatctttttgttttgttttgtttttctccccttctgcattcttatcatttatttgtggtaagaacacttaaaatctattctcttaacacttttcaagtatacgatacgatatgttattaactatagtcactacgttacagaactcttgaatttattcctgctgcctagctgaaattttgtatcctttgaccaacatctcctcaatccctacccttccctccttaaaccctgttaactgtaattcctctctctgcttcaatgagatggccttttttagatttcacatataagtgagatcatgtagtatttgtctttctgtgtctggcttatttcctttaacataatatcctccagattaacctgtgttattgcaaatgacaagatttccttcttgaggctgaatagtattatccattcatctattgatggacacttaggttgattccatatcttggctattgtgcacaatgctgcaatgaacatatcaaagaggtatgaagatttcatacctttttgaaatgctgattacattgcataagacggcctttaaaatggaagccacatgctgaggatggtggaacagaaagctcaggtgggtccctgaggatagcatagaaataccacaccaaatctggacggcctatttctggactcgtttcacatgagagagaaatgggccaggcatggtagctcatgcctgtaatcctagcactttgggaggccgaggtgggtggatcatttgaggtcaggagttcgagaccagcctggccaacttgatgaaaccccgtctctactaaaaatacaaaaattagccaggtgtggtagtacacgcttgtaatcccagctacttgggaggctgaggcaggagaatcacttgaaccccggagaaggaggttgcagcgagctgagattgcgtggctgaactccagcctgggcaaaagagggagactctgtttcaaaaaggaaaaaaaaagagagagagagagaaaaaaaaataaagttcttttctgtttaagccactggtttttaaatttgcggttttttttttccagctctatgtagctaaactgaaacatgatgaatataagtagcctttgcaacaatccaggtgagagaagacagtggtttggcccgggggggtggcaaaggatgtcagatactggacttttttttgaatcctataggatttgcagatggtttagatacaagaatgaatgaactattaatagaaaaactaagacttctggtttggggcccaagtgacttgagagtgtaatgatttacagagatgcagaaggctatggagggggcaggcttgggtgtgggactggggttggtgggaacggcagtctagggcacacgtggcagcatggccttgatagaagcaggaacacgatgaaacagggagggaggccaagagcacggggcacagattggtaggaaatgagtgagctctcatcctactgcttctattttctcaacaaaggctgatccaggtcatcccctgagactgaagggaagaaagcagagggtggagatgggaggtttgaagagaaagacactatggaatagtccttttagtgagtgggattgctgggcagccatgggtgtgcatctgtctgaaatctgtgctctctaatttaaagaaaagccacttaccagcgctgtgtttttttctgcaatccagtccagttgcatggttgggtttaactgagcctgggtttcaccagacaagcactgtaggatataagatgagagaaacagggggaatgaaggggtgtttgcaagaaggagatcagaatgatggatcaggaatcaaaactggataaagaaagaagtaaacacatgagatggatgaacacagacttgacagttcttgaaaagaccgaaaaacagggtgggctccaaagaagccaaacagaaggatagaaggttgtgaagggggaaaaggagatttcggagatgcaattagtcatcagtgaggacaaggtcaaatgagtcactggagagagaaggaattgagaagctaaagatattgaatggaggtcaaggtgctgaataaagtatatttcattataagactaataataaaattcgttcacaacttcctctaattagatttgttatctgctttgaataaagataccattaattagtctaagtactttaaatttaatttttttttctgaagggatatttatgggacttcaaagaacaaagttttacccaaacaactaagtttttgttgggtgaaaatataaagcatttttttccatgtgaaacttctttgtatcttgatatctcttctttttcttctgtgagtttttttaggcggcgagtctattaacacaatcttttaaagattgacctgtttattctctctgaaatagttcatgtcatagcttgtttcttctaagctggactttgcccccttgtactttccttgcaactttttcatcgttttttaaaacaacatttattctcatatttacttattttctcaaatgtttgtttcctttcttcctgctccatctccctgttcctcagattcctttccttaggagaaaaaattggggtatttcccacagcatgctgtgagaaaagtctctgaacttcctgggggtgggacttgtgaacacagagggtcttgcacactattttatatccagcgagtgttcagattacagggccaggcctcagatacaggtccagtttgtggaaggcggtccctgaaacattatgaacactgctttgctccttctgtctcctagtccctcttcttaagctcaaacgttattaattgggagtctgttctgggctactcattgtactgattaaagtaattcacattaatgggcaatgactgatctactcaattctcttaggggaagtcacatttctaaaatgtgcatattaatccaaataaaaccctgattcatgagataaatgtaaagcaaatgattaacactctattcagggttttctgtcacagaacaaaatattttcttttctcttggggccccaaaacagccttctcatcccttagaaagtgggctaggacaatgtaaaattggacagtagagttgtgtgtgtgtacgtgtgtctctgtgtgtgtgcagcacctgtcacctcatctacacatctctctagctcatgatatatgtttcaaatcatgaaccagagacattcatatatgaacatggttaagacatattcattctttctttctttcttttcttttctttcttttttttttttttgagacggtgtctcgcactgtcgcccaggctggagtgcaatggcgcgatctcgactcactgcaacctccgcctcccgggttcacacgattctcctgcctcagcctcctgagtagctgaggttaagacatattcttaacgagtaagttctttgtctaggataatattttgtaattttccacagaatattcttcagatgcctaacttgatgaaggttttcaggagcctagtcttagaatcatagaggttcttggctcctggttccttcttaaatccaattgttcattactggaatatacaaatgagtagggagccagaaatgataggcaccagaaactgaggtttccatttctcaatgtggcctgaactaaatgaattaaatctcatcnnnnnnnnnnnnnnnnnnnnnnnnnnnnnnnnnnnnnnnnnnnnnnnnnnnnnnnnnnnnnnnnnnnnnnnnnnnnnnnnnnnnnnnnnnnnnnnnnnnnnnnnnnnnnnnnnnnnnnnnnnnnnnnnnnnnnnnnnnnnnnnnnnnnnnnnnnnnnnnnnnnnnnnnnnnnnnnnnnnnnnnnnnnnnnnnnnnnnnnnnnnnnnnnnnnnnnnnnnnnnnnnnnnnnnnnnnnnnnnnnnnnnnnnnnnnnnnnnnnnnnnnnnnnnnnnnnnnnnnnnnnnnnnnnnnnnnnnnnnnnnnnnnnnnnnnnnnnnnnnnnnnnnnnnnnnnnnnnnnnnnnnnnnnnnnnnnnnnnnnnnnnnnnnnnnnnnnnnnnnnnnnnnnnnnnnnnnnnnnnnnnnnnnnnnnnnnnnnnnnnnnnnnnnnnnnnnnnnnnnnnnnnnnnnnnnnnnnnnnnnnnnnnnnnnnnnnnnnnnnnnnnnnnnnnnnnnnnnnnnnnnnnnnnnnnnnnnnnnnnnnnnnnnnnnnnnnnnnnnnnnnnnnnnnnnnnnnnnnnnnnnnnnnnnnnnnnnnnnnnnnnnnnnnnnnnnnnnnnnnnnnnnnnnnnnnnnnnnnnnnnnnnnnnnnnnnnnnnnnnnnnnnnnnnnnnnnnnnnnnnnnnnnnnnnnnnnnnnnnnnnnnnnnnnnnnnnnnnnnnnnnnnnnnnnnnnnnnnnnnnnnnnnnnnnnnnnnnnnnnnnnnnnnnnnnnnnnnnnnnnnnnnnnnnnnnnnnnnnnnnnnnnnnnnnnnnnnnnnnnnnnnnnnnnnnnnnnnnnnnnnnnnnnnnnnnnnnnnnnnnnnnnnnnnnnnnnnnnnnnnnnnnnnnnnnnnnnnnnnnnnnnnnnnnnnnnnnnnnnnnnnnnnnnnnnnnnnnnnnnnnnnnnnnnnnnnnnnnnnnnnnnnnnnnnnnnnnnnnnnnnnnnnnnnnnnnnnnnnnnnnnnnnnnnnnnnnnnnnnnnnnnnnnnnnnnnnnnnnnnnnnnnnnnnnnnnnnnnnnnnnnnnnnnnnnnnnnnnnnnnnnnnnnnnnnnnnnnnnnnnnnnnnnnnnnnnnnnnnnnnnnnnnnnnnnnnnnnnnnnnnnnnnnnnncgctggaggcgagccccggcggccgcaagcgagcccgaggcgcggcggggcgcggggcgtggggacgctagcgggcgcgggaacgggcgcggcgccccgtcacgggcagcgccccgaaccggggccggacacctcggccgctcgggccgcggcggcggggaccatgccgaagaaagtctcctgagcccggcaacttcggcccctccccgcccccacccggctgccctccgcgcggccctccccatgtgcagccggccagccgggctctcctcctcgcggcggatgggtgaccttttcctggcacgggcaggctgtgggaggcagcggagcaggcgatgaagaagaagcagcagcatcccggcggcggcgcggatccctggccccatggggcccctatggggggcgcccctccgggcctgggcagctggaagcgtcgggtgcccctgctgcctttcctgcgcttctccctccgggactacggcttctgcatggccaccctgctggtcttctgcctgggctccctcctctatcagctcagcgggggaccccctcgcttcctgctcgacctgcggcagtacttgggtaaggaagctgggcaggcgctagggcggcgccgacagcgcaaagttgtgcggcggggagagggtcgcggcggggacttctcgcgctgccaccgcgcgccgccgccgccccgggtctctccaggtgctaagcccgtgagcatctgtgccgcggtcgggagcgccttcttcctcccgcgcgtccgactgtcctcaccgaggcgggggcgccgctgggttgcgctgccggcaggtaccccggggcgaggcaccgctcaccttccccccgccccacctccgccacccggatccggactggggcggagtggatgggtgtgtggggtgtgccggagtgtgtgtatcttcaggcctggcggcgcggggagtggcgaagggaagggaaggtcctcttcgttgcattgttagtgaccgcagttcagtcccgtcccgcgccccggggagtgtgggtgggtttagccctttgccaccgtccgctctgagaattctgtcccgcagatcccccgcctgcccgccggccctagtggctccgcgctgtccccgggctggcttgtcccttggctgccgctgcccaccccgccgcccgcagctagcctggcgcggggaacgggttgcatccaggggtttggggatgcccgagggcgctggtcagcctggccagcagtgtcgcccccagtaacccgaggatcctcggcgctgtgtgcgtctcaagctcaagtcaaaacttgtgtgtgtgtgtgtgtgtgtgtgtgtgtgtgtgtgtgtgtgtgtgtgtgtgtgtggtttattaggagagaggccgcctgtctttagcagaagtaaggaaggggtttgacgggagggaaagagccgctccagcgagaaggcgtgaccccgcagctccctcgtctcggctgcgggagccaggggtgccagggacaggcgagcgcaagcccaggtcgcaaggacgatgctggcactcgcgttcgagccaagggaggatgcagatccctcccaagtctgtggccagaagaggtcgtgcgggggtgaaggctgggagagctccagcttcttgcaagcatccgaagtgataagcctgagcatctgcacgatgagagcgagtgcggggaagcagagccaccgaagtgctggaaagaaaatgggccaaatgacccgggccagctggaggctgccacagttaccccaaacgtcacttcgtggcagaagccacaggtctagatagtagaccgtttggagaaaagagaaaagaaaaggaaaaaaaaaaaacccaaaacaaacaaacaaaacaaagcaaaacaaaaacaaaaccacatcagccaagttacaaatgtgttagggcatttggaaatgtagatgtggataaaataatattctttaccttgtacaagacctcatattttaaaagttacacttttatttctttataaactttggggaactacagattacaggaaaagttggcccaagtagatttccatagcatttggtttcatagaggatttggggcaatatatcctttattagggaatcaaacctcttcttttcataagttctgtattgtggagtctcatagcttcctccactctctgacacctgctagtgccacaaaagttaacagtattttcatcaccagcagcaatccctgttaacaggcattgggaggcaagcgttgaggctcagggtctttctccattaaatctgacagtgaattcttgtggaagttctttttaagtaatagatggaggccaggggtgtagggaaaagtgtaatggaccaggatggaagtcatctgtgctcattgtcctcaaagcacctggcctcgtgtagggtactcagacttcataggcctggtgtttcatggcagaattagaagccacacctgactgtcaatgaaacctccacccagctcctaaagttttggggttctgacacctttcttgaggaagggaaattctgggaggaggaaggagcaaaggtactactgaggataaaatcaagacatttcaacatatattgcattaacattttcactttatatttccaaacaatgaggcctaataaatttgggtggtcagttggtagaagggtgaattctcagcttctgctcaggaaactaggaagaactgaaagattgaatgctgctcctgttactagctgatcattatatttctgactgatgtgataggttcaaaatgacatcattgtgaactgaaaatagaatacccttggccaaatttgttccctgttacgtaaatataatgatttttgggaaaagtgggcttgtggtattttggatggtctaaaatatacctttaataatataaggccactgtgtctgcagaattactttcccctgttttcctccattcttttattttagtgtctgtcaaaacaaaacttgtggttagtaaacacatcctctcaatttcctcagccaattttggcagcaagtatttttcgtaaatgtaagttcatgtaaagtaaaaattttccaaatcaaaatatgtttatatcaaacacttttctttacagagtattatttcagtatacttatacaatattctatgtctgacacacaatggccactcaataaatattggttgaattaatgacccaacctgttgtatcaaacaggtagtgtgatatttaacgtactgaatattctcataggaaagccaagagacagtagcattcatagtaaaagctagtatttatcacgcatgtgccagtcagtgcatacacagggtgacattcaatctgcacagcaacactgtcggtaggttctattgttatttccattttctgtatggaaaaaatgagggcaaagagttatgaaggacacatagcaagcgaggcaggacttcaacccatgtctgtctgattgcaatacccattgcatagcactatgggcagtttaagggagaaaatggaaggacagccaagatgcaaatgggaatctaaagatcgggactggctaaaaacgatccatcacatttacatccataattccactttccttttcttgatacttgtactctgagtatcttgaggagccagcagagaagggaaataattcaagcagctggtttgctttaactctacctttccgtattaatccccactatgtggcctccatttatttagggaactagaccctccctgagctggacaacaactgggagtaatgttggtcggactcgcatcttccgggcgttttctctttctttagcagttgtgctatgtctaggctagtggttcccaatgtgggtccttggacctgccgcatcagcctcacctgggaatttgtcacaaatgtacatgctaaggtcttatcccaaagctgctgaagtctgggcacagggcccagcaatctgtgcgtcagcaagtcctctaggtgattccaacgcagagaatttgagaaccattgttgttgagcaacaacaaagtattgctttctggaggcttcccatgtatttgagagaaaggaggaatgtgaggcggggtgggtagatttataaagtatttaaaggtactttaatactttaaagtatttaaaaatgtgatttaaaaatgtacatggtttcagtttttaatttcaacttttaaaaatgcatcttgtttgctacttaagccccactgttttgagggaaggaccagccaacggcacccaccccagctggctttagaccttccaaggttaggagaggtgtgacgtgaggagtaggctgacgtggggcaaccggaaagcatagtgtggggaaggacgagaacagagccactgatgatgctttctcttccccataggagacagtggtgaacagtccttcttcctagtcaatttggggaaaggcagagtatgttctacttagagaatgttctgctgtaacacatttgaaaagagtaaaggaagtgatggggaggaaaatcatgcaaggataactgttatcttgatttcccaccctgagattgggtggagggggagcacaaacatacattggggtaaatagaaatatatagcaaatgctacacttaagcttggagaccatggtctttccaattcagtgaattttttttttttgaaatggcattcaaactttgttttgctatggaaaacaaacaaaaaatcaaataaaatctcccccagaaattaggttatgatgcagccttgctgccagtagccttattacttatgagctgtggaaatatcaaaaacttggaataagactcattgatataaacagaataagccagatggcttactactgatcttgtacaaccgacaaactctaatgatctatcatccagccttggatatgtgatttagactttatgggagctaaacttgttggactcattcccagctgatatgctttcctttccatttttaatttataccactttaaatggagatatagaactttagttctcagaattgccaatctttacgtatattatatatgagcctggcaatttagagtcaaaaaatgaaaagtatgtcatgttattgaatttgaaattctctaagtttaagtgcatttaaaggaaaatgtgaaaatagaggtccatatctgttacaaaatagtttctttgaacctaaaaagccaaattttatttttcttctgcatttcacacatggtataaatataatactttaggctccaaacagtaatctaggaaatgaatgcataaaatatgacgttatcaatagaaattgttgacatagaaaaaatgatattcttgttcatagctacaagtttatattgtggggttggttggggacacagtggcactatattagagaaaggatagaaaatggaattcagctatggtaatccgttctgtaaacaaatagcatgaatggtgaaaagcaatctgccttgtaaactattttttaatgtagactagtcttagtatgaattgtctaagaacacatataaatgtggattatctaaatactgtctttcttcaaattccctgtcatcaatccaggcttaagacagtggttagttttgttttggagaaactggaaagaaagtggtcaaggtttttgagtcccaaaataaatagtatcttttgcttcctcagagggagactgaaggagcaaaaacagtagcttgacctgcagctgtactggtgggtgtccatgatggacaatgaaaacgcatcttatttgatggattgtagctgctagaattattaggagttrctgctttttttttgttttttggaaagaagacttgaccacaaattaattttgtcataaatatatttatttgtattacatagaaactcggctttaagcaaacagtgatatacataaatccctttttatcagaaatagggacagaaacactaacatttcacaaaaattcttatttgcaaaagtcaatgtagcaactgttttgcaagagaattccaaatraagtacatttcagcatttgctattagtttttaaacagctttgttgagatataattcatataccatataattcacccatttaaagtttttaatagtttaatagcttttaatatattatagatatgtgtaaccattgccacaattttagattttcatcaccacaaggagaaacgccataccctttatccaacacttttgccccatcaaccccagtcctaagcaaccgctaatttactttctgtctgtatagatttgcctattcttggcattttatagaaatagaataatataatatgtggtcttttgtgattggcttcttttacttgacataatgttttcaaggttcattcatgttatagcatgtgtcagtacttcattcttttttatggctgaataatatttcctaagaattttttttattgcggaataaaatgttccataagactgtatggatattccacattttgtttatccattcacccattaatggacatttgggttgttttcaccttttgtctactgtaagtagtgctgctatgaacatttgtgttgcaagcttttgtttcaacacctgttttctgttcttatgggtatatacctaggagtgggattgctgaatcatatggtaactctaagtttaagttattgaggaactgccaagctgtttctacagtggctgcaccattttacatcccccgccaagaaagtatgagaattccaatttcttcacatcctcactgccatttcttattttccatttttttattatagccatcttaatgggtatgaagtggtatattcattggcgttgtgttttgcattaatgatgtcgagtatcttttcatgtgcttgttgactgtttgtatatcttctttggaaaaatgtctattcacattttgctgattttttttttttttttgagattggaggctcgctctgttgcccaggctggagtgcagtggygcgatctcagctcactgcaagctctgcctcccaggtacacgccattctcctgcctcagcctcccaagtagctgggactacaggcggccgccaccatgcctggctaatttttttgtattttttagtagagatggggtttcactgtgttagccaggatggtctcgatctcctgacctcgtgattcgcccgcctcggcctcccaaagtgctgggattacaggcatgagccaccgcgcccggccactgattttctttaaaaaatttatttccataggttttaggggaacaggtggtatttggttacgtgagtaagttctttagtggtgatttgtgagatttttgtgcactcgtcacccaaggagtatacacagaactcaatttctggtcttttgtccctcacccccttcccaccctttctccctgagtccccaaagtccattgtgtcattcttatgcctttacatcctcatagcttagctcccacttatgagtgagaacatatgatgttgagttttccattcctgagttacctcagttgcctatttttgaattgggttgtttgtatttgtgttgttgagttgtaaacattatttatatattcttaacagtagacccttttcagatatatgatcttgctattaatttgggggttgggaaatatgatactgacttaaatacaatactgttatgtattgttcactatattataggtgttcaccttatcaaggagcaagaaattagttttatatgtaaatgagttttaaagtgttaagtacggtacctgggtatatagtaaaacctaaataaactctaaagatggattgaaaacaaggatctgttctaaagaatcctgggggtcttgttttacagttatggattactttgaatattaaacactttacatttatctctaaggtatgataattcatggatagttaacacttaacctattttagagatgtcacaaagattgctgtgacttgtatgtggaatatgaatttagctaatttttgaacagcagattatagtacaatggttatattttgtctttatatttgctcactagaatggagccgatgagctcagcaggagaaaacatttgggtttattatgttccttatacaatatatgaagcaaccaaggaaatcttaagcattctcatgaaattggaattcatatgcaatttattttgtattcatgttgtggtataatatgaaggacaaatatataggaacagtatttgctacgtatgtttctcttgagtaaaataacttatgagttttaagaagaaatattgtttttacaaaaatgacagaaaattttagtaggtttcaaaaatatatataatcaaaataagaagctctaaaataactgcagtcaattagatgctgcttggcctcagtttgaataaytggcaacactctctgaaatggtctgcctctatgtctctacccaaatctcatcttgaattgtagttcccataatccccacatgttgtgggaggaaccctgtgggaggtaattgaatcatgggggcggttaacccccatgctgttcttgtgatagtgagttctcatgagatctgatggtttcttttttttttctttttttttttaatacacattccccaaaactggattactggggtccagtattccaattatgagcatttttaatttattaaattttgttaaatattttagatcaaaatgttgaagtaatttacacataattcacatttcctgccacctccacagagctagatgtcatctctatagttctggtaatcatccaggtgaaaaatggtaatattttttaattatactttaagttctagggtacatgtgcacaacgtgcaggtttgttacatacgtatacatgtgccatcttggtgtgctgcacccattaactcgtcatttacattaggtatatctcctaatgctatccctcccccctccccccaccccacgacaggccccggtgtgtgatgttccccttcctgtgtccaagtgttctcattgttcaattcccacctatgagtgagaacatgcggtgtttggttttttgtccttgtgatagtttgctgagaataatggtttccagcttcatccatgtccctacaaaggacatgagctcatccttttttatggctgcaaagatctgatggtttcataaggggcttttcccctttgctcagcacttctctctcctgccaccatgagaagaaggatgtgtttgcatccccttctgccatcattgtaagtttcttgaggcatacccagccatgtggaactgtgagtcaattaaacctctttcctttaaaaatcacccactctcaggtatgtccttatagcagcatgagaacggactaatacactgtcattcaaaattaccagggaaccagatatagctgcttagtcttgaagctacgccatacctcttggtctgtctcagggtttatattgattgtctataatttccccaaaactgccactgattcatttttgttgtctcgctgcctgcttagacttctgctaatgtctttgtactgattgtttaggaaggtacaattccaattaggatctctaaactcctgtaagtatttgtttatttcatgatctcttatgaagttttgacattctaccttgtattgtgatcatctgtgagcaagcaccttgaagggaggaagcttattcagtgcttcgcatccctgctctgacatctcttctgggtgctccacacaggccctcaggaagtggctgttgattcagtatatttgctgagcaactgttcttcactaggattccaaatcctgctttgtttggtctctatttagagaatatggggagggatgccaagaaggactctagctcagttgatgcctttagcctatttctttcttgctctttgaagctgatgctccaagcaaatacattacaaccacttatgacatatgagtacatatagttttgtttagaggtggttgcccattctagagtgtagtggtgccatcagagctcactgcagcctcaacctcctgggctcaagccatcctcccacctcagcttcttgagaagctgggactacaggcacaagccatcatacctggtaacacaaacatttccttctgtgcacagagataactgtccacttcttacctttgggcatttggaattacacttttagagctctctctgtaattaagaatagctgagatcagtttagagatttgtgtgcatacagttagaatgcaaacttcttgttacttgtcattttctgaaatcctagaccagttgttttggaagtttgcagaatagctgttatttctgtaggttagtgtcttctttaggtagcaatttgtgttaaattagccagtatgtttcaagcatgactttaagtcatgaaggagatgagaccgtggaatgatgtgatttttgaaatagggactgaacagagtttaacctagaactgcaacacgaccatactgtaaaattaggtctcaatccaccaacccatttacacttgtttggtgaaagatactataataaccttaagtcatggctttgattaggcaattcttagttaattcattaatagatgatttaaataacctattacctttaactgtactgcatttctggaaacaccattgctgttttttagttcaaggagtacaattttcataatcttgatgaaagaaaaatgagaatattctgagacatatgaattcctttgttcagtcattcaacaaatattcatggaaggccttctttggggcagaagcatcaggcagtaggaaggatataggttttggagcagagctccgggtgtgaagcactgtgttaccatttattagctgggacagcttgaataattttattaacttctctgaacctctgatgttttgatgtatacaataggattaataattgctgttttacaggatacttctctaacccaaggcctgacatttaagttcaacaattgccaattttctcagcttgttctttgcttccctttaactccctcttcatttagcacacatacacatatgagtgtacacacacactcatatcagaacacagctgggggagtatacagattcactgataacctgacttccaattgaaagaagcaatcaaacctagaaatacacaattacttcactagtatttggcaagggctcttcaacacctgacaagttccrgtaattcatccatcccactaattacatatatgtaccccttcctgcttcttctcttctgcttcctggagatagtctttaaatgacacattttttgcacagcctgatttcctctgttttgaatttatccacactactttttttgttcctgcattcacaaaataaaaatagctgtgtggagggagtatgctggcgcttactctctgggatagccagctgttctaggattgcactagtgatccataagatacatcctttcagaaataatcacaatgccaggcatacactgtgcctgctcccagaacttcccccattcatgacgaaactaccacgtccagtagtacgcccactttcttttctcagttcccacttccctctcattgacagtcagagcaagagcagtgaaccgcagaagcagatcttgtgtcttcacttgcttgtttcccaagctcagcctctctgtgttgccttgctctgttagcctccagtaggtgttgcggcaagtgagagccataccatctggcatggccaatcacccagttccttgagcagttgaaggcaaatgctgattttacattatttcgtagaaagttgtattttgtttggggaccttaaaaaccctgaccttgtcatccagcacagagcttcctgctttaacacaaaggctgtttgacatgaatgccttcccattggataaacagaaccgtcaggcagagccatgcggctggatggagggggcactaggcctgggtgtgcagggtgacccgacaataagtcagttgtcggtgttaagtcatgtgagcctccaaggcttcagtgtcttcatctctacaatgaaggagtttcattagatccatgattctcagctgtttccgttccttaggaccctcatccatagcagtgtttccayagggtcttgactgtccctatgggaatacatctcagtggccaggagagggagaaagggcatggcattggaagtccttttaaaaaagtccctgagctcacgcctgtaatcccagcactttgggaggccgaggtgggtggatcacgaggtcaggagatcgagaccatcctggctaacatggtgaaaccccgtctctactaaaaaatacaaaaaaattagccgggcgtggtcgcgggcgcctgtagtcccagctactagggaggctgaggcaggagaatgtcatgaacccaggaggcggagcttgcagtgagccgagatcgcaccrctgcactccagcccgggcgacagagcgagactccatcccaaaataaataaataaataaaaataaaaaaataaaagaatgcggcgtacgcggtggttcacgcctgtaatcccagctccctgggaggccgaggcggacggatcacaaggtgaggagatcgagaccgtcctggctaacacggtgaaaccccgtctgtactaaaaatacaaaaaattagccgggcatggtggtgggcgcttgtagccccagctactcgggaggctgaggcaggagaatggtgtgaacccgggaggtggagcttgcagtgagacaagatcgcaccactgtactccagcctgggcgacagagcgagactctgtctcaaaaaaaaaaaaaaaaaaaaaaaagtccctgaggtaatttttctgtgcactcccaggggagagtgtttcttttctcttgagaatcactgaagtagatcgttctaagatctctgctgttcttcaaatcatgtgctgaaagagacaagaggtcatataattgtagcaactgaaacaaatataaggctattttctttggacccaaacacttattttaaaaattgcagaagtcaagtgaccaaggcaagtagaatacacaaaaacattttaggccatcgttgtcattttctgagtcttaatcatagttaaattttttctaaaattaaaatcagcagtgcgtttcctccacctccgccagaacttgctctagaaattaggggaagcagaatgtccccaggaagtcctaagagagaagaagcagagtaagacatgggtttccagagtttagagtctcactatgtgataggtgaaagctgtgttgttgatgaggatttgcacagcctcctcccggttgcctgctactgaccatcccatttcactgtgggcagctccagtgggtaagagggttcttcacagtgtggtgagctactcctttctagcctccatccattttttgctgttcttctggaagctatataggcttgtctattggactttatagtcttcaaataattgaagatactaaaatgactattatgtctaccctgctctgctacacacataaatcttgtccagacaaataggtctgtttaccagtactttctcatcagaagtcatttgaagacacagaaagtaaaaaccacaaagaaaaaaaaaactatattaaagtgaaagctcaacagtaacaccccataaccatagcaaaacaaaacaaaacaaaacaaaacaaaacaaaaaaaaaccacaaacatctccccaggaaatagaactaatatgcaggtctttaaaagttcagtttatcaatgagaaaaagataaaccaactcacgagataaatgggcagagtacaggagcagtcacagaagaggagacacggctggccagtaagcacaaagagaaatgaaatggttttgattcccttacacatcttagcccccttcctctgtctacatggcccgtaaaagccacagaactgaacagttttccagttccctcagtgagcctgctttgtgcagtggtatgttactgtcagaagggatcctcttcgaagctgtggtatttgagaatgactgctcctcccaccgcttttctgagggtgttagcaggagtgcaacagagccttacttcaaggcccccagcgggctggctggaaccctgcttcagctcctccaagcacgtgcggccaagttctgggagccacgtcgatgtgggttgatgggtcccctgagacgccctctctgctcagaacacagccagtaagccatgggcagatcacaacaaacagcaccctgccttctgctccgcctccctccatctaccacactgccaagttcctaagaagcttaggggagaaggaactgctgtggtgcttagaatgcagtgtcttgcctgaaagtattttctcagtctttgagaaaacagtggaactgactcatctggtcagagctttacagaaatgtgattgcagatctcttgcaatttcattctgctttagtgtcagaattcatccgacaacgtgccaaaaaaaaaaaaagtgtgtaaaatcacatacagatttagatacttcaagaggaagttatttttaccacagtggggaagaaaccagaaagtgccgattggtggagaatgcccggcagggctgaggaaggagggtgggcacctgagcaacctgggcctggccacactcacccctgcagccttgccagcctggcccrgggattgtggtgtggtcacctcttagcaggtggagggaggagttcctgtgtggaagatctgcttgaaggaggaaatgttgatataacccccgagtgtggagccaacttcagcagtgcggggttaacatgggttactcttgaaaatgtgttgcgtgctctcccaacagtccatagaagcagctctctaacagctgcatgggacacaaaagtaaaaatggagaaacgattccagaaaaccacataaatataaaaaccaaatggcgcagtgtctttattttgttttggcagataacaggattgaggccaccttgttttctttgctcatgcatttcccaactcaaaaggctgttcttgtttgcttgtagagcagagatccaaggcctgagagaccctgaaatgtttgtagttatattcttcattcgtgctgcgagataaagagttttcccagaaactaaagggagggaacaggaaatatttgttaagatccataacctctggcttttgtctcctcttttcacctgggcaaaggatatcagtgataatattttgggtctcataagatgatgaattgttcaaatgtatttggagaatactttattcaagcatctttgtctttctttcctattccttgtggctgaagagaggcatgtgctttttatgcaagggtcttgaaatgtatgcagttaccatggtggcactctgtctctgacccaaactctgtcatagagtgtatgtttagccatgttttcaggggtgcttcctagcgtggtcaggagaaactgctagagctgaatttggttgctgggcaggcttctatcttttttttttttttttaatagatgcagggagtataagtgcatgctttttacatggstatattgcataatggtgaggtttgggttcctagtgtacccattacccaaatagtgaacactgtacacaaaaggtaatttttcaatcatcaagccttttctccctccctgcttttgagagtccccattgtctgttatttccctctgtatgtccatgtgtacccattgtttagctctcacttctaagtgagaatgtgtggtatttgagtttttgtttctgagttacttcacttaggacaatggtcttcagctccattcctgttgctgcaaaagacatctgtatatagaccacattttctttatccagtcmtctgttgatggacagttagtttcattccctgactttgctgttgtgaatagtgctatgataaacatacaagggcaggtgtttatttgatagaatgattcttttccttcccgtagatacccagtagtgggattgctgggtcgaatggtagttcgatttttagttctttgagaaatctccatactgttttccacagaggttgtactaatttacattcccactaacagtgtgtacatgttcccatttctccccatccttgccaacatctgttgttttttgactttttaatactagtcattctgactggtgtgagatggtatctcattgtggttttaatttgcatttctctgataattagtgatactgagcattttctcctttgtatttttgtgggctgcttgtatatcttcttttgaaaaatgtctgttcatgtcctttgcccactttttaatagggttatttgcttttttcttgttgagttatttgagttccttgtatagattctggatattagtcctttgtgggatgcatttttgcaaatattttctccctttctgcaagttgtttgtttactctgttgattctttctttgctgtacagaagctctttagtttaattaagtcccttttgtttatttttgtttttgttgcattgcttagccatatattctttgcccaggccaatgttcagaagagtttttcctaggttttcttctaggattcttatagtttcaggttttacctttaagtctttaattcatcttgagttaactttttatatggtaagaaaaggggtccagtttcattcttctgcatatggctgtccaatttttccagcaccacttattgaatagggtatcctttccccatcgtatatttttgccaactttgtttatgatcagttggttgtaggtaagcggctttatttctgggttctctactatcttctattgctctatatgtctgtttttgtaccagtaccatgctgttttggttactatagtcttgtagtataatttgaattcagataatgctatccctccagctttgttctttttgcttaggattgctttgactattcagggtctttttggttccatatgaattttaggattgttttttctaattctgtgaaaatgacatcggtaatttgataggaattgcatgtaatctatatgttactttggatagtatgggcattttaatgatattgattcttccaatccacatgcttgggatgcttttccatttgtttgtgtcatctacagtttttttaatcaatgttttataattcttgtagagatttttcacctccttggttaaatgcattcctaggagttttattattttttgtggctattgtaaatgatattgagttcttgatttggctctcagcttgaacattattggtgtatagaaatgctgatttttgtacattgattttgtgtcctgaaactttactgaagtaatttatcaaatctagaagtcttttggaggagtctttagggttttctaggtataagatcatgtcatcagccaacagagataatttgacttcctcttttctaatttggatgccttttatttctttctcttgctatcaggggaacccacccccgataattcaacgtgggttcttttctatttccttaagtgtcggccggtctgagaaataaagggaaagagtacaaaagagagaaattttaaagctgggtgtccggaggagacatcacatgtcggcaggttccatgatgccccctgagctgtaaaaccagcaagtttttattagcagttttcaaaggggagggagtgcatgaatagggtgtgggtcacagagatcacatgcttcaagggcaacaaaaggtcacaaggcagaaggtcagggcgaaactagaatcactaatgaacttccatgtcctgctgtgcacacaatgtcagggttcaagagcagagaaccggtctgactagaatttgacaggctggaatttcctaatcctagcaagcctgggggtgctgcaggagactagggtgtgtttcatccctatctatatctgcataaggcagacactcccagggcacccattttagaggccccgccctaggaatgcattcttttcccaacgctgttaattattaatattccttactggggaaagaatttagcggtatttctcttacccattttgggtaataagagaaaggcagccagactttaaggttatctcccttgttccctgaaaatcgctgttatcctgttcttaaggtgcccagatttcatattgttcaaacaccacttattgtttcagcaccacttattgaatagggtatcctttccccattgtatatttttgccaactttgtttacgatcagttggttgtaggtatgtggctttatttctgggttctctactgtcttctattgctctatatgtctgtttttgtaccagtaccatgctgtyttggttactatcatcttgtagtataatttgaattcagataatgctatccctccagctttgttctttttgcttaggattgctttgactattcagggtctttttggttccatataaattttaggattgttttttctaattctgtgaaaaatgacatcggtaattttcaaacacacatgctctacaaacaatttgtgtagttaatacaatcgtcacagggtcctgaggtgacatacatcctcagcttacgaagatgatgggattaagagattaaagtaaagacaggcataggaaatcatgagartattgattggggaagtgataaatgtccatgaaatcttcacaatttatgttcagagattgtagtaaagacaggcataagaaattataaaagtattaatttggggaamtaatacatgtccatgaaatcttcacaatttatgttcttctgccttcagcctgtccctccgttcggggtccctgacttcctgcagcatcttgcctaattgctctggctaggacttctactattatgttgaatagtgtagtgggagttggcattcttgtcttgttccagttcataggggaagttcttttaaattttctccattcagtatgatgttggctgtgggtttgtcctatatggcttttattattttgaggtatgttcctttgatgcctagtttgttgagggcttttatcatgaaaagatgttagattttatggaatgctttttctgcagctgttgagatgatcgtatggttttggttaggcttatatcttcatacttcatttgttttatggcataatgcgtttctgtgccaaaatatagcctctcttccccagattttttccctgtcaccttgtcagaatgatagttgactttgttaattgcagagtaagtcttgctcacaaggcttattcttcattgaagtctcacatcaatgagccttaaaggatcagagacacatgttctcctatcactctcacccactcacccacttgctctcacccactcacccacttgctctcacccacgcacccacttgccctcctttatatttagcttggcagtcttcctctgttttcttttccatctagacaggttcattccttcaacaaatgctcatcaagcaccagttatatgctgagtgctaagataatcaccgtattcatggggctgtgttgtacctggagggacagagaaggacttaagatcccgtatgaggtgtgttgaacagggggagttaaaagaggtagtagaggcagtgattggtcatgcctggatatggttagactgattatctctttcctaaaggccctgttgatgctagtagatcaggaggtactcaagactggctgcatgatagaataacctggagaactttggagaatacagatatgtgttcatttggtcaagggtgtatgtgttaaaagctccatgggtaattctaatatgcaaccaaagtaaagaaccactgtagcagatacagggtcggagagttttgtttgtgcagtaaatcctcttacagtactatttagggatgctttatcttaatctataatctttatttgtctatgacttataacactttagcttacagcttctctactctggcatctctcaaactttaatgtgcatgcaaatcactcgaggatttgttaagctatagatcctgatgtagcaggtctggaactgggcttgagattctgcatttccagcaagcacccaggtgtagctgaggttgcagttggagggccacattttgagtagcaagggtctataccatagcatttctgggaaataatgaatacctgtaaacaacaaatatgtcagggttcagcttagctcattaaagatctgtgctattaagcatttcatagatatcttttaaactgaattttcattcaccagtttgattgttccaatttaagaacattaagtatttcttaagtgagaatcacacccttgtatgatttcaagtttaaaatggctgtttttatttatctttggaaactatagtattaaaatataggctatttggagttttgtgaacatacagattttgacctaatgtcaagtttgttaataagcattgagagcaaaccaactggtcttagagatgaagtttcttcaaatagttgttgcagattcggtaccgttttaccgtttgactgttaggcatactatcaaaattcattaccaaagtttcctgacatacaaatattctaggtaaagttttttttttatagccagagaaaataattggatgcacatagagtgaataattagaatgactctgtgtaattatttaaaaacacaattttaagaattaattaaaactgttaatacatgctcattgtaaaatactgggatacaggaaaaaagcacaaagaaaataaaacacacattaatttctttgttcacaactgctttggttacatgcttcctccactctgtagtatcatagatatcgtttcacatctttatatatttttttacaacattggttttcatggtggcagagtggcctgtgaatatactattaattcctataagaaggcttttttgatatttggcccatttctagttttttttgtggttgtaggtaaggttgtgatgaacattattaaattgttgcagacttccctattgccttgggataaattcctagacttggaattgctggttaaatgtataccaatttttaaactgattttacaaaccggcacattgatatggctttgtatatttcactaggagtctattacctgttttgcctatacccttaaaaacactggatgcaatcttttaaaaatcctttactcatttgattggtgaaaatgatactcttattctttaatttgcatttgtttcaatattagtgaaagtgaaccagtttatgcttgtaagacatgggtcttcttttgggaattgcagttttaaatttcttttgcaatttttctctatagatgtgttcctctttctcttatcaattctaagagttctttagagatgaaggatattaaccctttgacatacatgcaagtaataatttcctggctttttatttgtccttttgttctaaaagtcagtttcttttatttttcctgtgcattaattacattttcccatttattattcttttctttgcttttaggcttagaaaagacttatatcccatcagatacaaattctctatattttcttctcattctattgttatttcactttttcatttactttttaaatcccattggcatttattttggtgtaaagtaaattaactcaatgatactgcatgtctgtctggaaacaaagtcgtcattttgaatgatatccttctttaacagtaaatgaatttttaaaacattaaaatgaattgatttgagttgaaagctttttagaggacttttgaaagccctgtttgttgtttgatcctaaattttggcagtgggagtgcttctgaggccatctggtccctcttcgcgatactagaacctgtgcttgggcctctcccttctgctgcctctctcagctatgattctcagcacaggtccacagatgcccttgttcctggagagaacttttgtccccacatctgtggaacctgtagttgctagctctcaggccaggcagacatggccactgtcctccctggacctctgttggcctggattgcccatgtgcaggattgggtaactgtatggatctcagcctcctggattcctactgggtcttgagcaaaaaacacaacccctggacagctgcatgcagccttgcacatacaccctttgggtgagctcctcaacaacagcctggctgtctgtttggggtatctcaggaacacagacagcactcatttgaacactatttgtataagcagctagatggtgatcatttgtttagttcctgtgaattgtggtcctttttaatgtctacaaaattcaaggcrccacagacatttaaaggccaacaagatggaccagtagaggtatattttctgtttaggaaattacattttcttctgtgaatttgcctttaacgggatgtttcatatcacaagaggcagtgtagtgttaacaaaacattgggcttcaaatcagaagtcttctgtttgtgtcctggcattgccaccgtgcagctgtgtgaccttgggtaattcacttaacctctctgagtctctgttggaactttagagggactctttctgttctataacaccaccatcaaattataaagagactgctgtgtggtattctccagcctagaatactgtggaaatttgcatttgtaatacctgttaatacacatacatgtcttcagtttagtcagtcattcagaagcctgagcacagcaggtggcagatgggagtataggaatgtaggagcctgtgtttgtgtgtgtgtgtgtgtgtgtgtgtgtgtgtgttgtcttcaaacaaactcataaaaattctgccgctaggcattcacaaacagtggttgtttgttgtatagatccctactctttctgtcacttttttttttttataggaaaagaccttctaagattatgtaaattacattttcgtttactggctatttttatgcatttcctgttctttcaaaggactagataaaaattttctgtatgtcctaagatctctgactgcctcactttaaattgtaaagaacgattaagagttctaaaacattgaccctgcgatcattggataagattttaattttttcaagattaaaaaaattgagtgtgctaatgacataaaggttcttgcaagagctgctagtctagcctctgatacagatgtgtataaattcatcatcttcgtgcagacattattggtaatagagatttgcccacataacatggggagcacagaggagaagagagaaggagagggattcagggaaaaggtgacacttgagctgggcattgaagcataaataggcattttctatgtaaagatgtgggaaaagggcattctagattctagaaagaagagcacgtgcaaaggcaagccactgggcaaaattgtggcatttttgggcacacgaagcagtacagagtggctggccagaaaccatggtaggggaagggaagagggttgctgcaaggtaggcgcctacagtaaaaggaacttgtacgttacactaactggtatgcaatgagaagccaccgaacatttttagaccacagagtgagagcagatttcttattcacaaactcaactctataaacagaaaggaagagctgaagccatgagagagcctagggcaggcgtctgatacagtcctcatatttgaacagtgctttacagtttataaagtacttgcacctttgttgtcacgtgcacctcttccctctcctgagtggtgggtgttaagcttcctctgcagacaaggagcctgaattcagagacatgaatggccctgggttgctcagctggtgcagcgggcagagggagaggtcaacatgtcaccgaggtcctttgccttttcgcctcatgccacagggaagcatatttcagcaaaatactgaaatatttttccaactttttaaatgagatttgactttcaaagtaactttaatcttgattaaaaaaaaaagtttgacaagacaaacaacttttatcctgcaggtattgatttagtagaacagagtgatgtcactgtgccttgttgctgacattttcctgttatgatagccttctacaagctgatggtttgttttttctgattagctaaaatggaaagaaaaatctccagtgtgcttttattaggataggatataacatatcttaatttatgtttcagttatttcaataactttgatcataccattttgtcatagattaagttggcattgaggctgtaatttcttgctgtttggaaatgactctttattgagtaaggcagatttattttctttgtgccattattgaagattatagaagtggctctgcttccattttacctaaagtcgcataggctgtggctgttgagcttgcattctgagcgtagctttttgtagagctgttcagccttccaacgcttgttggatgacatccagccccaccctgttctgccacctgctctggagaggtctaaagcaaaatgttccagtcatttttgtttctaaaccagaagcaagtttctacatctttaattttgttaaaatatagttggaagagagtaagtctaggtcacagaaaattgaactgtgctgagatggagtgggtaggtggatagtcctttagataatgagtcgactattagaatttaaaggcatctttctagagaagagatgaagaagaaaacagctctaacaggtgctccatgccccaactgagcctgtctgaacttacacatggtctagaatttattggatgatatatgtttactaaggtaattataacatgtacctgaaatgagagagtttttgcaggtaactactaaatttgtagctgaattttctggaggtcaaagcaaaaagggagtgaaatgtatcatatgttaccattgtccagtctaaggtgcacactagctcattgggaaagggtggcctctgtcttcctacctcccccaaaaggagatatctattcgatcttagagaatcatagggacaatacctccttcaatatttttttttccccagaaatggggacatgttcttcatgaggctgcactatacattggctstttataaaagtgaaagcataatatcaaaccacagctcagtggtggtatttccctggggagctgaacctttacagtttaggtgtcctacttttcattggttttatgtgtttagaaaggagagagaatagaatattgagtttgtgcctggtggtttctctttatcggtttctgcagccttatttttgkcaggaacaggatagcagtcagttgaaggatgctatgtgcccaaggtataacaaatcagtgtgaatcgcactgggtgggtgattaaggagccaggcgatgtgctggttccttcttccctcttactgagcagcctgcttggggttggctgggcctggtggagaacttaccttgggtgggcccttctgacctttttttttttttgagttggagtcttgctgtgtcacccacgctggagtgcagtggcacaatcttggctcactgcaacctctgcctcctgggttcaagcgattctcatgcctcagcctcctaagtagctgggattacaggtgtgcaccaccatgcccggctaatatttggcatttttagaagagacagggtttcgatatgttggtcaggctggtctcaaactcctggcctcaagtgatcctcccacctcggcctcccaaagtgctgggattacaggttgagccaccgtgtccagccccttctgagctttcagtgttactccccatccctaagacatgagatctgggccagaatctttctcagagggggaaattccaaatgaacatattttgaatgtcttaaaaccttatctgttagaggaacttttaagaaaagatcaaacatacttccaattttacaatagttgtcaattagaggatggaattgattttactatttttcaacaactttattaacatttttttgcgaacctctttttccaattcagcaaacttttgcaagtcttgacatattcttattctaggcattggtgggtacgtgatctcacaaaattgtttaaggaattttaaaaaaaattatagaaaataggatctatgttgaaagaattataaagtgcattacaatttgagacttaaatttccatatcttttaattttacctaaatttatatgaattttaaaatggtgattgttggccaggtctggtggctcacgcctgtaatcccaacaatttgggtggctgagatgggtgggatcacctgaggtcaggagttcgagaccagcctggccaacatggtgaaaccccatctctaccaaaaatacaaaaattagccggctgtggtggcagatgcctttaatcccagctactcaggaggctgaggcaggagaatcgcttgaacccgggaagtagaggttgcagtgagccaagattgtgccactgtactccaacctgggtgacaagagcaaaactctgtctcaaaaaaaaaaaaaagtgattgtttttcatgtttggaattatatgacatgtatgtattaagagtctaatttatttttcaagtataaatgaggtaaatgcaaatcccagaagactgttttctatgcacacacaaaactacatttcttttagtacacagggaaaggtaaatattcaaattctttccgttgggtgacattttgttcacatatttttgtagggcatccatacttttgttttacactgaacaaaaggacagtgtgagggacagatgtcagagtgaaggtgtgaatttgcaccaaatgccaggtttagggctcagaatagcatttttttgtacgtggggcgccatgaacgcaaagacttccagcgggatgggcgttgagcagggattgtctaagaggaatcaaattgccaaatgtctgctgccagattattcttccctaaaattgatctccctgagaacttgtcttgcggcccaattcccaccagcttccctctgtcctccccgactttataaagaagcttatctgactctatgctggtgtcaaacacctccaggtaccaaaggaagaattcaaaatcctggcatggagaaagtgaatgactagtgactacagcaaacccttttgcaggtcacgtggctcctattcttggctttcaaccaaagtgaaggaggatctaatctagttatcccctcaggtagatcaccaacagatcactatgggatttagaaagatgttaaagaagcgtgtgacacggctataactaaacactctccattcctgtctgttaaagcgaacaaggttattttatatatatatatatatataaaaatataatgaataaataggaataaaattgaaatcagtgaaatttacttatagacaaggccctattcactgtatttatgatcaaattccacttttgattttaattatttgtgaaatgtgtaaaatctttatattgttttgatcaactgtgaaacaaaggtaatcttaataataactcaaattcaggatatatagtttaaacttttaaagcattatggtcacaagaatattttttaaatgaattttactttacctacatagttttgtcatgtagaaatagaacagagagatcaatacagtaatttcaagcgtgaagtataatctgttagaacaaaaatctgtggggggaatggaatgaaaatacaagctgaaaaatttgttactcagactttcttttcagcattttttagaggatttgtgaatttcagagaaaaatgagtgcatgaggtcaggtgcggtggctcacgcctgtaatcctagcacttcgggaggccaaggtgggcggatcacctgaggtcaggagttcgaaaccagcctgaccaacatggtgaaaccccgtctttactaaaaatacaaaattagccaggcatggtggcaggcgcctgtaatcccagctactggggaggctggggcaggagaatcacttgaacctgggatgcgggggttgcagtcagccgagattacgccactacactccagcctggagtctgacagagtgagacttcatctcaaagaaaaaaaaaagagtgcatgaaagaaaagcttgttaattcctccttgacttcataatgatctcacctctaacaagggtttcccaatattgagaatatcttaaacatacatatgctatcctctccgtccctcctaggcccgccctctacctgaggtaactagtattcttggtcttgtatttattgttctctgccaagttttgcagggcttgaatattatgtgaatttgacagcttcctttaggacaaagaataaaacattgtcagttaaaaaaaaatgcccactccagtgcagtgtcgcccagcgtgagaggttgtgtggagaaggggaagttaggatggagcgaggtggtggtctttaccaatggcagtttccttttgcagattttgcaaaaaaaacgtgagcatgtgcgtttattgttagagccacccctcagacttggaaaggagctcataaaagtaagggctcctgaaatttaaacttcagcagtcactgtgaaactacctctgtgtatgtgtatgtgtgtgcatgtgggtgtgcatacacacatacatccctgaaaactgtgttggttttagttgattgtaactctttttttaattaaatttttttttttttggggcggggagagagtctcactctatcccccaggctggagtgcagtggcacgatcttggctcactgcaacctctgcttcctggattcaagcaattctcctgcctcagcctcccgagtagctgggatcacaggcacacgcctccatgcccagctaattttttttgaaatttttagtagagatggggtttcaccatgttggtcaggctgatctcgaactcctgacctcaggaaatctgcccgcctcagcctcccaaagtgctgggattacgggtgtgagccactgcgcccggcctggtaaaatatgaattttataccttgttctaggagaacaggacatatatatttgattgttattgctattgttttataacttggaggaattatgagctgaaattttattacttacactttattttctgcattttttaaaggacatgtgaattccagagaattgtccttatttattttggctgaattaatagggcaaatttgcctcctctgaaggaaaaaaaatagacaagaaagatctctttaaataccagcctggtgttgttctgtgttagagaaattctggcttttgcttcagacctccagtcctggtttccagaagaggagcactttctggttctcattcaggcccttagtggatcttcttccaagatttttaaaaatatgaccattagcttacattttcctatgtgttcaatcctcttctcagcagaagtgtttgcggtggatttttgagggtgggagtgtggtcaatgacgcaactgagcctttcagggacttggaaataaagctgttttattgtgatgaccagttttgtgcagaatcatctcattcttttctgcacgtggtgagttttgaagtgaaacttaaagtttaatgagatacagcagctggagttgggcattttgaaaagaggtaaagagagataattgtagtaaaacatactgtaaggccttacttatctggaatagcatggaatgaagagctccagataatggtgttttctagaaagtgaaagtttagagctttaaccatcataccctccccttttttctttaaccatttgttggaaatctctttaaaacatattacacatggttttcttctccagtggaactattagtcatcgtttgaatctcgtaagacattgtttctggaatctggctgtgatacagtcatctcctctggatccgtcatgatgggtgggacccgctgtcctgcccttacctggccttggtctgtcctgctgggtgcactcttgggtctgttgtaggtttgcatctcctgtgtggtcccttggccttgtccctgctctcaagtggctggtcgtagcagctctccatcccactaacctgctgattctaacaggcagtaaattcagggagcaaatacagaacgtgttggaatttgtaaaacagcaggaatggccctcactggagctccaagtgcttgctggatgtttcctctcctggagacaggagccgttttttcctggtgtgccggctcacttaccgcacttaaaaccgactgctcttaatgaataagggaacagcgtgcctcatctttatctctttacctcttttagacgttaggccattagctcttattttcagttgtgttctacataagcaagcctgatggatgactctgaataagtaaataagatttaattgaattatgcaattttcagtttctctcagataataccaaatcaaacaaaggtgaagccaaacacacataaaagattcgttttgctaaagcacagtgtgaatattttaattgacttttattgtatagtcatgtgccacataatgatgctttggtaaaggatagatgcttattctgatggtggtctcataagattataatactctatttttactgtacctttccatgttaatttttttgttttttgagacggagtctcgctctgtcacccaggctggagtgcaatgacacaatctcagctcactgcaacctacgcatcccgggttccagtgaytctcctgcctcagcctcccgagtagctgggattatgggcaccygccaccacacccagctactttttgtaccttttaaatagagatggggtttcaccatgttgtccaggctggtctcgaactcctgaccttaggtgatctacctgcctcggcctccgtaatcccaaagtgttgggattacaggcatgagccaccacacctggcctaggtatatttagatacacaagtacatactattctgttacagttgcctgcaatatattctgtacagtcacatgctgtccaggtctgtmgcctaggagcaataggctataccatctagcctaggtgtagagtaggctgtaccatctaggtttatgcaggttcacgctttggtgtttgtacaatgatgaaatgccctaacaatgcatttctcagaatgtgtccccattcttaagcaatgcatagtggtagttacatatcaacaaaattgaaaagtaaaaaataaaaataatacaataattgtaatgataaactgaaattttaaccttcaccttagctataagaatagaggtatagcctcctttcccataaggatttcctggagtacagagmcctagttccaaatttttttccaaggccactcagaaagggttgttaagcttctttgttttctgttttaaacaagaatttcagaagcaagrtgtggagattttgcctattagagatttttttcttggtcttattttcttttatatcaagtgatttgactaaaggactgaaagtcctgagtgaggatccagggcccaggcagacatactagggccttgtgggtgacagaaaaaggcactccttgggactaattctacaacggtgcccttcctgaggcgaacactggcaccatggcttgtgaatggagcatggcctccctttcagcccctgacccctcctcccaggccacgtcaggcagggcactctggtgtggggtgcagtcctgtgacaatccctgcatcagtgtggggcctggcaggaacatggttggaggctcacagatctgagtcctaaggctcgcagggtctgtccagggcacctgtaagtaagccatcatcactgacattgtgttgatttaagaattgaaactccaggcctggggcaacttgccgagggttataaagccattacatggtagggagtggggtcttgagccagagctctggtcatctctgatgacgaccaaggcccacccccctccatcccatccggaatccagattgcattggttgagcgtatcacccctctcttccctctgttttccatcctcatggtggtcacagcagctcagcccattgccctcttctgcaaggccgagcccaccctcctgggctgcagccatagctgtggctgtccttacccgctgtggatgccgctgtgggacttctctctttttctctccacaaagaaccaaagaatgttctttgtggcacatttttttttttttttcaaccagaaagtactacctcaagcctcctggaaaattccttattatttcagaaacatcactgtacttcttccgttgactcagcacttctgtctccttttcaagtgtggatttcagacccttgtcattctatggagcaaatgaaatacagtcttgaggagaagcattacgtaacattaaatttcatcacagctctttttaagaatactttgagaatttcagagtgttttcaagggaatctctttgacgttagttcctcctcttggttcctcaccagataaaggaaatctccaactctggggaagacatgtgagggaagtctgggagaatgtcgtgcattgacacccatgaacttgctgacatctggaggaatgagcagggctgagagaattccggtcctggtcctgcctctgttgctcccaccacgccagggaaataataattcccactcagcccgctccacgggatgtcgtaaggacaaaatgagatgtgatatatgtggaaacacttggaaaattcagacgttaaagtgactctagaaatgtaggtgtcatcatggctggaaatattagtatagctttgagagaaaaggacatttttggtcaaataagtttacagaatagtgaattattctctccttgtgggctctcaacacgtcttaacattttaaagcctcccctaagtcctgcaggaaagaaatccttttcgattctgtttaacttagtgtttctcagtgttttttccccctcctgttagctgcctctgtgaactgctgtgagtggagttcttggagggcttgtgaactcagcagaaagactttgtgatatttattttggctgcttatttactcaggtttattccagatacaggaggtctccagacactgagttatagatcagtgaggtattattgtattttattatagacacatacatatacaaatacatgtgtgtgtatatatacacacacacacacacacaaatacatgtgtgtgtatatatatacacacacacacacacacttatgcaggaataccttgttttattgtggttcactgtattgtacttcacagataatgcattttaaaatagtaaatggaagattcgtggcaaactgttgttgagcaagtttatcagcaccacttctcatttttctttttttaaaacttttattttaggtccagaggtacatgtgcaggtttgttatataggtaaacgcgtgtcatgggagtttgttgtacagattatttcatcacccaggtactaagcccagtaccctatagttattttttctgtttctctccctcctcccactccccaccctccagtggaggccctggtgtctgctgttcccctctttgtgtccatgtgttctcatcaattagctcccacttataagcgagaacatgtggtatttggttttctgttcctatgttagtttgctaaggataatggcctccagctccatccacattcctgcaagaacttgatctcattcttttttacagctgcatagtattccatggtatatatgtaccacattttctttatccagtctgccrttgatgggcatttaggttcattctatgtctttgctattgtgaatagtcagcaccattttttckgataacatatgcttacttagtgcctctgtatcatattttggtaattcttgcaatattttcaactttttcattattattatatctgttatggggatctgtgatgaatgatctttggtgttactattgtaattgtttgggggagccacaaactgcacccatataagaaggcaaatttattcaataaatatgtgtgttctgactgctccacctacctgtggttccctgtctctctycctctccttggacctccctattccctgagacayaacaatattgaaattaggtcagttaataaccccacaatggcctctaagtgttgaagtgaaaggaaaagttgcacatttctyaccttaaatagaaagctagaaatgattaagcttagtgaggaaggcatgttgaaagctgaaatagaccgaaagctgagataaactgaaggctgggtctctagcgacagttaaccaagttttgaaagcaaaagaaatgttgttgaagggaatgagaagtgctattccggtgaacacgtgaatggtaagaaagctaaggagcctcattactgataccgagaaagtttgagtggtccggatagaaggtcaaaccagccacaacattgcgttaagccaaagcctgatcctgagcaaggtcctaactctcttcagttctatgaaggctgagagaggtgaggaagctgcagaagaaaagttggaagctaccagaggttggttcatgaagtttaatgaaagaagctgtttctggaacataaaagtgcaaggtgaagcagtgagtgctgatgtagaagctgcaacaggtcatctaggagatctagctaggatcattgttgaaggcagctacactaaacaacagattttcatgtagacataacagctttctataggaagaagatgccatctaggactctagttacagaggagaacccggtacctggctttgaatcttcaaatgacaggctgattttcctgttaggggcttatgtagctggtatcttaaagttgaacccagtgtttatttaccgttctgaaaattgtagggcccttaagaatttgccaaatctactctgcctgtgacagcatatctgtttatagcatggtttactgactattttaagcccattgttgggctttaaaaaaatagtgctcagaaaaacagattcctttcaaaggtcactgctcattgacaatgtacctagtcactcaaggtctctgatggagatgtacaaggagattaatgttgttttaatgcttgctagcacaacatccattctgcagcccatggatcaaggactaattttgactttcatatccttttatttaagaaatacatttctttttttttgaaactcagctctgtcacccaggctggagtttttataaggatatagctgccatggatagtgattcctctgatggatctgggcaaagtacattgaaaatcctctggtaagaattcaccattctggattccattaagaacatttgtcattcatkkaagaaggtcagaatatcagtattcacaggagtttggaagaagttgggatgacatcgagggggtcaagacttgagtggagaagtaactgcagatgtggtggaaatagcgagagaactaaaattagaagtggaacctgaaaatgggactaaattgctgctatctcttgatcaaacttgaacagatgaacagatgaggagttgcttctttttttttttgagacagagtctcgctctgtcacccaggctggagtgcagtggcgcgatcttggctcactgcaacctccacctcctgggttcaagagattctcctgtctcagcctcccgagaagctgggattacaggcgcctgccaccatgcccggctaatttttgtatttttagtagagacagggtttcaccatgttggtcaggctggtctctcgaactcctgatctcgggtgatccacctgcctcggcctcccaaagtgctgggattacagacatgagccacagtgcccggccaagttgtttcttatggataagccaaaaaagcggcttcttgagatggaatctactcctggcgaagacgcggtgaacattgttgaaatgacaacaaaggattttgaatatttcataaacttagtggataaagcagctgcagagcttgagaggattggctctagttttgaaagaagttctactctgtgtaaaatgctatcaaaccacatcatatgctatggagatctttcgtgaaaagaagagtacatcaatgtggcaaacttcgttgttgtcttattttaagaaagtgccatagccaccgcaagctttagcaaccatcaccctgatccattagcagtcaccaacatcgagacaagaccctcctccagcaaaaagattatgactcactgaaggctcagatgattgtaagcatttttagcaattaagcatttacaatttttatattaaggtatatacattatttttagatataagtgtattattgcacacttaatagactatagtgtaacataaacataacttttatatgccttggataactaaaaaactcactatattgtcatatttgctttattctggtggtctggaactgaacctccaatatctctggcacacatatacacaaataacatttctgtaatctgatagttttgccagataagtcatattctcattgactaacagagctcaagttttaatcaacccagcaaaaagcatttctctcctggagtttttcccatgtacacctttcccctgaagaagcagacgtatcattattttaaataattcttccttcttaggaaaaattataggcatattttcttctcacagctaccaaatgtccttgatatctgtgcatgcacatttatatgtaaaatcagagcttcttgtggttttagaattggaagaggccttagagatgaacttgtctggtgattctcaacccctaagcatgttcttaacgtgaacacttgggagtggaagcctggggaacctgaaataactacacatttcctgctaaccttctaattcctagtctgccatccttgcagtagtaaggttcccctgtgcagtgggaattttctgtccccagggggttggggacagaaaaatgttgcactatagatctcatccaaccccgcattttacaggtgaagatgatgagctacaagattcaatgatatcttcaaagtcacacaacccggcctagaaataggctgctgctgatcaatccactgctttctctgcctatgagttttccccaatgtcagtgatttctgtcctacctctgtaatttacggcatatcacgaaaccccaaccctcatacgcttcatcattttaaataaagactgacttttatatgtgaataatttatgaaagaaactgtaatccatattcgatgtggaaatgtaaccacatttcactcactatgaaaaaggtaacactaaaaataaatgctatgaaaaaatatattaaattttaactaaagttccccacttaagtttctgagcctgaagttttctctctgctaaaaagagagattatcaagttatgaagagtttaaacataacactagccccaaacgatgacactctttttatgtaatcggaattattgaatgaaaattttgaaggaaataacattctctcgacataagtccaggcagtatttactaaccaacacaccatctcaaatcctctcaagttccaccagtgagtgagctgtgtacccattcacgaggaactgtctcccaaaagggaagctatatcaggcaaatcatacctctgtctgtatctaagctggctggaaggtattagatttggtggcaatcagagtattaattggaaagaacaagtggaaaattgtacatatattggctgtttatcttgtgtatgtgtccacagacacccttagaaaaactgaaagcacagtgcctgcgatatgataaaagctcagtaaatatttgttgaatgaattgatgaatacctggtgaatggcaagcattctgcctcaagtcaggtagaaacaatagactggtaaaagcaagttgctgcattttgtttcaaggcactttgaaatgtcttatcagtggacatgaagtatagaagacttagcagactcaggaagagcagagcatggccatggaatatttaacagataatgaagagcatatatgtggccgggcgcagtggctcgtgcctgtaatcccagcactttgggaggctgaggcagccggattgcctgagctcaggagttgcaaccagtctgggcaacacagtgaaaccctgtctcgactgaaatacatgccggcttggcrgcgtgtgcctgtagtccyagctactagggaggttgaggcaggakaatttcttgagtccgggagacagaggttgcagtgagccgagactgagccactgcactgcagcctgggcgacagagcaagactccatcttaaaaaaaaaaaaaaaagcatacatgcatttaggcattaagatgctatagaccattatcttttatagtctgtgtcacacttcatgttatgtatcaagaggagaaaagcatctcagcccaagatttgattcctgattttactactcaatagctagatgatttggggacaactgcataatatctttgagactacttagatatacaaatgaggactatgataatgcctacctcaaaggttgttgtgagggttaaatgaggcaatgcaaatgaaaattgctttataaagactaaagtgctatattaatttgcctttattgaaattacatactattaaaatgaccagcgaactaccatttgtgcagagtggttgaagaatatggcatgctgattatttgaacattctggataatagaagtatagtacatgtctttctggttaaaaagaattacaataaagtattcttaacatcaaagcttactaacacaactaatcgtttggatgagatttcaagatatttctatatattttgtgggcagcacttgaacacttgaatagtataagatgttgaggaaaaaaatgcttaggaaaagaatacactctaactgataccccaaaccatgtatgttaaaaaagtagttccttaaaatatacatttactcattattgatcccttgcttataaaaaatgtatgaattgaggaaccatcattggatatagagaagtagaattatagaatttgtttttatgggtattttgaggggtagaaaacaagaattattttattttgccctgttcagacaaaaatatcatgttagctttttaaatagtatatagtrcaattggaactcaatcttaagacatttttgcttaatgaaaatgctaccatgacagatcttttttttttttcctaacaggatgtatatgattctcttttcattaaatttgcctcaaagagtttcaactctcaatttttagactaactttactttagataaaagggtttttatactattatttctttttttaaatttccagcttttattttaagttcaggggtccgtgtgcaggatgtgcaggttcgttacacaggtaaacatgtcccatggtggtttactgcacagatcatcccatcacccaggtattaatcccagcatccactagctattcttcctaatcctctccctcttcccaccccctgcccgcgaaatggccccagtgtgtgttgttcctccccatatatcgatgtgttctcatcatttagctctcacttataagagagaacatgctgtatttggttttctgttcctgtgttagtttgctaaggataatgacctccagctccattcatgtccttgcaaaggacatgatctcatccctttttatggatgcattgtattccatggtatgtttgtgccacattttctttatcaagtctatcactgatgagcatttaggttgattccatgtctttgctattgtgaatagtgctgcaatgaacatatgcgtgcatgtctgtttataatagaactacttatactcctttgggtatgtgtccagtaatacgattgctgggtcaaatggtatttctgcctctaggtcttkgaggagtcaccacactgtcttccacaaccaacagtgtaaaaacattcctttttctccacaacttcactagcatctgttattttttgactttttagtaattgccattctgactggtgtgagatggtatcttattgtggttttgatttacatttctctaataatcaatgatgttgagctttttttcatgttttttggctgcatgtatgtcttcttttgaaaagtgtctgttcatgtcctttgcctgcttttaatggggttgtttttttcttgtaaatttaagttccttatagatgctggatattagatctttgtgagatgtatagattgcaaaaattttctcccattctgtaggtagtttgtttacctattgatagtttcttttgctgtgcagaagctctttagtttaattagatcccatttgtcaatttttgcttttgttgtcttcatcattaaatctttgcccatgcatatgtcctgaatgacgttgcctaggttttattctaggttttttatagttttgggttttacatttaagtctttaatccatcttaagttgatttttgtatatggtgtaaggaaggggtccagtttcaattttttgcatatggctagccaggtctccctgcaccatttattaaataggaaatcctttccccattgcttgtttttttcaggtttgtctcagatcagatggttgcaggtgtgtggccttatttctgggttctctattctgttccataggtctatgtgtctgttcttgcaccagtaccatgctgttttggttactgtagccctgtagtatagtttgaagtcgggtagcatgatgcctccagctttgttctttttgcttaggattgccttggctattcaggctctttttcggttccatatgaattttaaaatagtttttttccaattctgtgaagaatgtcaatggcagtttaatgggaatagcattgaatgtataaattgctttgagcagtgtggtcattttcatgatattgattcttcctatccatgaacaacccaaatagtgacagtgctattaaaaaattgtaatcaaagccactgatattacatgacaaatctttgtgagtactttcttcctgttagatcattttaaaatagtttacattcttgaatttttaagtcagttttaaaaaatagattgcttgtattagtctgttttcatgctgctgataaagatgtacccgagactgggaagaaaaagaggtttaatggacttacagttccacatggctagggaggccttacaatcataggggaaggtgaaaggctcttcttacattgcagcggcaagagagagaatgagagccaagcgaaacgggtttcttcttatcaaaccatcagatcttgtgagacttatttactaccacgagaacagtatgagagaaactgccccccaagattcaattgtctccctctgggtccctcccacaacmcatgggaattatkggagtataattcaagatgagatttgggtgaggacacagccaaaccatatcatcgttcaactagaaaatatatatatatayacacacacacacttagtgaaagttattttattaattagccaggataaaccttatttaaactatttagatatgagtcactttgaggaaaggttattatatgaaaatatcactgaaataatcagaaatttctttaaaaaatgctgttatgctataattcatttcataaagttctgcttacattcataaacttgagccgtttgtacagatcacttattatcctcatataataattttctgacacatccaatctgcgtggctgtgataaaaaatgatccaaaatgttgacctataacgtgtcttaagagctcttaaaaaaaagataaaatccttgaatgatgccaggcatctagaataaaattgtcaagagaaactcaactaattttgagatcaaattttaagatcaaatcttactcctttattacaaatgttcagtaacgatctcatcaacatgatgtctgtagcaaattatttttacttaagggctcagctctgacatttgaagtgaatggttgtgagtgccagtttagttcaggaaaatgctgtggttaagggctggcccattttcacatggaataatattattcaggtcttgttttgtggtatttatgttgtaaataatacatccagagtccatgtagctacctatgcctgcccgtgaatgatacctacttagcgttgtcttagatccagtggcaataacgtttaaatgctgaaggaaatatcttttggtttgctgagagttttaattagggttcactttgctgctaagacagcagcatttaagctactaggttcttggcacaatattgtttccatatttctttttctttccagaaggcttaattatttcttcacctgaattttaacaaccattttagctgaatgatctagaaactgtcctcctcaatgtgtgttctgagtcagcagcatcagcatcacctgtgaactgttagaaatgcagaatctcaggcccaccccaaccccactgaatttcttagaagctgcatccaatggaagcatctatatgaaccacacttttgagtagcaaggatctagagttcttgtgcagatctctctctctctctctctctctcwctcacacacacacacacacacacacacacacactttcaaaagtattttatttatataaatgtttttgatcattgaattaaaagaaaataatgcaacattgaaaatatgtattttttgagacagagtctcactctgtcacccaggctggagtgcagtgatgccatctcagttcactgcagcttctacctcacaggttctagtgattctcctgtctcagcctcccgtaattcagaattacggaggctgaattacagagcctcctgtaattcagcctctcctggaattacaggtgcccaccaccacacccagctagtttttgtatttttagtagagacagggttttaccatgttggccaggctggtctcgaactcctgacctcaaaagatccacccgtctcagtttcccaaattgctgggattacaagcatgagccactgtgcctggccaaaaatattttcataatgaagactcataaataaatatcacacatgtcagtgaaaaccaaaagcttttttctgtcatcaagatttcaggattctttttttttttttttttttccagctttmagtgcctatcctttttgtctgggaaggctgatttctttagctcttttctttctctgggaataatgcattcgcattgctatcgtagttatccttgcagcggtgtcagactttagctgcttcctgtagctcgttccctgacagtgttcatgtagcgtctcctcctaaggcggcagcctcgctgggtggattgagtggttaccttggatcccttcatgcccgtgctaatctcactccgtgctcttctgtgcctccaactggaatgaaagcttctgggagtagagaccccgttttgctgtctgctctctccagcgcctcatgatgtcagatgtagaataatccttcactatatttgctgtttctggaatagtagagaccacaaggttctgaaaaagaggccactggttcagatgagggcaaggcagttgcccaggggtagatggcatacctccttggcgaatctgattttgaagtccgtgccctgaatcacctccacgtcccaccttgtgcctggtgaatgtcagccctgcactgttaaggtgctgtagcggatgctgtgatgtgccaccgttcagagaggcactcaggctgccagcttctgagcatggctaccgatgtgtcatggctgggtccctccttcagcctggaaggagtgctgtgccccgtgtggaaggaaacctcctcgcccaaggttatgcctctcctctcggggcatcccacatccaatgcctggttgatgtggggatacaaaggtctgatccccttgcgtcaatctgggacaactctgatgggccatcccagttccagagctcctgtgggacaggctgagctccgttgcagctgcatcgcagtttgccttctctctctgcccgttcctgcgtctccactcctttgtaggttgtatctgagtacatgcacatctctccctcaggatctgcgcaacagttaaaggtgcacgcgttagtgraacctcgcaacacatcagtgaccagggttacagttcgctgactactgaatctggactggaacctttttcaatycagtgcttttctgactccaccactctgactccctcaagtgcagtggttctcaacagaggtgactttgttctccaggtgacatttggcattgcctggggacttgagattattactggcatctagtgggtagaggccagygttgttgctaaatgtcctgcaatgcacaggacagttcccgcaggaacaattatctggccccaaatgtcaggagtgctgaggttgagaaactctgctgaatgtatggatgrgcattggtcaccaagatagaggagaagaattcaatattgctcttccattatattttcctaggatgtggactctatgttttagacaatcttccgtattaaaactatcatgtgaataaatgtatttttgttacatatgttttctggagtttacatgtattggtggacaacacataagaagtgcgtagggtcagagaaatgccactcgaggtcattatttccactcaattgctcactggggaaaaaacraacatgagttctattctgtaatcagtactgctggcaacagtactgatcactaagcactgtgagaagcacatttcagtacaatactcttgttgtcctaagttctgtgaccacttttcctagattttctgtttttcttgggatggaaataataaatacttcctcttgcctcctctcagtctagagtaacaataagggggacatgtaaatccaggaatttcacaccaggatcctggaggttagctttcctgttttcttcttgccagtcttatgcattacatgggaactcatatctatcagcacaaaactcagtaaacgattgttgagcgagtaagtcaggaccaacgcgtcaatcacatgatgcaggatgctgtatctaagcttgcacacttactttaggaaactcaaatggaaaccccactctcaaatagtctaatctaattacctttggttctggaaagcagyatccaagaggaaagagattgtaaaatcctcagaggaagcggggaaagtgggtctgagaagaggggacgagagcctaggagtcagcaggtagctcaaaggatgagatggatgtctctctctgcttctttccaatcttatggaatttcaggatattggtattcactgttgctgatgacctagagaatgatacttcccattaatgtgagtttgaaaatagtttctatccttgaataaattatgcttggcaccgtgcagaccaaaatagattcaagttatgtgagtttcatacttgaccaaaaagcaagaggctgcgcgtcattcagagctgaccccgggctggcaatgagagctcacagtcttgctctcctgctaataccaagcccctcagtgctcagcaaaccccaaagtcgcctgggcctgtgaactgtgtaaactatcctcccagacacttcggactggagatcaagacaactttgaaaaatcttccgaaagggaacatgaggtccacctggccataaagtgccttccctgtgtcacctttttgctgtcagcttgtggctcaaggatgttgtccaaaactgctggagctcacgtttcaggcagagatgtgtgtctcatgtagctgggcctttcaatttatgggaaatgttatagtttaactttagccattttctgggatctattttaaaactcctatatgtggggagagacaaatttaatgtttaacacaacattgctttgactgtcttttgctgtactattcaaaaattaatgttacatgaataggaactcaaacacagctgataggaaagtaaattagcaaaacttcctcctggggataattttttaaatatcctttgatctaaacattctttagaaaatttatcttaaggaaataatcatagatgtgkttaaatatctagctacagacatgattgttacagtgttgattgcaataatgattaattataagcaacctaaacatcaagaaaagcaaggagtaattaaataatttattgtactgtatgggtatggtatgacttgtgatacagcagttgagaaagatggagaggaccacttaatgacatgaaatgatttttaatattaagagaaacaagattatagtgatggggaatgatccctgtatatttattctaaaaatgtagccagtagttatctctgggtgaagagattatgagcaagtaattttttttatgtgtatttttaatatattctacattgaataggagttacttttgtaatatgtaaaaaaaaaagttactaaaaataagggtgatgtttgtgaaacacataaagaaacgtacgcaaatcataagtgacagcttactgaattctcacaaagtgagttcacctatataacccaaaccaagctcaaacaggatagaccaggtccccagaaacccccctcctcaccctccaccgcctctaactgcagaggggagtgcctgttttttggaacttcatatgcagtcatgtgttgcttaacgatgggaacacattctgagaaatgttatgtgctagactttgatatgactgacagtgcagcgggtttgtttccaccagcatcaccaccaacaggtgagtaatgcagtgcactacatcacaatggctatgacatttctaagccataggactttttcagctccattatcatcttgtgggcccatcattgtatatttggctcatgactgcaattggaataatatagtatgtctccttctgagttcgtggctgcttctgctcaacattatatttgtgaatcattcatattgtttcttttggctgcagtttgttcaatttcactgctttacagagttccattgtttgcrtataccaccttccattttactgttgattgrtggacttttgggttgtctctggtttggcactattctgaatagtgctgctgtgawcattgttttggttaacatcagcgcatatttctgttggggagtacctaggaatggaaatactgatttgtatggtatgtttctgttcagctttcatagacactgccaaacagttttctggagtggttgtaccaacacacacttacacttctatattttccagtgctgatcacaagatttctccaagatactttcaactttcmtgaattatttgatgctgtcatattgggaataatttttatctctgttagttgaatatcaaattgatgttctagaaaactcttgagtcattacctacattttttaggtgagtggtgtttgatggctcaagatgaaccttctctttcctcagaacagctttaagtttcttatacttcttgtgattgaagagcaggtgaccatgtttttcttctagtaactgcattatttgaattttgagagtatcatacttttttattccactgaagagaaatttatttttaatgaagctgctttttgagtaaaaaatgctagagtggtgtgattagaaaatacagaatccttttctttcttttgtaagtgttgtcagctttaggagatttgatgatcttataagacaaccttttttaaaaagtcagtgtcctcccatttagaaatagttgatgaactcctgggagaccagcaakccctactgccagaaaatttagttcctatgttgcttgctcgatcccagagccagaccatttacctagctctggccagatagaagtggctgcttgtacagaaagaacatcgggtggaataacaaactcagaacattggatgatccaacaaaagctttgtgtggaaggtctttcatttgaggcccttaaatacatggaataattaatgaagggtggaagttggggaacttattccttctgtttctaccacactgctgtgggtatccttcatcctttaaacactccttttcgtctctgagcattcactggctaagaacacaggtccacagcctctttgacggctgcgttgtcttttccacgttctaaggaaaggcagtcagtcagtcatactaaagactgactcatgttgtttttaaatattaaagggctctgttgttgaggcagagcctaaccagtcttcagtttcctgacttctgtttctggtccagttgcaaagaagcctttctgtaattttctgtaatatgatttgtactatgtttttcatcatggaaaattaaatttcaaaactttacaaagctgtagtaagaaatatttgagaagtaggcttgggatggaggtgtgcactgaatgagaagggacaggagggtgtccccagcttgtgataccaatgtgtggctggagacagaggctcagttgcctggtcttcgatgtgttcaggaagtgccctgacggtgagaggcctgtcctggctggttaactttaagggtggcctggcctgctgctttgctcacaagcacctgcatctcatggcagatgtgcttctgatttgtgatacaaagtatctccttgtttgatttcttggacttagtgtgaacatgttttcttaaggagtaggttttgggcagggcacattactaagtcttaaaaagctttttttctctactatatatgaaaaaaagtcctctcaacgcctgccgtattttacccagggacttttaaaaaaacccaactatacccttaggtagaatagcttcttccattggggttgtgggatgggcgtgggtctgtagtccatggtttgttctgctctaaaatcttccatctttgctgagatgacgtatttttgccttctaacagacctacaaaaccatgacacagacttgatttgtatacctgttatgtcaggtatgataaatgttaatgtaataatattgactcatttattttgccgattcattacgggctggttaaagtgataaacaaccattaattttgttttatttccagagacaatttattataagcagaacaaaaggttggcttttaactacacctgcatatgctatcctcaggaaaatatttatagtttagttaatcttgtttaggcctaaagtaactgtggtttaatcactgaacaaacaagataggacagcgtggtgkataattgaaccaaaattcccattgagatgcatgggggcagactgctcccatgtggtttcacagcccaagaaactgaagggtagttttgaatcctcatcctctctaggatgaggattgagatgagaagcatggcactttgccctttatttcagtatatttatccatacacctacaagggacataagattttggtcaaacatttcttgataattgtatataagttgaagttttatatacagaaattttcttgataacagaaacatttcttgataattgtatataagttgaagttttataattcaaatygtaggttcagagctggaagggaatcccagcatttgggaggctgaggcaggcagatcacaaggtcaggagttcgagaccagcctggccagcatggcgaaaccctgtctctactaaaaatacaaaaattagatggacgtggtggcacgggcctgtaatcccagctactcaggaagctgaggcaggagaatcatttgaacctgggaggcggaggttgcagtgagccgagattgtgccattgcactccagcctggacgacagggcaagactctgtctcaaaaaaaaaaaaaaaaaaaaaaaagagctggaagggagagagtgaagcacactgaagtgaaaaactgatacccgttaggcttcaaggtgaagcccaggtacacctgcttccctagtacaggctctcttcatgccgcagtgttgccctttaaaaaccaactttctctgataattctttttttttttttttttttttttgagatggagtctccctctgtcacccaggctggagtgcaatggcgtgatctcagctcgctgcaacctctgcctccccagttcaagcaattcttctgcctcagcctcccaagaagctgagattacaggcgcctcccatgatgtccggctatgttttgtatttttagtagagacggggtttcaccatcttggctgggctggtctcctgacctcaggtgatccaccggccacttccaaagtgctaggattataggcatgagccaccrcgcccaaccttctccgataattcttaatagtttagaaagcactgtcagctgggtgttgtggcatgcacctgtagccccagctactcaggaggctgaggtgggaggagcacttgaayccaggagttcgaggctgcagtcagctatgatcacaccactgcaccctagcctgggcagcagaatgaaaccctgtctctaaaaatgaacgaacaaaaaccaaacaaacaagcaaacaaacaaaccccacaaaacaacagcaacaacaaaataatagaaagcactattttatatgctgctttatatactttagttcttacaaataaatccaaaggtcaatacattgtaaaaacaaagaactgtgtcaaaaaacattcctaatatgttattgatttattcagcaagcttttatggaacacctgctatgtgctaggcattgtggtatgcattgggaatacaaagccttaatgattttaagcacctgttctgaagggaagacagtaagaaaagtgagtgttcagagtacacagtgataaggtatgtgatggaaaatgtatccttcgaatgttgtgggagcgtagaggggtggtagttggaataaacgtgaaggtcttcccagaggaggtgatatttgcattgagttttgaaagacaacgaggagttgttcataggaaggagggaaggaaggcagttcagacaagaagaacaatatrtgagaaggccagtgtgatgattttgagaacaccattcaacatgtctagagcctaggggatgaagagatgggtgctaggagggtaggagtggtggcaaatgatgaggccagataggtaagcagtggcaagtttgtaaagagcacaccagtgtactccattaaggggttgggagtttggccatcattctaatggatggcaaaccatttgaagtaggtgggcaacatggtcaggtttgaatttgagagtgttcacccggaagccagtgttgggggaatggtgtgcaagagattgaggtggaggctgggggcagatatacaagtaatccagcccagagaagaaaagagcctgcaccgagcaggcacatgatggagggcagaacasgacattagagaatgagaatctcctggacttggtagattgaatgtggactcagggtgagtctaaccacacagctcagctttgagcttccctcagagccaaggggaggagtgggtacttttagaaagaagagatttcattgatttgttctgtttccccatttgctaatatatgaagaggagtgggcttagtggtggggaatgggagggaggctaacgggctgtgtttggggaaggctgagtttgtggtgcaggtgggttgggttttctcagaggaaatgatacagatcacgctctcaggagcatgctgtggcctggagatagaggctgtggatcatcagcatgattgccctgtaaattagaggatggggatgaagtagcctaggaagcgagtgtaagtgagaactaggaccaaggatggatccttggggaccactcatatttaagtgatgagcctcaaaaggacacagatgctggaggacaaccaggacagtgatgttatgggggccagggaaggggagagcttcgagaagggatgctcaccagggccaaacactgccgaaggtgcttagcccagagtcagtgctcataaacatttgttactctttagtgttaggatgacagaggagagggaaatgaatgaggcttggagtggtcaggaaaagcaatgcaggaggagataggatttatttatttatttatttatttatttatttatttgagatggagtctcgctctgtcacccaggctggagtgcagtggtgcgagctcggctcgctgcaacctctgcctctcgggttcaagcgattctcctgcgttggcttcccaagtagctgggactacaggcatgcaccaccatgcccggctaatttttgtatttttcgtacagacggggttttgccatgtcagccaggctggtctcgaactcctgacctcaggtgattcacctgccttggcctcccaaagtgctgggattacaggcatgagccaccgcatccggccaggagataggatttaaataaaggctttaaaatttacgtaggtttggataatagagggaaggtgggcaggcatcccaggttaaggtagtaatttagcgtggtcgcacactagaagacttctctgaggcgtgggatgggggagttatttgcttacaagttgttatctccacagattgacgctcagctccctgatggccaaggcaactgtgtgctttcctttgtgtctgtcaatcattgtagcaaggtttttggcccaaagtggtcagttaatagatactagctggaagcattgataaggtgggcgaagttggtggttcccggcaactgagtggtaaaactctactctcaggggtcccttcttgttcagggaatgtatttgcatccctccctacttaaaccatttaagaaaaagagtgttctagtttgccttttttatctgcacttaggtccccatcactccttttcttttccaaccccgttccctccctccttccctttttctctttttttcttgccaatttcttatctctctcttcctgcaattcctatttgtatactcattctttatcagaaagtacctagaagctgataaagcttgtacttaatcctttattttacctatatgcaaaatattgctggcatccttttgattggtggtgatgttcattgcgaaatattttgaatcttaatcttggcctgtatggggaagtagaattagaaggaggtatcagaggaactctctctctcactccctctcgccctctttctctctcttgtgttttaataaatatcaatgctattaaatttgtcaggtaccattataaaaatagttgacattaaaattgcaaaccctaaggtgaatacgagagctgtctgcatcctgatgaggaagattctttactttcctagcttccatgagtctttaatttgaatatggattttatgaacagagtctaataaaaatgctgggctttggcatcagaaaaacatggataaggctcttcctcagtggtgctctatgggcagttactgaccctcactgggtttttaaatctgtaagtctggttcagaagccagcctcataaggattttgtgaggattcactgaaatactgtttgcaaattaccgaacacagggcctgtatcatagtcagaactgaaggttcccttctttcccttacttcacatttttacttcatctttcttcctcccccatcttttgtccttaattagagcagagcattgaaaatcagtcaaataatctttttatgcaggaaaagaacttccttccccttatttatttaagaatctggctttgagtttgagttggaaagtgtccttgtcttatggtatgagagtttgggctatcatctgtgacctgtgttactggttaccaggaatgattatatagttgcttataatgggccactttagatttttgcaaggtatatttgtatcatctctgattcacaattcgagggattgccaaaaaaaaaggggtagggwttttcttgcatagttactgttttggttggcacagaatgcagcctcctcacccaccctctttttgattatagccaatgattacataacattttcagatcagattttttttttttttttttttggaaagcttttggagacacgtggctctggaggaatcctcatggaatcttaaaaccctgagggaattcaagaagaaaactattccacttgcttgcctctggctgcatctatatttaaattatctaagaaagatattggtaaattcttctatttttaggaattagaggagcttccacttttctcttaaaatcaaattcaaagagcaacttttttgacaagctgaatagatctttgaagttaatgaactggagcatagcttgcaactccatcagtgaggttgatcaggagtgaagctgcctcatcagcttagtctcttggaagttaaatagtagaaagaacatttgggttttgagaacatgaggatctagttttgctgtgtattgtgtctattgatgcattcctgggggatttttcccccagaggtattttatagctttgatttaatttaattttatagctttgatttgatttcagtgtacttcatctgtgggatttcatggggtcttgttaagggtgtttctctacagagttgttttagtgtttacttctgacaagtgctccaggacatctttgatctgagaccacttatgttaatctcttataatgagggttcctagactagatggtagggtagattttcacaacccaaatggcagtgagcttccaattatgaattttctgggaggatttttcttttttctttctttctttttctacccagagcccataatgaggccagcatccttgcacagggtgtggtagatgtgtgaaggtctctgttttacaggaggtacttgcttctcattccactccactttttgcagccaagattaaaccctcaaccctctttggccatcaacttccaagctcctggtttctcaccctcatcctcctggggcttcctgagcatcagcacgtgcttagcagtcactctcccctttctttttggccccggcatatctcattctctctctgagcccaaccaagcttgtaatatgatgtttattatattttatccaacatttctaggtattttttcttgggaaagtttccaggttgtcaggttgactctgtctgtcaggtcaaatagatggaagttgaagtttgaagatttgggttaaagtactggttctgctaattgtttctctggctttgcatgagtgattctgtcactcttaaatttcagttttctcatctgtaaagggagagggtgcataatacctcacagacccttaatatactgaaaagttttccatgtaagcaacttcacattgtgaaaacagcctgtagtgcatgttgttgacatcctgcccaagtccccatgcggggcaaatgctcccattgcccagcgcttgttgagtgtacattgctaaggctcatagctgctgcttctctggagaactgcatccaaatccctatcccagactctgcttctagggaagctaacctaaggcatcatcacaatgcttccccccaaccccaaggaatcrtagttcttacaaagatgaattactttgaaagtttagatagaatataataaatcagcaaatcaagaataaaccatctgccatatttttgaaattatctttttgtcattttaatttttcacttgtgagaacacaatgtatatgtaagtttatttaaggctcaatggagcaagactttgatggatctgggcataaaagtatgggtaggaaakattatctgcagcaactcaattcaaaattaagggctaagggcttcagagatcactttaagtcacacattgatttcattttctctctctctcatgctgtttccctctatatggagaattttatatacactctcttggctcttaactacagccagatttgtaagtgacgagaattgagggccagggtgggaggaaatgctaatatattgtcccaggttttatgcttgggaagcatgaagaaattcaaagagaccaaggtgttctcaggagtaaacatatcccttcacccaaataggcaagaacaattttagaactgaaatcgtgaaaggggtcttagagctttgagcagaacggtagacccagaaggaggctattttggtccccttgctagcacagattttgattcaacatctctgagcttcattgttttgtaaggattaaacatgcctgttagattgtcttctacraggctctgaataaatggtaattattttatattattgatgatggtgatggtatgaacatttttattattatcatcatttttattatcgttagagagtgtgtcttcctaataaatcctgtggcaggggctggagttctgattttagagtctgtggaataagatgatactgttgcaattgctgacttttcagattatagtattttctgccaaagaagcctggtactttgtagatccatagaatctccctagaatcaagagtaattctccttcccctctctctcaatccatttctactctccttcttggaaaaggaagaaagaaaccttaggcatggtatcaaactgaattacaagatcttgattctcggttcttaccattcctgggatattctagagacctggttctcctccatgttggccagagtccatattcattttgggcatcaaccctaacagaaatttatacataatctatcattagtcctgatgactttacttcttaaayacctcttaagtgttattacttctgtccaactcctctattaacaccattatagaagccacaaaattatctcccgtaggtttctgtagtagtcttctaactagcttacctatatcaactcagatttcatgctgaatgttctctcctctggagccagaataaaatttccaaaatgtaaatcagataaagcctcccagcccccacaactctcccacactgcccccaaaccctcagaggttttccctgactcccagaactccttcagtgtggctgaggaggccctacctgctcctcttgcttctccatcattcctcactttgttctggctctggccacacaggccttcttgattttcccctgctacgtcctgctgcaggacctttgcacatgcgggattcacctgggatagtctgacattacttaaccccaacttgtccttcagatctcaggagagtcttccctgagttgccttgtgaaactctttcctagcrctccatcatctccctggcttgattatgcacttygtgcggccagagaatatgtctggggtttgtctccactgtatcctcaaggcctacaatgacctggcacataaggaccccgtaaatgtttgttaagtgaataaataaaagaaatgagggaaatgcaggaactgaagacagggcaactggcctccttttgaaaaactcttgcaactcaggacgtggcttgtatgaatctctgagtcattgtcgtatcaggagtcagatggagtggccaatgtagaatgctctcatctcagagatagagagagggaaatggtccttctcttcacattcgggagtttacagctgattgtgtttataaaccctcccagcaagatgatgccctctaaatgttcccctcccccactcagctccatatcccctgttgtctgtctgcactgtgtgtgtgtgagggggggtcatgggcccctcttattccacctgctgtaaggccacccttggtgactgcagtgccacatgcaagggtgaagtggtctggtgctcctctgcgtgtttacaaggcttaattaataagtgtcccatgtaaacagcctgcaccatgtacgtgccatccttacatttcctccctaaacaggcaaggctttctggaagtgtgtttcaggggggagaagtcaagctggaattttatcatttgttttccaatgagtattaaaaacatttgtctttaaggtttatgtgagaatatcwtatactggaaatgtgatttcatattattttgaaatcagagttcagattcataaaatcaatatttaatgggaaacatgaaattgtaattactaagcactttttcggtgtgcttactatttttatatgtaaatatatatataaatatatatatacttcattttatgaaccatctatatgkttcataaaatgaaamtatactggcaaaatatataaaattctaatttttgcatataatatttttccagtatataaaccatgtatatatggatatggttcataaaatgaaaatatacttgcaaactatataaaattctaattttcacatatagtatttttccagtgtgctgtccctctatgtttgcatatttatatttttgagtttcacgtgatgaaaatcctgtatctgagggttgatatgcacatgtacataaagtagaccatttcgtatagctaagggcttcacatttttcttcccatatagttttgtttatttccaatttcacatttgaaggatattcttcagtatccccaagtcattatgcaatttggttgtttatgtaaatgtcctcaagggattctgaacgagaaatatttcactgtttgttacgttgtgtagaaatgttcacaaatcatgttaatttgaaaaagaataggaaatgaataatctgcctgcagttttgattccatgatcaactatccaaggtcaactggaaaaagcctgagatgttggaaaattagtggaagtttttgtgtttttgttttgttcttcttctaaaaggtatgtagaaaaggcatgacataaaaaggggagaaaaattctgtctttaaaactcagtatcgtaaaaggtcatttgattataagtgaaaatgacaataaaatggtgaggatttctggaatragtttcccagaatagagagtacctctctttttaaggctattcacatttggagaggaaattgaaagttgatgtaattttccaacagcattcagaatacgggctttaaagtttcattttcttaaacttttcatagtccttcagatcatttggcactttggaaattttaaatttcctctgctgtgtcttgaaaagtggtgaatgattggaacacccagatyatgaaggaggttagaacacaggttttataacttcaaaacatttttcacattcttatctctactgaaaaactttatggagcctgtgaatagaggctttaactgcagaattctaccttaggtgctcttaagcaactgtcggtctttttctattatctttacagatgtactagagcttattcaaggggaaaaaaagatgtgggctcagctttacaggaactgggaggaccagtttctttgctggcctaaatatacattttgagaaatcaaagggacgcttttttttttcttttgtccatgcatatagtataattgcggcttagtttgaaagtagcccgtgctttactgtttataacctgaaccatgtctattcaaagtgaattttgaggagaatattgaattggattcaccttttggttgttgtagactcatgctaaatcagactaatctttaggcatttgcctcatgtcgatattattttaaaagtggtcactatccaagcttagtcttgaaacttagaaggatttaccttccctatgcctttctttgtttttgagacagagtcttgctctgtcacccaggctggagtgcagcggtgcgatctcatctcactgcaacctccacctcctgggttcaagcaattctcctgcctcagcctcccaagtagctgggactacaggcacacaccactggctttttttttttggtattttagtagagatggggtttcaccatgttgcccagcagtctggtcttgaactcctgacctcaagtgatctgcctgcctcggcctcccaaagtgctgggattacaggcgtgagccatcgcacccggccccctatgcctttcaaattcatttttatcttagtctgttgctgtaacagcatgcctgagctgactcactggtctggaggctgggaagtccgagattgtggggctgcatttggtgagggccttcttgcagcatcaaaacacggcagaaggcatcacatggcgaggatgcaagtgcatgagatagagagcaagagagggagggcccaggctcatcctttgatcaggaacccactcccttgataactgacccactcccactatggcggcattaacctattcatgaggccagagcccccatgacctggtcacctcttaaaggtcccacctttcaacactgttgcaagagcaattcaatcaatatgagttgtagaggggacattaaaccacagcagtttccttttatgtctctcttaatctctgtgtattgaaagtagctaagtattcaagtttctaaggtataaaggagtggagcgaaggaaaaatcccccaaaagagggagagttactttgtcaaagcctagaaaatacctctcttatgagtctggtcagttcctccattagctgcagagagtgagaagcattagyccctttactgatacattggatagacaactggaaaaatacatctgattaagcctctgccacattgcctaattggaatggagagaggcaacactgctctcatcatccttacctctttaggccttcaaaggaggaatcaaggaatggaggaaaagccaggcctgtgggttagtggtttcaatcccagttctccatttaccaaccatgtggtcattaacaagttccctgagcttttgtttctttcgagggataataatgaagttatgagaatggagtgtatatttgcctagtatgtgtgcagtaaatactggttttcctctctcttccctctggaaggtcagcaagcaggtcaggagtaggagacagggggctggagcagtaagatgaactatgccaggggcaactcagggtgagacagtgcgtggtacattgacagatacagctttgatttcttcagcaagggtgttagggggcttgggtaagaagcaagaaggaaaggctgtattttcatattgggaaatcatgatagggtggcctgtaaccagcttgggatgtgtctagtacatctgaaagggattgcagaatcaccctggatgcttgtgatataacaagatgtcaggtgtggatatctatcgatgccgtggtttaaagaagggaatgggaataagccccctgaactcactttctagctgagaagaaaccatccaggaagtagcaacaagacaccgccttgttcatagaactgaactttgagccctggtcaatgaatacttaactgtaggccacgaacagaagccggtggggaagccagggtgggaggcagggctggggctggttggggttacgggtatcagtggtatggctaagacatccaaggacaggcacccttgtgctggagtttccatgggcattctaaggtggagaggagtaagagacattcgtggtggaatcagtgggtctccacacacagaaagggtgctccaggcaggccgtgagggagcctagtgcccctcttggggacattcgcttttcttacccagtcacttatgttctgtggctttgggaccagcaagagcaacagacaccctattcctccaccctcataggcaaatgttttccttcctttacttttcttaaaaatactttttaccagcataagatcctaaacatgacccctttcctaggagagatggcttttgcctgcttgtgaggggggtgggctttctactcctgccctggcagccgccaccctttacctgggatggggataggtgggtgggaggctttcttgccccacccctagtagcatatggcttttgcctcatgctgaagcagggtcaggtgtggaatgtgggcaggtttctgtccctccccagcaggagatggcttttgcttgatataaattaaagaagcgttgggatatgggtggatttaataccacctgttatggactgaatgttctagtgtctccccaaattcatatgttgaagcttcagcccccaatgtcatggtatttggaggcagagcctttgggaggtgattaggtttagatgaaatcatggagatggagccctcatgatgggattagtgcctttattagaagaagaacagacaccagaactccctctcttcagcatgtgaggacacagtgagaaggtggccatctgcaagccaggaagagagccctcaccaggaattgaatctgctggscctttgatcttggacttccccacctccagaatgatgagaagtaaatatctgttgtgtaagccacccggtctatggtattttgttatagcagcccrtgctgactaagacactgtccctcactggcaactaatcatcaccttgtactcgagcgaggcctgaagtgcagatgggcttgtcaggaaactcctgtcaccaactcaaacctcagcagggcctgtgccctgagcacagctcactcaggcctttggcactgtcctcagagtttctcaggggagttcagagtcctgtggaaaaagagtaggcagtagggacagacttctcgtgtttggggatctcagaagtcttaatctgtcacactaaaccacacggaatttcttaaaaccttagttttttgttttttttttttttctcacctgcttttcttgctgccacctctttctcccatacactgtcaaagctgaaacagtgcttgtgtcctttcttcctcagaggtgcgtgtcaccctttgaaagtcagttcagttggttgcctttccatctcaacactctaacgtgctcaaaaaattagattttgtggattatctgcttttcttattgttagggcaggagtggtggcattctctggcagtcttctgtatccttagcagaaacagaactgggaagggtatttggaaagtagaagctaggagctaggtgtgctgattgcctctgaggtatcattgtttatagcagtcctacgttttcagattatctcaacctgctggaagcttctctgtcttttgaatacctttgccattcatgtacatacccatcagtgagtctcagggttggaagacaccataaatgccacttcatccaaagccacagtttagtctccagttcacatgtactgccttgtggcatcattccagtggttgtcttaatcttttttttaaatattatattgttcagcccagtgtgtatacatatccatcctcaccccaattctgctgctggatataaattggcagctgcaacagtakcatgtacagaaagttggtatcaatttgagagggaaggagtgttctctgctggaggacagggaggagacagagccatcttmtctgtttttcccacattttaaaatgcattgccaaagtcaattttaggatgcagttgggttaaattagtagctagaagataaaacccagtagccagaagcaagctgaacattaaaactttgggactctgaccacagtattgaacattatggctgaccatcatggggttaaaaggttaggaagagagtgraccagtagccatatatttttagcctgcttagaattatagttgcctttggaaatttttggtaaactcccatagatcaggattagaataaaggccataaatatggttcaaaaactgtactttcaacacttcattatatggtttgctattggctttagtggtagtgcattatctgaattgatgtaaatagtatttaagtttgtcttttcctatgagtaataagtattgtatgtagatatttccgtttctattacttaaatagatccccacagtagtttggtacatagttgccatgcacataattactgcatggctattattaggaaaattgtgtgggtaaaatccatcctgctatttggctstgtttgaaccttgatgcccatctgctaagcaatgtggggtcaaaataagtaccagggtagttctggccttggcctttttggatgtgggctcaactctcttttctctctacagtccctaaaactataatacaaggtgtcaccagagaggaagagcaattttttttaaaaagcctataaaattattactaccagcaccatacattgccagtgaacctgactctggtgttaaaactacttctcaaatagtatcccttcatatctatccttatgaattacagattatcagctaaaatacaaaataattccccaaagaaagttgggagtattgtatactaattaatctgcatcaagtcataaaagaaattgacatatgtaaggtgatgacattgagtttttccaagctggcattttcaagttttatgaaaggtacaccagtttatcatatacattgatttaatgtgattattatatcagctatctattgccacaataataataatgctgtgtaacaaacaaccaccaaagcccactggcatacaaaggatacatcgattattgctcatgatctatgggtcagctgggcagttcttctggtcttacctgggggacttacttatgtgttatgactccccagctggttggtctgggagtagttggctcacctgtacatggtccttcatcttccaacagacaaacctaggcttgttcttttagtgatgcctgggtattatgagagtggaaaggcagaggctatatgaggcctaagctcaaaaccagcacaccgtttcttctctgcacaccacagcaagccacaagtctagcccagattcaaaaaatgaggaaagagactctgcttctcaatgtcttatagcaaaaagtatggatgtcggaatgggtgagaattggcgccattttaaaaattggtctcattctggttactctggctgcttagcacattccctaaaacttagtgacatgaagctatcttattttgttcacagctttgtggtttaggcatttgggaagggctcagcttggcagttctcatttgggagtcacttggctcacccacatggatagcagttggtgtctacacatggcttttgcagcatttgagtagtcagactttcagcatgacaggtggcttccctcagaatgagtgtcccaagggaaccaggcagaagctgtaggactcgtgtgatgcagtcttggaagctgcgggtcttcacttccagtaacttctattgctaacaaacaagccattagtaagcccgaattcaaagggaggcaaaatacatctcacctcttggtgcaaggagtgtcagagaggttgcaggcatgttttaaaatctccgttaatctaccacgattattcatggagagacatcagttccctcattctgcaatgtcaggtcacagtgctatgatctttaacattcaccattcacattaaatagtgcatttgcaatttgtatttgcagatttttttttctttctttgtatagttctgtatatttaaaagtaatccaggaaatgattaagggtagctatttatttaattccaaattttcagtgatctttragaaaatgcatacatgcatactttctatattgtttaattagtgcatgtatctgcactctgttttttcaagccattttgtacacacatgcttagagaaaacacaaaaatgcttgtaattttaacaatatccatgagttcatcaagataatatatcataatttgcttagcagtttccaagtttgagtacctctgttattataattacactaacttgatagcaccacgtattggttatttattgcaatgtaacaaattatcccaaaacataacatcttaaagcaataaacatttactatctcatgcagtttctgggggtcaggaatccaagagtggcttagctgctcattaggtctctcatgaggttgcagtcaagctgttgcctggggctgcagtctcatctgagggcttcactggggctggaggatccactcccaacttcactcacatggcagccagcaggagacttcagtttctggccacatgggtctccccataggggtgctcatgacatggtagctgacttcccctggaatgagtgatgagagaaagagagagagagccctcaaatgcaagtcatgttttttataacctaatcttggaagtaatatagtttaacttctgccatattttattggtcgcacagaccaatcctgatacagcatgggagaggactgttcatgggtgtgaatggcaggaggtggggatcactgacaggtcgtcttcgagcctggatactacacattgctataaacatctttcaaaaaattcctttttattggtaaatgataagggggcatttacttttagcatatcccccaatgcagaattatcggatcatacagatcaacaatttaatagtgcccctttttcatgttaaggtattcatgtatatatacacacatgtatgtacacacacacatgtatttacattgtaagattttcttatgtgtttgtattttatatttttatgtaattattcttatggttttaatgtgcacataaaattctctacattttacaaagcatgtagttgctagcaaaattccagtaagtgccctcagttggctatggtttgggatgggaaatgagagagggaaactgctgagtcctattatctcccagaaccctttttttcttttaaattttgtgcctggtttctataaattaggccatactgcccccaacctaatataagccattgccaccaatagttcctataacagaataattttttttttttttgagacagagtcttgctctgttgcccaggctggagtgcagtggcacgatctcagctcaccgcaacctccacctcccgggttcaagtgattctcctgcgtcagcctcccgagtagctgggattacaggcgcctgccaccgtgcctggctaatttttgtatttttagtagagatggggtttcaccatgttggccaagctggtctcaaactcctgaccttgtgatccacccaccttggcctcccaaagtgctgggattacagaagtgagccaccgtgtccagcccagaagaaattttaattggcaagaaacttgaccattacgaaatagaatgtgtccttcaccatttatgctgaatttcagttgtgccatctttatatttctgaggcaatgtaaagcaaacctgctgtagaccaggatactgaaagggccattctatatcaggcaatttttgaagcctttattacaatctgtgaactaatttaatatgttataaatgaatactcaattaatagtcatacattttgagtccacaccccccctttgccatttatatgagataaaatataactgtttcattttcatgtctgtaaaaatcttttcggcctttccaggaacccatctggatkcatttacacgatgcactttccatcatttcaaaatttattaaattttatagcaccttccatgttatgggcgctcaataaattgccatcaccaagttaaatgatggggtaataaggacaggactctggttgttcacactaatgacacagtttgcattgatgatgaagtccccagaacagagggcaggaggagccacctgtatgaggagtgtgtggggaggagctgtcctttacagcccrctgtaaggatcatgctgtacaaataaacctaactgtgtgggtggtcctttctctgcccccttctgcttttagagacttagaagagctgccaaagtacctataggaggtgtttgatttaaaaggaaacacaccagttatgccttcttgtaggggcatgtgagccagtagagtttgcagctgcatggagagatgaagcaaaactctgaacattcaactgcattaaaaaaaaaatcatgccaagagggcctttgagcaagaaattcttgcagatttatgacacccgatgcctgaactctgtgtgtgacatcagggttatggctctgtaagctcttaaccctgcagctgacccagtcagcttctggctgtactaggggttgatgcggttcactgtggttgtttgtagacctcagaaaagcaygatgattatttacagatttccagaatctctactggattctttgcttttcctttctcacaaggaaactttccaggatacagagcacaacaggatctgaatggcagtgaattctctttaacatatctcttcagggtgatgggggcttcactggtatagaggggtcagggtcagcccctgttgtttctgcttatgggttggagaccccctatatgtgcaagaaatacactaagccaacttactccattaatgatgatagcatggctttgtatattaggatgtgtgtgcatatgtgaatgataggatatacgttaatagtttgtaataataaaagattgaaagcaacataaatctgcattaaagacacttattaaaaaaaccgtggtatatccacacaatggaatactatgcagctataaacaagatgcaccaatatggaatgaactccaacacttacttgtaaaaagcaaggtacaaagtagagcatatacatgaatattgattgtctttaaagaaaaggaaagagggagaatatgcttgtttgcttaaatagtataacatttgtctggaaggctagataagaagctaatagtattagttgcctctagggaggaaactgaggagttggaggacacacatggaagggatgctgttcactgtacagccttctatgccttttgaatattgagctgaataaataaaatattgaaagaagacagtgttggaataaggcctggggaattgaagcttggggtggaggtgacaagtgaaccccaagagggcaggaagccaagcctctgccccactcccctgcttttttttaaccatacggtcccagtgtagatgtagctagcacatgtagatcctcaataaatatttgttaactgaaaaaatacataccacatggaaaaatcaccctttaattttaatgtgtatattacatacttaaaaatatcattgccattaaatatgaaaattgtcttgaccagaaagaaaaacaaaaacaaaaaaagagttcagaacaaatagtggtcttggtcaggagaaaatgagttcgggtttggatacattatttttatcagtgtttctcatgtttttcctattctrtgtgaactcctgtcttcagatttaaatagttgattatatgaactgaaattgtagaatgggagaattttattgctaatcagattatcctaggctttgtggttagagacaggctgtgagtcctgagtctgcttttcttttcattatactcagcttcccaccttttttcttatcttcctgtctgggacatttcattgcttatgagctacagacctgatgtgtttcatgccaaagcataaactctttaagggagattggctgtgacctacacggcacccacattctgcaacacgggattgttgggtgcctcaggatgggccagctggggtgtagatagagcacttgaaattacacactgtgttgttttcactgggatttgcacacttgagttaaaattctcagatgtcaagaaaagcaaaccaatgttttgtaatgcaccacagtcccctgattggtctcaagcagtgaattgcagccacatggtcaccatgaggaggaggatgaatgacagctgatatcaacatgatcatttcaggagaaatatgactagacacccagagagacaagtggattatgcaaagaggggaacccttgcacccacttgagaagtgtgtctcagtttggggaagaataattaaattccaaattgagcatgttactgaaaggagagacaggataaaaagcaactatctttagacccctgatgagggcatttctacaaagcctaatgtgtaaaagaagttaatagaattctatacaacatagtaaatagctggttcctattaaaagaaaagttttctgagaaaccaaaacccaacaaaagagtcatgccctcaagtatatgtgcatggacttgtgaggagtgagttgtaaagtattaagcaattaaggtttatatccacttacttacatataagaaaaccaaagctgagtttaaatggctatgatatcggagaaacagagaataggatatggaacatttatttcctttttttgtatttaaaattttttttcaacaaacagctgaatgttacactcatttgtggagtaacaaatggtccctggaatgaatatatctctcttttgagctttctatttggataatagagttgccacaaaccattacccccaacagatgcagtcctatcttcccttgaagtcatggcccttaaggtcttaaatttggcactgtaagagttaacagggaaagctgtaaacatccagattcccgggccccactcctggttatcaagattgagtaaattgggattggagtccagagataggaatagttttgaagtatgctaggagattttggtgcaggtggcacgtggcctactctttcagaaacccctttccagtgtttctgtttgtttgtttatttttggttttggtttggctaaataaaggctaactttcactagaaagcaaagccaagaaatactaaagctggggtcagcaaacctttggctgtgggccaaatctagcccttcttttatttttgtaaatactgctttattggaacgcagccatgcacatttgcttaggtattgttgatgaaaagagtcaaactctgtaaaatatttgaagagatttattctgagccaaatatgagtgaccatggcccatgacacagcccacaggatgtcctgagaacacgtgcccaaggtggtcggggtgcagcttggttttatacatttagggagacatgagattgaaatcaggtacattaagaaatacattggttgggttcagaaagtcaggacaactggaaggggtgggggagcttccaggctataggtagatttacattttctgttgacaattggttgagtttatctaaagacctgggatcaatagaaaggaaatgtctgggttaagataaaggattatgaagaccagagttcttatttgcagaggaagccttcaggtagtacgcttcagagataataggttgtaaagtgtttcttatgagacctaaggtctgtgttgagatgaatgctggagaagtatcatgaggcatgtcctacttccatcacggcctgaaccagtctcaggttaaattttaagagtgccctggttgaagaggaagttcattcagacagatgggggaccttaggattttatttgtaatttacagtatagtctgtggctgctgtcacactacaatgacagagttgagtgattgcaaaagagaccgcaaaacctaaaatatttactatctgaccctttacagaaagtttgccaaccacctgctaaaggatgaacatttacctgatgtgttacatttactccccttagaacaaataagaccttcaccaggagactttgatactttgctagtctgtcggaagtctgtctccaatagccacatatgataaaatgagctagaatggagcacgttcaaaacacaagattgaagtgaagtggcatacatcttgcagtcgacgatgtgtcttaggccactgaaataaatgatttcattttatttgccaaagtgtgacttggggtgaaggagacacctggcctggcctcgtgctagattggaccctcgatgtgtacacacgacttgttctaatatcacttttcattggaagtagacaggtgcaattaagtaacctagagaagggggtaaaacacaggtcttcattttcccattgagagagaactctgtccctaattcagttggtgggaaatggatttcttggctttgataattaagctggcaaagcaaatttggttccaacattttaatgagccagtgtgggtggccaacaaattgcaggttcagacgtaaatgtttcaaacctgggtggctggcttttaaccctggggcaaattctatgatggtaaggaaattttaggctggtagccaagttcaaagagtctttgccaaatattaagaaaaatgcctatttgaggcaattttaagttatttgaggacaggattatgttgttcattggatgtgattgagatgataaattaacatcatttgagtccactcaaattgtatacttgtgaacattcatacctgtgtttttgtgtctgaacttcatacacagaggattatcttgaaagagagggagacatgagaaaggagaaagtggtcttgctcctctcttcctgctttccagtgcccaactgctaaggtattcaggcctggttttctgtctggggataatcaaaatctgggttcttatgtaatgtaagaccactctttggggaaaaaaatgagttcagacctgagaaatgaagggttaatactcattgaattttcactttcatggagaggctgcatttgaagcaaaaccccgctgggctctgtgagcgaactttgcatcacaaaggtagggcagatttgcagaagaaagtaatagatttcaatttaggttgcttttcagcctgaaaaatagtctgaattctattactgatcctgttagcagagataataatgaaatgcaaagcaagtatggtttaaatgttaaaaaaaaacaaaaacaaaacttgtaaaaataccactgtgggttcttgatttatgctttctcattactcagtaggacaaaatacgatttgacataatgttcactgtgtggttaccctggggtcagaaaactaagccctgttacctaatacttcttacatttgcaaaagtaatcacgactgtgactcgaatcggactggaaaatctattgacttagagatagaaagatattaggaatctcttacrttactttttcttattcacctactgacaacttatacagactttgtaacttttctgatgaaagggtatccaggtggataattacgtattttatgctcttaaacaagttaagaactggagttgtattttttgctattgtttttaaaagtcaatatgttgtggctgttaaaaagcattattttgtgtatgtatcactaataacttatgttagcacataatgagtatgaccatcaagatcagtaacactctcttctttcattgtaccaaacataatgtagcctgcctggaatctttttgtgtatgaaaaagaaaaaaatagcatcttccattggaagttctggttaagagtagccttattatctacacctccttccatgaaactctgcttctgatttcctaactcttctgggggtttatacccttcagctttttccacgagctgctatttctttctagaatgctccgaaggcccatctgtacccatgggggcctctctctccgggtgccagcttagtttcaggttgttcacatcgtattatctgtgttcccctgttcctctaggtagctaaaggtcaggtctggctcctttgtgttgcagagcctggcatgcagtaggtgcttagtgacaaccgtttgaagatatcgacatactaaaatcctctaatctttttcctttaaatatacttattcagaaataattacaaacttatggaaaaattgcaagaatataacaaaaaattcccatatgccctcactcagatgccacaaaactcaaggtaatcatacttgttttctctctctcaagacacgtgtgtgtgtgcatatacacattctctttctgtatatcattattatttaattttctgaactatatgaaagttggttgttgacacagtgcctcatttacctctcaaacttgttctccctctaaaaatctgttttctaaaagattcagaattctcttttacctaaccacagaacaaccatcaaaatcaggatattaacctcgatataactctactattgaatgcataaaccccattaaaaattcactgattatcccaggccgggcacggtggctcatgcctgtgatcccagcactttgggaggccgaggcaggcggatcacgaggtcaggagatcaagaccatcctggctaacacgatgaaaccccgtctctactaaaaatacaaaaaaaaattagccaggtgtggtggtggccgcctgtaatcccagctactcaggaggctgaggcaggagaatggcgtgaacctgggaggtggagcttgcagtgagctgagatcgcaccactgcactccagcctgggcaacagagcgagactccatctcaaaaaaaaaaaaaaaatcattgagtatctcaataatgtcttgtatagatagatctacaatctgatccaggatcatgtattacatgtaattgtcatgtagtatttttttttaattcctttttttttttttttttttgagacggagtcttactctgtcacccaggctggagtgcagtggcatgatctcggctcactgcaacctccacctcccaggttcaagcaattctcctgcctcagcctcccaagtagctgggattacaggagcccactaccacgcccagctaattttgtgtattttcagtagagtcggggttttgccatgttggataggctggtctccaactcctgacctcaggtgatccacctgcctcagcctcccaaagtgctgggattacaggcatgagccaccgcacctggctgtatttttttttttaagtctaatccaataacgttgtagaattaccttgtcccttaatttggtagtgttggatgtttcctcatagttagatgcaaattatgctgtcttttttgtagaaataaatggtgcagaagggaggctgagttctcagtgcatcatgttagcaagtacgtgaggctgacttgtcttatcactggtggtattaacttttatcacttcaataaaatggcatctgccaagtttctacatgataaattcaagtaacaagtatttggtgcttagtaactaacaggtagttaataaatattttataaggagccactaaaaactatgtaaatattctgttcttcattagaattttatctacccattttagcatccgttgatgattctcgtcagaatcaattattaccaaatggatgccattattaccaaattggtgccaaatggtgattttctaccttctcattctttgtagatttataagttggtattccactgtgaagtagaagtttttctcccccgtttacttattattcattcatttatctttatcagtacagattcatggcatcttacttgattcaatggtctatattccattactatcagcatttattttgatgctcaagttttcccagatttggccagtgggaatctcatcaacttgtgtcttgtgttctttctacatgtccccgtcatcctttgagcggttcccttactttataataaaacaagatgtttcagactcaccttttatgttccctgcactataatcagctatttctttaaggctgtctggttttttttagtagagaatagtgtttattaaccaagatctgggtgctgtgtttgcacattgctactggaaggttgctgcttctagggaacagagatagaaaaatatttgagtgtatacacgtgcacacacacgtctatatcaatttctagatgtctgtctatacttgaaaaatcttatgcttacattggtattccaatcctaatctaacactctaggtttgttctactctttcctctttccatatttataactccctctttgagaagaaactgacctatgttgttgtcaatatacttacatttttgctcaagcctctgtgtacacccaattctcacacttatgggctgcctcctttgctctgatccactggccctgaccccaaaaagacgtgataattcttaattggcaagatagatgaaactgaagtaaggagagaaagagactgaatgtatagaaagagaaatgagagagagagaatatagtattctgcatagtctgtaaaaccaagccccatgcattgtctcaaggcaggtttttgacttctacagcctcagtagccatgaggtatgaaatatctctgtcggggaatatgagtaatttgccatttcttcaatgatacaaacaaacctgatttcccttattttgggagggggtttgtgatctcaaatgtgaagcatagttaataaggataaaacgttacttttgcattgaaagcaaaaatcttagtggaagaacttgaaaaggcaaactatatatattatggatagtgcaaacatttctgtgtgtgtgtaaagaataaataagattttaattgtttttattaataaattaaataacctaaccagtaaaaagtgctaatagagctgatgtaatgtatttacagctcttacttacctggctcttaaatgacttgggtgtgtttgtrtttgtgggtaagtgggtatatgtgcacatgtggacacacactgagagtggtgtgtttccccacatctgtctacatcaccagagaggtagagataatttcctttagttttagaagagggacttggcagagactactcttttagttgaaaaatgtaaaatatcacatgaagtgttgatttttggagtgcttttcttgcataactacatgctttttcagactacagaaaggttaatgacaaaatctgaaagaatgatttagaaagatttttatctaaataaagcaaactagaaagaaaggaagtttatcactgacattataaaagttacccttgggaaaatagttacctataaattaatctgtggccctttgctctaagaatgccttttatatctccagctaacatcagatcttcttgaaatcaatagtaatctgattgcctccagagaacagttgccctcctgtgttttaagccacagaggaactgtacatttttgtgataagcataatttagaggagaattatattttctttcttaatctattacctactggtgctgccttatcctgttactcacatttccttttcatcattaagttgatagcacagaaaaagaaatgtgatattagtattggtagcagtgtaccttaatttggaagggtaggaaataatagctttcttaaactgtacctcatgtgttacaaagattagcccccgtgtctagggtatcagttaacattgctctctggtggattttatcttgtgttctgtagactgcgaagagatttttatagaattttagatgcagaatgaatgaaaggagaaaaatcaccttcagttgatgatgcaggatgttcgatgctattcctcctccaggtagacttctagtcttccactatttgtctgcaagcaattttcgtgtcacttataaataatcaaaaaacggaatccatgttaggtttaaagaaaggatttaggaatctgagcacggcttwgactgatacaaggagataacagaaaaagctgaaatagaggaaggaaatgagagtggaggactaataatagcaggaaaatttgaagatatagttaatgttctgagaatttttccactgcaactcaactattaggcttgttaggagcatctgagtgtatttagcttcatgaacttcaactcatatttctggacgcctaagttcaagttatgttgaagaagcatgctcagatggtctggagaagttaggtgttgagggttgaatcacaggaatgtgttggataaccctgggtgttacctagctttgaaaagaagatgattcaggccaagatctatgtcccagtcactaggtgattgtgcagtataggtacagtaagagacatttccttggcctcctgctcaacaagctcagagccaatgtacagtacttggtcagcaaaacaagagtcttctttgaagacttagactgtgcagtataagaaacttgctgctattggagagctttggagatccacctctgggaggggtggataccattctgacacatccaatcaccatcatcagtagagatcactgatacattgaagaggtgtgagctactgggagatggtttttgctaggaggtttactcattatttattttcactaccgctgagtcaaattcaatgggggtagatggtattttctttctttttttttttttttttattatactctaagttttagggtacatgtgcacattgtgcaggttagttacatatgtatacatgtgccatgctggtgcgctgcacccactaacgtgtcatctagcattaggtatatctcccaatgctatccctcccccctcccccgaccccaccacagtccccagagtgtgattttccccttcctgtgtccatgtgatctcattgttcaattcccacctatgagtgagaatatgcggtgtttggttttttgttcttgcgatagtttactgagaatgatggtttccaatttcatccatgtccctacaaaggacatgaactcatcattttttatggctgcatagtattccatggtgtatatgtgccacattttcttaagtacagaatctggtcaatagagtttcctgggtcacttgaatcatggttacctgtggcatggtatgggggtgagaggtggggtgacacatcccctttctagacttgagagacaggcagtggacaccaaaagtgggagggatgtgggttggcagtctgactaatatgtcccctgatgataggccagcacattctgttatttcggttggaggctgaagttattttgctgggcaggctgtatttaaattgcttgtttggcttcagtagtggcaaagataggaacacaggtcctttgtgcatcccctttggaggagcacattgttaattaaacagtgggtgcctacttacccaaaaaagcattgaagttagatacaaaacatttttaagcctaggacttgagccatgtaggcacttaaagagaagtctaatccttggcatagctggcaaatactttatggcttattgtctgtactttcctgagtctcaagcacctcctggagttcacaagctatctgaaattgcccaggaagaagttctggtaatgcattatgggaccatccatctttccacggatctgctggtatacaaatctcaagagagcaagatattggcgtaacattgccatgagctcaacagaagctgactcagctgcctttatgcccaaaggaagagttctcagcctaatagatgcagaagagagtgaccagcttctccatgttttcccatggtggggggaggagaaggctctagaataatgtggcatctgggaaaagaggaaatacagggaaggttggcctcagtgtgaatttctacaagggggaaatacctccctcatttgaattatgagaagcagagttgtaggtaggggtgttgcaggaatagggttgaggagggggcagatagagctattaagaggtgtcacaaagagacactgagagctgctagtcctgcaagatatcatggaatgagtcaagattgggacctggaaatcagagacaagagcatgaatttgacagtggatagataaatgagttctgtctaagagcatcctgttttgttttgttttgaaatggagccttgcactctgtcacccaggctggagtcagtggtgcaatctccacccactgcagcctccgcctcccaggttcaagccattcttctgcctcagcctcccaagtagctggtactacaggcatgtgccaccatgccgggctaatttttgtacttttagtagagatggggtttcgccatgttggccaggctggtcttgaactcctgacctcaggtgatccacctgcctcggcctcccaaagtgctgggatcacaggcatgagccatggtgcccaggctcctgtttttattcatcatgtttttttttttaaatgaattaactacataggttatagaatattcacttgattgtcattatacaaaaatgacatgtactttttatattgaattgttcacagttttgttcttctttgaacactattcttcctagatacctaaacttcatgagccatttcaattttctgggcaatcattggcatggtctaactttcaactttatgtacctgtattagttttctatgctgctgtaacaaattgtcacaaattaagtggcttaaaacaatccacataccatgggctaaaatcaaggggccaggagggctgctttcctttctggaagttctagggcagaatctgtttccttgccttttcagcttctaaagggctgcctgcattccttggctcatgccccctaataccatcttcaaagccaacaaagtcaggttcagtgcctctcatgttgcatcttactgaccctgctcccatcatcacagctcagtccctgactttctgttctgcctctctgtgattacatcgggcccacctagataatccaggataatctccygaagtctcttttgccatgcaaggtaatacattcacaggttctgggagttaggccataaacatcattgagggccattattctacctaccaataaataagggcattgttgataccgcctgaaatgcagaagatgcttgttgttctatagtgcatgtggtttatgtatgacataaagtatgactcactttggggtacgctggcaaatggacttttggacagttccaattatcatcagaatagatttgctaatttaattctactttttagagtggaattagattctgaagttttaaaattacgtgagatttgttcttctaacagaggagtctgtagcctttcattgaaaaaagaagagtctggggccggccgcggtggttcacacctgtaatcccagcactttgggaggcagagatggcctcacttgaggtcaggactttgagactagctggacatcatagtgaaaccttgtctctactaaaaatacaaagattagccaggcatggtggcgcatgcctgtaatcccaactcaggaggctgaggcaggagaattgcttgaatccaggaggtggagattgcaatgagctgagatcacaccactgcactccagctcggacaacagagcaagattctgtctcaaaaaaggaaaaaaaaaaagcgtctaaactcccgaagagaggattcagtgagaatattagtcatgatcctggcttgccattttcttaactttgaaattattctagtttgtaaaaaaaaaaaaaaaaaaccaacaacaaaaacactaattgtgaattagattgtactctgtattcattaaaagaaaaacttgacatgatatttagatgaacatatgcggtttactaaaacagatggtagagaatttttaccctcaagcatgtatttttaaaagtgtgtttttgtttttatgactttttgaagtgattggattaaggagagtaagaaattcttcctataacaatctattttcatttgttctttttggagaaaaaaagctttttcatagaggttgtcaaatgttgccatatgtttaagaatgaatttgaaccattcactttctgaatcttaatcccttctgaattatacgtaatttgacagaagtcaaatatgttgacttctgtcaaatatatatatttgtcaaatatatctgtcaggatatatgacgtctgtcaaattacgtatttgttcaacttaggtctgatagtggatgctcctaagtactttgttagtctatattatttatttatttatttatttatttatttacaaagaacactataattgtgctctttcactggtttttattttaatgcctgacttgaggtcaagaattatgtgtagaaagagcacagacagaacaaaatcataagttaataaygccgttatattactggaaaaattaagcatgcagagctagttatagcagtataatattttgggaaaatatttaaattatcgtatgctccttaggttttaaaaacctatgtttcattcacttaagacaagcagataatgtgctattaagagcacagactctggaaccagattgcctgggttaaaattcttggctctcactttctagatttatgtccttggcaggttacttggcaccacttggtttcacttttctcacctgtaaaatggagagaggactaaatgaatttatgcacataaaacacttggagcaaataaaagtatttgcaatgatgatgatgattgtttattattattattaagctttggagcaaaagtattcattaagtaatcattactgaccacctactaagtatcagacacttttcaagtcttaatgaatcattaaattaatcagatcaacatcagaaacaatttaatgttacagtaacattttataaccaatagtacattgcggttaacttttcattagtgttccatttgaataagtcagctgaaaacagatttgcctcttccttaaaaattagaaagcacatgctatttatttgggagggaacaagcaggaattgctcaaaatatacataacctaccagaaacacaatggcaccaattccttggagtaagaagtggaaaattcatttaagaagagatgtgctccagatctagctgagggtacccagggacaaagtggacatttcaagttaagccctgggatggatggatggatggatggatggatggatggatggatggatggatggattttagtgacgtttaagattaaccatgtttcacattgctagaggaaagaggtcttaatgtacgtctttatatgggcgtgcacctctgcacctgggtccgctgtaaccatgcatatggctttggccttgctcatcccacacagccatgtgagcaggcaccctctgcactaatgaccctctctaggcccaacttccctatctggaaaatgcagaaatcttcagccatgtgtgagcatcattgtgaagcgggcagagcacatgggctaattatatattgtatgagattccagacacaagaattaagtgttctctgtgctgttcagtctacttccaaaatccggctcaaatccaccccactctcaccatctctacttgcccttttgaggccatcatttctctgctggactctgcaccagcctctccctgtgatcactgtgttctcctggtttcatgactcacagacgagtgttctccttatttttaccctcggtttgtttggaatggttgggggttcacttttatatattcagaaacacttgttttaatactttgttctttgtaktcctcttctttctaatagttactcatagcttcaattctcaaaacacaaaacaattttaccaacccatcattatgtatttctctacttgctttggtctgacctagggactattattttggaaggtgttttaaaaagtaatttcatagtttgtgacttaaagtgcaagaacatcctggggttagtagcacaggaaaagacttgcatatcactttgttaacatttaaaaaccaccaggcactacacttaaaagatggatgatgaatgccacataaagcctacaactcctgaagcctcttgtccatgaggctgggtgagtgaaaaacagcaaaacctgagatctgtgatttttaaggtaattggagaaaccaatacctccctaaaatagttcccttaatagagtgacttactgaattgctcaaagttcagacatgaggaggtgctttgtagaatttgctggaaactggaccacacccaccaatttcttgccagtttgtggcaagtgggccaggttttgtctggcaacatgatgcatgcattcaaaaactgtattttctattatcctttcatttctacatttatagtataactagtttagagcacaaaagagatatggcaattaatatgggaagtgatagacccaacacatattctatccaattctatccccacaaagacgaccggactaagcagcagccccagggtcttgccgcatcgtttcctttcgggagcactcacccacaatgtgttgggtgccacaatgcactgaaaatgtgaccactgcccttgatcatagaactatggaaccttagtgctagatgagaccttagaggttttctagtccagtggttttttggattagaaactaggaagagcattacttggggactgtcaagtaaaaacatttttaaaaattctaccatcaagaaattacgctaagtgaaaggagcaagatgcaaaaagacactgttttatgattccactcatttgaagtacctagagtagtcaaattcatagaaacgaaaataaaatggtggttgccagagacaggggggaggaggaaatggggagctattgtgtaatgtgtagagtttcagtttgggctaatgagaaagttatggagagggatagtggtgatgactgcacaacattgtgaatgtatttaatgccactgaactgtccacttaaaaatggtaaattatatatgtattttgccacagtaaaattctgctttcatcaccgttgcttgaaagaaaagaaatttttacattgaaaagaaaggaaaattaaaagaaagatgaaagaaaaagaaagaaaaggggggggtgggaagaatcaatcttgaaggaaattcctttaaaatgattaaatataactttaggaagcagatcaacacattgccctttgtgccctttgctttcgtctttctcacagactagaccagcgccgactgtttcgcagccacataccagcatctggaagctactgtaacttctgcggtacaattctctcattttgcagatgaaaaaattcaggtgcagagagaggaagtgtcttttccacagccacagggtgtatttgtgactgggacagtcatttcatgactcacagacaagtattctttttactttattattataggaaattcgccttatagtttagttttgttttattaagtctttattgctattggcttcagatttagttatcacttatagaatcccttctgagtgccaggcattgtattttctattttcacttagcagacatttatatagtgcttatyggaagcaagacactgtgctaagtgcccgacaaataagaagtcatataatcctaacagtaaccctcagagatgagaacaattgttatcccctattttaaaaataaggaaaactagctgagtgcggtggctcatgcatgtggtcccagctactcggcaggytgaggcaagaagattgtttgagccaaggagtttaaggctgcagagagctatgattgtgccactgcattccagcctgcacagagtacagccctatctcttaaaaaaaataaaaaaaagaaagtaggtggggtggaactgagacccagattgcttaaatactttcccgaagtcatatatagggctagtaagtggtggattccaattcagttttgactcactgcagttaaactcaattacccaacctgatgataaacaatgggtctaatacttgtaaatacatttggtagaatattaattgactttacttatttatttatttgagacaatctctctctattgcccaggctggagtgcagtggcgcagtctcagttcattgcagcctccaccgcctggattcaagcgattctgcctcaacctcctaagtagctgggattgcacgcatgcaccaccacgcccagttaatttttgtakttttagtagagacagggtttcgccatgttggccaggctggtcttgaattcctgacctcaggtgatccacctgcctcggcctcccaaaagaatattaattgactttaaaccaaacaccgtaaatgtgttcttcctgactctgagatgtatctgaggatattgtgagatctttattgaaatcatccaaaatgggatgccaagttttggtgtgcatattaattttttttaatccttgaaaaaactatcaactgaacatcttgcttatggatataatttacatgtcttagtatgaagcccttaggatctgagtacagcacaagtgtaatttaaagatgtagctgagacagaccaaaaactgatcagcatcccatagagtgaaataaccatgtgccgcgttaggttggggtgatggtgtcaggactatcacacattgagttggttataaacctgatggtgatttagttgtttggaggagcattttcatcagaagtccaagtaatcttgcattggaaagtgaattagaaaatgcaaatccagtggcatgagccttaggatacaataccttattagagttgggatacccagtggtgcagtgtagtcagtttctatttggagctcggtcagatgagttttagttgatatttaggtaaggactcaaaactcctgaagtattatattctttgatttgtttttcaacttgcttcttaaaattaacaagcaatgccaagacagtattgtatttcyatcttttctttgtcataactgtcagaacaaatagcccatagaaaagcatgagaaaaagccttcatctcaaatcgttaataacaagaaaagaaagtataggagctcccttatccaacaccatttgatggaatcattcttgaccccytgtcctcctgagaaaaagcaccagatcattcatgaccttctcaccactgcttcatttaggactatgaagacagtatcatagggtataatgaaacagttatctgcaatgatagaaaaatagtataagcatgttttttaaaattgtggaacctgaccaggcgcagtggctcatgcctgtaatctcagcactttgtgaggccarggcggacggattgctcgagttcgggagttggagaccagcctgggcaacacggcgaaatctgtctctccaaaatatacaaaaattagccaggcatggtggcatgtacctgtgatcccagctacttgggagaatgagttgggaggatcgcttgagccccggaggcagagcttgcagtgacctgagatcgtgcgactgcactccagcctgggtgaaagagagagaccctatctgaaaaaacaaaaaccaaaaaacgaaccccaactgtggaacctatagaaagaaaacttagccttggctttaaatgaggagaaccagaaagttccagggagaaaaagtatatgttcaagatgaaaaggataccttgtggtcagggaaatttaggtggaggacaagcaggttatagatgttctagttttgctggaaatagtgtcacctttccaactgcccacctataaacttcacagagttgttcactgtctagatctccagctcagagaagcagagtgattaaaattcaacatgcatgaatctcaatattatttttgaaaaacatgcctttaaaaccacccatttcatcaaaaaggttaaagggaaaaacatttctcaagatctaagcacagtcttaagggctggcgtaaaccgtgacagtttaagaatgaagtgtttttcttatcaatatgagcattctgtgaaatggttgattttgacagaggtagttgctgtgttgaccttttcaccgtcttgttttttgttcataaattgatgctgttattgaaacaatatgggtaagagtctgtcttagatatgtaattttttccatttattgtctccatggttttactttgtttaacagattttaaagacttcaaaagaatagcactaatatacccaggagaaaaagtcacataaagttataaggttcattccattttaaccgtgaatacatttaaacaaagataaataacatccaatgtcaaaataatcttaattccttgaccacattttaaaaataaaacaatttattaccatttagttacatcttacaggaaaacccttagataccagtaggtaaccattagatttttctaggtgaaagtmaatcatttctgaggaagcattctctttaccaaagcagcattatttccaataaggaagccactcattcatttagtccttggtttattaaacagttactgaggctgggcacagttgctcatgcttgtaatcccagcactttgggaggccaaggtgggcagattgcctgagctcgggagttcaagaccagcctgagcaatatgacgaaaccctgtccatacaaaaaatagaaaaagtagccaggcatggtggtgcacgcctgtagtcccagctactcaggaggccgaggtgggaggattgcttgagcctgtgagaaagaggtgaaccgagattgcgccactgcactccagcctgggcaatagagagagatcctgtttcaaaaaacaagaaagcaaacaaacaaaaaacagttactgagggcatacaatgagctaggcactatgctatgtggggggatttttaaatttgaaaaatacagaccctgctatcatggcatccacacttttaaagataaatttcttccacagtttgctaatagaaaacagccatttagcatgacctattaatatggagtgcccaaagtatacaaataaatagtcaatctttaaggcaatatgttgctaccaactctaaattttatcccaagaaacttgaaaactttttattgaattaaataggaatataaaacatgttatgatccctatgcaatatactaagccctctggatcctcaggttctgtgtctgtggattcagtcaaccaatgatcaaaaatattcagaaaaacacaataaaaaataataatataacaataaaaataatmcaattaaaaaattacagtataactattaatacatagcatttacattgtatttagtactataagtaatctagagattatttaaggtatactggaggatgtatgtatgttatatgcaaatactatgccatataatatcagggacttgagcatccttagattttggtgtctgtggggttcctggaactggtaccccttgaatactgatggatgactgacatagaaggtggtcaacagtctattttccagttgggagaaaggcagtagcctagtaagctttctcagagagtctgtgtcttaatcaaacgtgtccctggtcccctggtattgaatattagtccctggtcacctcttgtcttggcttgttaaggtttaatgacttatccttcaagtggttttgtctcgaagagctcaaatgccatcattttctgagtctccaatctgtcatttgtcatgttgcaaaatgggcactatgattgtaccaagccaggcatccctggcactccgggaatactggccagtctccatgacttgtggggggctttagtgttttccaagatgaggcctggttgattcatttctgaatcctaagtattgaggtttgtgtacaaatacggaagtgtgtggggtaggaagttccgagcaatcagctttccttggaaaatatttttccttttcaaatttatggctgttttttaaaaagggatgttagaaactttggttaatttaaagatgggtatgtgttttcctctaatgatggcacacagttatgttcagtgaggactcaaggaaaccaccttttttgttgtctggccaataacttactgaaatgagcagtgctgatttacaggtctgggtggtggtgactgaaggcagaattttggggagtttcattttttgtttaatttgaacaatcagagttcatcgtgttttgcggaagaggaggaaaagcagcccaaacccacacgggagggttgggggagcatctgcttgacagcactctcagttaagccctgcagctacgtgtgctcaaagatgttctcgccaaaagccaatgctaatttaatgtgtatggaaattatttattctgagtcatcagttacttttcttagctatagttgttattggtactgtaatgacttggcagcgtttcatcattttttcttatgtctggctcacatttgcgtgtgttaactccatctcacaaaaacccaaacaaacacaaatttcataggacctacttggcatctggcagtgtttgacacaactacctaattcctttattgaaattcatgattgagatggtccatcttgaactgattccagcgttcaggcacgaaccttttcgctgagtcgccttgggccaatcactgaacttctctgagcattggattcttggtacagggattggattagaactctaagttacatctagctctgaaggaaattagagatttttgaacttgatgaacattttctaattgttcctagggtaaatgtgccactctttaagacttgttactattttaagatgccactggaaacacagaggccctgcaaaaagatggacattgggtccaccaagtatccagacaggggyggggttggatggtccaggagtacacaggtgacctcctggggagccaaggtatttcccccaaggtgggtgagaaagcaggacattttcaggtgaaacagatgctcaacagagccaagctttgaagacacttacatttgggggactggactacaagaaaatatgagtaattctctttagaagtggtaatggaaaaccacaagaatcaggatcattttcctcagctgataactcatgagggcatagaacagaattctagatcattccgtggatatttgaggaagacttatagttctcaaatgatcccatgtatactgataggtattatcagtacacctgatatatatactgtgatgtgtgttagcattttaggtggcttaatacataatacccctttagttatctcctgaattttggagcaattttggaccattgaagacaggtaattcatgtcaaaaaaaatggcttttgatttgcatcccaaagactccctaactcttctccaaattgaacttatccccctcaatccatatcctcaccccttcctgggacaaagcctactccatgcagagaacctagtagcaaagagtatcagaatcaaggagataggtttgttctaaaaaccagaaatgttttcttgctttctccaaaagttcatctatcagacaggttactaaaaggagatgggagagatgtcaggccaggaatatcctgtagctgaagttccttcacttggaatcccaaggggtgggaaggaaagactctttctaacaattagcattgaactcattgttgcattgggaattgcagtggaaaaatatgaggatatgtattcaacaaatatttattaaatgcctaccaagtacaaagcacttttctgggttctaaggtacagcagagaacaagagatacaaggtccctctttttttttttttctctcctttttttgagacagggtctcactttatcacccaggctggagtgcagtggtgcaaatacaacttgctgcagcctcaacctccacctccctgggctcaagcaatcctcccacctcagtcccccaagtagctgggactataggcatgtgccaccatgcccagctaaattttgtattttttgtagagacggggtttcgccatgttgctcaggctggtcttgaactcctgagctcaagcaatgtgcccaccttggctggcatgagccaccgtgcctggccaagttccctcttcttatggaacttacattcttggagggggaaggtaataagtaaacatatgaataagatcttttcagatgttcayaaatgccttgaggagattaaatcagtatcatatgatagagagcaactagggatagagtgaaggaaggtgactcattaaataggtgaccaggtcaggccactctcaggaggggccgtatgggcgaaggagccagccacatgaaggcctgagggcggggtgagagggagcagctagttctaaggccccaggttggaaagggcagggtggactcaaggagcagaaggaaggccagcgtgtgcaggtgatggtgagtgtggggacagtgccaggacacgaggtcagagaggaagtgggtccagatcagctaggaatgtgaggtttcctcctaagataacagaaagcctttagagtatccaaacaggtgtattccaatcacctagggacttcagctgaagaccatgattcaggaagcctggcagggcctgaaattctgcatttctaacatcttcctgggatgctgttgctgttgctgttgctgttgctgctggtccatagacgtcactgtcagtgtcaaggctctccttctcctttaaaatgatcactttgggccaggcatggtggctcaagcctgtaatcacagcactttgggaccccaaggtgagaagatcacttgagaccaagaattcgagaccagcctgggcaacataataagatccctgtcacccctgtctctacagaatttttttttttaatgatcactttgctgtgtggagagtgaagaatcacagaggaagaagagtagaggcgggagaccagttagaagctgctgaactgcatgtgagggcataggcatccaggatagtgtgactgcagcgcgaggctccaaaataaaggggcccccagcaggtcccctgaattgttctgaataggtatatgcccccatatgcagctgcccaatattcaatttcattatctatttaaccggctaatattcggattcaactgttgttcattgagtacctactatattttagaccaagcactcctcaaactttaatgtgcagagtaatcacctggaatctggcaaaatgtggattcagttaaacaaagtttatgggaggccattgttttggattagcctcttgcactcggccgcagcagaatagatcaaaccagaatggagtcacttagtgctaagtgccgtgtatacaaactgaactttgaaacaggccagttttcctaaacaagaggaggttccaatcaacctgagtcagcataatcaggaaggcccctctcctttaaccctctgaggaaagtaactttgaaaccaccagttcacttttttgttttctgtctctgctttctttcacccttttctgtctctaaagccaacctctctgctcagctccttggaacacctattttgttttatatagaatgaggttttgcctgattctagaatcaaaaatgaaagcttattcaatctgtaaaataaatctgttgtaatttcatcttttgacatgatttcatagggctgaggtgagtcccgagagtctgcctttctaagaggtgacgttgatgctgctacacctatggttttcaaatcacactgtgaggcagagtcacttgggaagattttgcaactaccaatgcttggatcccaccaraaatggattatcagcttctctgatatcagcttctcctccaacatttggaggatcccaaatgtggtatttttgaagaagtttcccagatgatgctatggtacagttaaggctgagaactagaactagaagctttcagccaatttccctggtatgtggctagtattgcttccattgtacagagaaggtaaaaaggggtaacttgccaaaggtcatttggccagtaaatggtaaggtggaggtttcaacttagttctaattccaaatttagagcttttttcatagtaccacactacctccctacttccctattttgggcaaaactcactttgctaggtattgaagggaatgttgtctgagtcggactccagtcaggaaacagaaactcgttggctattgcaaacagagggtatctaatacaagaggtttggtacaatgatattgagagggcaagaggaacaaaaggaatagttgcagaaggaacccaaaggaaggtatgttcccagagatcaggcaacctctaggatcctgggatggaaacttggactttgcatctggggctgcactgctagagatgctgcttctggtgctcatgctggaaccactggagccaggtttctcccagaccctcagccccatgtgaatccaaaccctgtttcaaaaggaatgtccatgggaaaatggggtttgatttacaygttcagttttcaggctacatttgctagaatgcacctcttttgtatgtgcaagaatgccaataggtgctctgaaagctgaattctttagctattcgtcatatcctagtggttagcatcagaaggaagccagtacagttgggtctcggtatctgcaggggattggttccaggcccacctgcagataccagaatccaagcaaacttaagtcccacagtggactctgagggacctgtggatacgaaaagtcagccctccgcatccacaagtttcacaccccaagaatattgtattttcaatccgtgtctggttgcagatggaacctttggatatggaaggctgactgtattttgaaaaaaatctgcatataagtgggcccgcccagtttgaacctgtgttgcttaaggtcaactaatgctctttggcattttgggactgcccctcacctactgagtccttcacctgtggagccccagcagctggacacccgggtgctcagtcttccactgcgttcactgcgtcttccccttcagtggtcaccctggtgggtggtggtcgcacagcttggtgtgtgtccttaccatgctgtagcctctggtatttattaatgaaaacttttctttgtgcgtgaccatctctgctttgcattcttcccaatgaccaagaacattttgaaatgaaaaaaaaaaaaacccaacaaaaacaaaattgtaaaattacaatgactcttattgatattttgatagattaaaaaaaaagactagtaagatttgaaatagaataaaacgtatttcttatagcttgtgaagaatgtttttaaaaagcagaaagatctccttttattaagtgaatacataaaaatgatgatagaaaatttcttatggcatcagtaattaatttatattcattaaacaaatttccatacctgcatgtatttacataatttccttctcttatgattaatttaatacttaaggagaaaatgaattattgattattttaatgccagaattataccctgcctcaagtttcatctgtgggaagtgctattccatgtaactaaggagacagaaaatcccctaagttgatagattggtttgtttcctgttctactttggtttaattactatttgataattactatttaaaaatttcaaagcacttttcattttctccctagctgtgctttataatttgcccaagggggtctgttttgtttttkttttttttttctgtcatgtgtttgaataaatagcaaattgttgctgctttttccagggaagatgcaaaagagctgtgtcatatttctttgtgtaagcagttttctgaattattttctttggtctacctagaacaaataagtctctgaagaataagaatgaacacttaacttttcactacccttaaaatactataatagcagtacattaatcatgtgtcaattaaaagccaaagggggctgggtgcaatggcccagacccataattccagcactttgggaggccaaggtgggcagatcacctgcggtaagggagttcgagaccagcctggccaacatggagaaaccccatctctcctagaaatacaaaaattagctggacgtggtggcacgtgcctgtaatcccagctcctcaggaggctgaggcaggagaatcacttgaacccaggaggcagagattgcagtgagccgagatcttaccaatgcacttgagcctgggtgacagagtgagactctgtcccaagaacaacaacaacaaaaatcaaaagggcctcccagagcagcacatagtgtttttgctgtcattcttaggatctctaaagtctgccattacggtatagaaagtgtcagtgaaataaggaaaatttgtcttaattactttccaggaaaaaccaaggtaggcctcagttaatttgttgtgtagacaagaaggggctttccaacccatcctttctcatctgtgttttgagggagagtcagatggtcatatgcacacatctgttrtatgtaactgtcttacaccaatcattattttatttacaagatctagctatttgagagagattgcaaaaactggttttagctgcttgtgtttcaagtcagaagtgcgtgaaggaggtcaggccatgatcactacagtgtggaggccgccggctgactttgttgaggaaaatgaggtccagcctgtagaagggagctagggagtacagagcccgaaggaaggtggtggggagttttctcgtctgcacatccctccctctgtggttatcccagcaaagtgggaatattatttaaaccatgtactgctttattttgctggagcatttgatatgtttaaaaagtgtcagaccatttcctcggcaggcatatgcttgcacttagccttaattcctacccttggagaaggcaaatacagcgtggccctcgtctgtatattttaagaggtttcttataacaggcctagtctgtggcaatcctagtgagtagtacttagtgggtttacaaaccactctgtcgcggtgatgacatactctgtgtggttctgggagctaaataaaacaccggaaatagatattaaataaaataaagaacacgcctatgtaattattgccagaaatgaaattttgcaaccctaaatttgaatgtggtctaggcacctgaagattcctgtagctaaacaaacatcatttcccagattaaaatttcaggaaagcaacgtctatcaagtgtcttatttgggtaaaatattttgaaaatgttttgactgatcacagggggaatgggaagcagatggtaagtgagacaggtgcccctaaagtccacatccccttctgaatggctccatttcctattacattagacagcaaaggccactggcccaggccaatgtcacttatgttctgctaggggacttttggccaactcagaagatattggtccttactgtggaattgttttgtgattttaaaatatagatctctttaaaccctgaaaaaatatatttttaaaaggactaattttttaaacggcagtgatccaatcaatatgattgcagtttgagcttaaggggcactattctcactcaagtctttggatttttctgtagcctttcccaaaagtgagctaatgttttgaagtgtcagttatttacttcggttctgtctggtagaaaatacacaagttgtctcatttaatcatgaaggtaactctcttmggcattttgcaggtaagaaaattgaggctctaagaggtgaagtaatttgcagaagccactggaaagtggctgattccagattccagacccagctctgtctacctaaaactacatcatctccctaaaacacctcactagccatgctccaatgcaaatgggcctagcaagttcaaatacatttgtaatttgcctaggttttccatttagctgaagttaaccacacttccagtataatccaggtatttatggtttttgtgttttgttttttttctcccatttacagcacttagcataatgttctgcatagagcacatacttaatgaatacttgctgaattaattcatttcagatacgttgagccccgtgaaagctgcttaatttagaaggctcagagtaactttggttaaaaaggttcagggatggatcctctccaccctttcgttcacctggtaaaatactatttcaaggactaatttataccatcgtctcctttaggtagctttctctgacccactttgtcactgaggcagaattgtttcctcatctctgtatgacttagcactgtttatgtacttccatgtcacttttttaaaagcaagaatgaaaataacttttatttattgtgcaatgtgctagacattaaactaaatactctacacattttgtctctttaatcctcaaaacagccctgggaggtaaggctgttgtcctatgttacaagcgaggaaagtggggcttaaagagaataagttacttgccccaggtcttacagttagtgaatttcaaagatgcagtaggaacccagttctcgcctgttttcaatatattcttttcttattaagataaaatttgcagtaatgtgcacatatcttacatgtacagtttgatgagttttgataatacacacatctgcttaaccgttgatccagtcaagatgtagaacatgtccactgatcagaaagttacctcattgccccttccctgtctgctccagccactcaggattagggctgcctgttctttatttaaatcaattaatttatttcttattttattttattgtttctctcagttgaattttattttattttttcctgcttttattttagatacaggggtacatgtgtaggattgttacatgggtatattggacccaagtagtgagcatagtacccagtgagtagttttgcaacccacgctcctgtcatttcctgcccctgtagtaggttgcagtgtgtattgttctcgtgtttatatccatatgtgcttaatggttacctcccacttacaggtgagaacatgtggcatttggttttctgttcctgtgctaattcacttggcattatggtctccagctttgctgcaaagaacatggtttcattgttgttgttttttttaatggctgcatagtattccatggtgtatgtgtaccacatagtctcgatccaatcctccactgatgggcacctaggttgattccatgtctttgctattgtgaatagcatggtgattaacataagagtgcatgtgtcttttttggtataatgatctgtattccttcgggtatgtacccagtaatgtgtttagctgggtcgagtggttgttctgttttaagttctttgagaaatctccaaacttgttccacagtttgaaactaactgaactaatttacattcccaccaacagtgtatatgcgtttctgtttctttgcagcctcacagggctgcttgttcttgaacttcatagaaattgaactctagagtatgtattcttttttctctttcatgtcttttactcaaaataatatttttgaggttcatccgtgttgtgatatgtaaagatatccactacatcagtggttcattgatttttattgccaagcagtattccatttcatgaatatatcacggtttatttattcattgtcctattgttgggcatttggatggtttccagtttgrggctattgtgaataaggccactgtgaatattcttcatctatgtacaagaatgtacaaaaatctttttgaggacatatgctttcatttctgttgggtaaatacttaactgtgtaatccctgggtcatagagtagaaacatgtttaactttataagcagctgccaattttccaaagtgtctgtatgactctacactcccactaacaatgtgtgagtgttctaattcatatctttcccaatatttaaaaagttttatgctactttaaaatagtcctctttcatttatgcagccaaaaaacacatgaaaaaatgctcatcatcactggccatcagagaaatgcaaatcaaaaccacaatgagataccatctcacaccagttagaatggcaatcattaaaaagtyaggaaacaacaggtgctggagaggatgtggagaaataggaacacttttacactgttggtgggactgtaaactagttcaaccmwtgtggaagtcagtgtggcgattcctcagggatctagaactagaaatrccatttgacccagccatcccattactgggtatatacccaaaggactacaaatcatgctgctataaagacacatgcacacgtatgtttattgcggcactattcacaatagcaaagacttggaaccaacccaaatgtccaacaatgatagactggattaagaaaatgtggcacatatacaccatggaatactatgcagccataaaaaatgatgagttcctgtcctttgtagggacatggatgaaattggaaatcatcattctcagtaaactatcgcaaggacaaaaaaccaaacactgcatgttctcactcataggtgggaattgaacaatgagaacacatggacgtaggaagcggaacatcacactctggggactgttgtgggttggggggaggggggaaggatagcattaggagatatacctaatgctaaatgacgagttaatgggtgcagcacaccagcatggcacatgtatacatatgtaactaacctgcacattgtgcacatgtaccctaaaacttaaagtataataataataataaaaaataaaaataaataaataaataaaatagtcctctttcccatttgactttgagcctgtcaaggtcaggaaacatgtaccattcatttctgcatccaccatgcttagctcagtgtgtggtgcaataaatatgatgcacatgaaactataatttgagaattgtagaaacagttgtcaaagtccctttcagcagtgacaatctggaaacctaaccatgtgccatggggcatgcaggtagttttacactgaaaagactttggatagttgccttcagagggtagcagcctttcaaaggtgaagtggcagattggtgatctccagaaggaagtgagtgaccagccaggcatgggctctcctgagtgaggcaggctggtgagtcccactgtgtgctgggaggccatgcttcagcartatgtccatctgacatgaacagttcacttggatatcagtggaagccataakgtcttagcttgtcgacctctgacctgctatcttttaggatgatgttttagttatctgtagcaatataacaatatgagaaggcacttagcagcttaaagcaacaccttattcattgcaacacatacttattatctccaggttcctgtgggccaggagtctggcataacttgacagagtcttctgcttcacaaggctacagtcaaagtgtcagctggggctgtgggtgagtcaaagcttgactggggaaggagctgctagcaaactcaagtggttgttacaggattcaggtcaacgtgggctggtggattgtgggcctcagttgcctgctgaatgttggccaggggccgcccaaggttccttgctgttataaatttgtgtaatatagttgctgcctcagcattcattttcaggcctgacataagatgtttgaaacccagtcactccctgtcacctttggcccagttaaaatttcccctcgtgtggttgtttgtaatttggcctccttattccttacacaaggacatgaataccaggaggtggggagaactgggaggttctcttggagtctgtcacagatggtccattagaattctttttaaaaagtggaagtaatacagatactgtgaggaaagtagttgttttgacccaaagagaatattatattttttactgttctaatgaatagtttcaggggctccagctttatctccaacacagagagcctgttctgggtaaattatctgcagttcatgttcactggcacagaagattgattggaaaacatgaagtgatttctggataaatactcatcagtgggttcattcagtgcagatgaattgagtcttttctataatctcccactggacagagcttttgctttgaaatttgtcatgggttaaagagattggcagagtgaccccctataacctaagtgtaggaagccagatatttttgtcagcaaatttgcttatctggaatggaatgattggccctgaccagacacggaaaaaaatcttagggtcatataaaagtaacttgtcacacctgttgggagaatctttttaagaagtaagtcacatgtatgagaaacagagcaaacaaaatattttacttgttaggagatacctggaagatgttcaggctttaacacttagctttggtgagtttagacagtcaaggaagacagcagagtcttgttctgccctgaccatggtatagttattctacccattcttggttgttaaaaaaaaattcaatgttttttcccgcaaacttgaactaagcacaaaggcttattttcagttataaaaaacatgattaaggctgggcatggtggctcacgccagtaatcccagcactttgggaggccgaggtgggcggatcatgaggtcgagagatcgagtccatcctggctaacatggtgaaaccctgtctctactaagaatacaaaaattagctgggtgtggtgatgcgtgcctgtagtcccagctactcaggaggctgaggcaggagaattgcttgaacctgggaggtggaggttgcagtgagccgagatcgcaccactgcactccagcctggtgacagagtgagactccatctcaaaaaaaaaaaaaaaatgattacactattctaataggtttgaaagttttgagaaactttcaaactctgtttcttatacacagagagagagacatatgacaagaaattgattacaggaattggctaacacatttgaggaggctgcaaagtttccataggctctcttcgagccggataaccaagaggggccggtagtgtggctcagtccaagtcagaaggcccaagaaccaaggaggctagtgctgtcactttcggtttgaggctaaagaccctagagccctagggcccactggtacaagtcctagagtccaaagaccaaggaacctggagtcctcgtgtccaagggcaggagcagaagggtgtcctggctctgcaagagagataatttgcccttcctcctcctttttgttctgttcaggctctggatgagtgggcggtgcctgctcttgttgagggtggatcttccccactcagtccacccacttacatgccagtctcctctgaaaacactctcaaggacacacaggaagcaatgcttcaccaagtcatccaggcatccctcattccaattaagttgacgcctaaaattaaccattgtagccatagagctgaatgtaaaaatttaaaaattcatctccttcataagctgcataaacctccttctttgagtataagaattaatcatcccaatgaagtagaaaatagtatatttatgtcatctagttgaaaaaggcaatattaatagacatttggaaactccttttgccacatttcaagtttattccgggcagtttaccttgagaaaaaaatgcctcttttgatggatgctgtattagtccgttctcacactcctataaggacatacttgagactgggtaatttttaaaggaaagagatttaattgactcaccattctgcaggactggggaggcctcagaaaactacaatcatggtggaaggtgcctttttacagggcagcaggagagagaatgagtgctgagcaaaaggggaagcaccttataaaaccatcagatcttgtgagaactcactcactatcatgagaacagcatgggggaaactgcccccatgattcaataacctccacctcgtcctgcccttgacacgtggggattattacaattcaaagtgagatttgggtggggacacagagccaaaccgtatcagatgcagaccgaaagagcaattttattttagttacaacataataatggtgttatatagtgtataactatagttatatagttacatatatatagttacagttatacagtgcttactgcttattatgtgccagatactgttctatgtggtatatgtgtgtgtgctggggatatatacccactctatgatatatactaattctcaccttgctggttccctggttaatgagctaaataaatatttgatgcctacccactttatatttctatgagtgtagtgttttcactttttgaaaattatactttagtcaattctgtgatacagatactattattattccagttgtatggagaggcacatgagacacagagaagttgagtagcttccccagggcttcatagcagcccacggtggagccagcatttgagtgccagcagcctggaccagcgtctgctcttaactatcatgctacaccccgtcttgaagaatttattttctttgcatatgtaggccatagccacccttctgacactaaagaagcacaatcaaccagagtccaaggcaaaccagcacatttcatctacggagagcaaactaatcaaaaaagcacgcttgctccagcctgacccaagcatctgggttaggacaaccaatctaagaaagcccacacttcactattttaaagaaaataaatccttggcaatagtggcctcattatgattctgaagggcaacataaaatgcttcccagatgaattagtaaacaacaccaaaagttgcaggaatggatggaggtctgtgaagtgtctcaatgggcaactggaagtgcagcctccaggttgacatatgggattacagaggaaccaagaagggaaaaatgatggaaagagatgagcagtttctgaagtgtggttgtggtatcactgatgtcgtggactctacactgatacctgccctcactatgattcccgttgtcccactcggacgaggccttcaacagagctgcatttagaagccagggaagattttcccgttgtatcatctgtggtctttctactggcaactctcatgggattccttggctggagggtagagcaaagcatcagaacccctaggctctgcctttgaaactccccatatcattcagaatgggctttaaatggcatctgtgccattccagaactcacccttgtgaagctgatggctcagggcttcctgctcttgtttggaggtggtgtcagtaggggcagaggaaggctcagccagtctttgtggaccctggtagccaggctcgctcctgctcctggacattttgagcaacaaatggctattgtcatggacttttagcatccctcatccctgacatgtagcctcgggacagactagccagctggatttactttaagaagtatgtataatatatttgtatacacacacatatatatacgtacacatttacttatagtttttactgatgataaaatgaaatgttaccagtataaaagcaatttggacatcacaaaaaattataaagaaaaaaatgcaaatcttgaactagaaaaaccaaggtagaaaattcctggaaatccagccactcacagatactgctttatttactaaaaagggaccattagcattttaaataccttttcatgcaaatctctatgcatatatacatataaygtatatctctatgcatacagatacaactgtttgagaatttaactatgctaagcagactgttggcaaacttttctgctcagccaggcgacctttatggtcaatcaatgctggtgtaaatcaccattttagcccatagaaataagaagaatgttgtgactgggctttcctgtggtgaggtgacggctgggaatagaatgatcagaacatctgggttcgtgcaatttttcctgaacctttgcagactttatgtgtacattgggacgagggagtcactaaagccgaggggagccctccagctcactgctccgacaacttagagggcaagtgccgaaacagaagtggctggtgttgactgcatgtttacsgtggctgccaactgaggggctgcccctgatgaggccgagtgagtgaggcccacactgcaygtggctgggaaaggtttcaaaccatgacttcttacctttgttcaaaccagatgcaaggaatccgaggatgatgtctgggtactgatttaattagcagcaaaagggattaagcaaaccagcaatcatgctctttcatctctgtccagaaaaggcgtttttacctgcacccatggttgtgaatctgtgactgatgccagtgttgtcattaagaaaggacctcaagcaaagcagagtcgggaacattttgtgtttaaaatgtttagaaacaaacatggacagagcccactgatttttcctctgggaaaaagacagtcactgtaaatagacaaattacactgaatctatccgaaacatatgttgcgtttggctaaatgctaatctcttatttgccctcctgctgccaaggcccgtgctgcgtgccctggatctggatgtgtgtttaaacgattatagttcaggaaaagagcctaggcctgttcatgttccattgaggctcctgttctcagacttactgattttcaatctggagattttactgaaatatatattacagtctcttaccatgtaagccaagtctgtttttactttatccatttgtatggagaaatatcataatcctcagagatctggagcataggagattgctttgagggcatgtagggtaggagctgcctagtgaactgttcacttggcctggaatgtctttctctcttgccaatccccacctttatcacttaattcctatttatcttttttattgaagctcaggtagcatcttccccgggaatcctttgctgaccgccctgagcctgagttggttattcctccactgggcttccctagctgcccactgctttcctatctccaaacctccccagacttgtaaggtctgtgagggtcagaaccccccaacccccatgtgttatgcccagcaccgaggacagtgcctgtcacatgactttagtaaatacctgttgaatgaatgaggacacttgtcttcttttcttttcttttaaaattctggggtacatgtgcaggacatacaggtttgttacataggtaaacgtgtgccgtggtggtttgctgcacctatcaacccatcacgtaggtattaagccccacatgcatcagctatttttcctgatgctctccctccctcccccaacaggcccctgtgtgtgtattcccctccctgtgtccacgtgttctcactgttcagctccacttataagtgagaacatgtggtgtttggttttctgtgcctgtgttactttgctgaggataatggcttccagcttcatccatgtccctgcaaaggacatgatcttgttcctttttatggctgcatagtattccatggtgtatatgtaccacattttctttatccagtctgtcgtctgtcattgatgggcatttgggttgattccatgtctttgctattgtgaatagtgctgccatgaatatacatatacagatatctttataatagaatgacttatattcctttgggtgtatacccagtaaagggatcgctgggtcaaatggtatttctggttctaggtctctgaggaattgtcacaccgtcttccacaatggttgaactaatttacattcccaccaacagtgtaaaagcgttcctgtttctctgcaacctcaccggcatctgttctttcttgagtttttaataatcatgattctgactgatatgagatggtatcttattgtggttttgatttgtatttctctaatgatcagtgatgttgaactttttttcatatgtttggttggccgcatgtatgtcttcttttgagaagtgtctgttcatgtcctttgtccactttttaatggggttgtttgtttttcttaaagccatttgttcttcaacaggggactcctgtactccaagtaacactttctgctcccagagccacttccctaccccctgcatacccaaaatactggggtgatattttagatttccagtcctccagatacataaggacaaaaatgtgcaaccttttgcatcatrtaacaaagttctttctttcttccctaacagatatcacacatgatgaagtctgatagctagtgtcgggtagttgacagaaaaacaaacaaaaaggtttttttaaataaaaaagcaagcctgtgggtcttcagaataaaatcactttgattcagctataaaaatatgacttagaaacattgcagtgagcattgccaaatacagctcctctgctaccgtctgtcctggagctgcacacctgtccctgtaccgctgagcccacgctgtaggatcttggaattggggcgtggacttgttcattgtgagcacacagaatgtggacatgattctgaatgtgtggctgtgttggaacttgcccaatctatttcaagatgataaattacatacttccggaaaggctattctgttttccccacagaagatcttaactactctttgtcttctccttttatagaactgaaaatttaattttgtctaaatgtgcttttcttcatatttacttacattctcagcattacagtatactgtctacagaaacacagtcctagtttttcattttaggaaaaggtgattcattatggaacaaatcttaattttaatattaccatgctttggtagaagtcagtgttggaaaactctagaaagtattgccttggaataaaaatatcaggtgggggaaggagcaaggatagctgggggagggctgagcttctatttcctgatgaattgaagttcacatatggatggggtgagatcatggtgtaatacacaaaacttgggtcaagagggtagaaattaaaggtaggaaaacattttagaagcctctgttgctgaaatatttttgcattgtagtggatattaattattccgatgttaattattcgctaggggtctgtgttagtccattttcacactactgataaagacatacccgagacggggcaatttacaaaagaaagaggtttaatggacgtcgggttccacgtggctggggaggcctcacaattatggtggaaggcaaggaggatcaagtcacgtcttaagtggatgccagcaagcaaagagagagagcttgtacaggctttttaaaaccatcagatctcgcgagacgtattcactatcacgagaacagcacgagaaagacccgcccccatgattcatttacctcccactgggtctctctcccttgacacgtgggacctgtgggagttactattcaagatgagatttgatggggacacagccaaaccgtatcagggtctttcctggtttttacccagtgtgcttcaaacagtcattgctttgcagcctacttgcctcgccggggatttgttatctcctctcatagtgctctaacaatttccttttgttctcagatcactgccctttctcaccaggggaggattcactcacagaaagcaggtagtgggctgtcttaggtaaagaaatacccacttctggtgaaagccaggtgaggaaggccagtgggaacagacgggagagaaggaacaagctctctgctgggaaggtcactgttcccagggaggacttatttggaggctgaaagccagataactaagaaaattaaatggtagtttccaatcagagtaaaaaaggatccaaggaaggtggggatgagtttctggaagtggttttggcagaaggcagtttcatctttccatgcacttgcacacaggtagaaatctgcattttttcacctgagttttgctcactaatgttcataatattaatacttcgggagaaaaaggagacccttacgatgagattcactagaaagctgagcaagacatgtatcctggagttggccacgggtaccactgcagatgctgggcaatacagtttgtgttgtgtaaattatacacacttgagctggcaggaactagggcagcacctggacctgacaaaaaagtcaattgatagatgacacatttcctcctttgtatgttggtgatcaattctaactttttacaacctagtcaaattgcttacagctgaaaaatatggggttttgttttgttttgttkcgttttgagacggagtttcactctgtcacccaggctggagtgcagtaacgcgatcttggctcactacaacctccacctcctgggttcaagcgattctcccacctcagcctcccaagtagctgggattacaggtgcgtgtcaccatacccggctaatttttgtagtttttagtagagatggggtttcaccatcttgaccaggctggccttgaactcctgacctcgtgatccacctgcctcggcctcccaragtgctgggattacaggagtgagccactgtggccagccgaaaaatatgttttgattaatattatgtaaggtaaataggggaaacgttcacaaagatgattcatgctaaacaaataaaaccagagccacatccatcagcataacgtagtgcaataaaatgttatatatcaaagtacgcatctactaagtcctattcatcggagacagccacaggtgatagtgtatgggcagaggtgccaccaacctagcatgtcctgcatgggggcttttcccttagtcaataaaggccagtgactaggcggtagctacctcttgaagagatgggactagggttgcggggcgggctttcccacataatctcttgtgggatgtcagagatgatctgggtaaatcacgtgtttatgcgtgagttatttgccttggtcaggaaggctgcctttgaactgactagaatagaaaaatgacaggtgtaaacttgccctaagttacatttcaggttggtcttcataccaaagcttatggagaattgggatctaaactgttactgtggttgaatccctgactttctcttttttcctccttttttgaggaggaaaatcagagataacattttagaataaataatttattatagctgaattacttaatactggcaatgagagctttgtgatatatatattacattatataataaattacatatattattacatatattacttatatatacataatatataaactatatgcctattatatataatttaaaggagggaatgaatgtaggtgtagtagtatgtcatcttagaattttttgggcttttcatcatttttatgaggaagtcaattaacaacatcttgaaattgttaaacacattcagtgaacagaacttggcttcaactgtgaattttcaccacaagctctgcaacaaattgtagggatgctctaaggagagccacagctactctcacggtcagagccccctaagcacacacatacacaccaagctgattctgcctgtcattctcatgactatacggtttcccactgtaaatgtatattccttttatcacaactgagttgagtcatagccatcctttaaggcacagcgaatgtattacgcccaccgtaagttctgccaacattgtatctactccttcccgtgaatgcacagtcaattaacacaactgggtaagtatatctaacttaccaagggcagaacttagagcacagactgtatttgcaccatgacattagatactcggttatagtcatcttaactccaattctgcatatgaggaaaagagactcagaaaagctgagtggcttgaccgatattgtagagcttattcatggtgaagattccaggtggtcttgaagtgctcttaccccttatgaaatttcccagatgtgaggcagatgttgcagtgagctgagatcatgccactgcactccagcctgggagacagagtgagtctccatctcaaaaaaaaaaaaaaaaaattcccagatgtttgaggaggaagaagcatagcaagtgcttctccacctctgtttattttttctgtctgatccaggtctgggtggctagtggttgagaaaccacaggatagtggtttctcctgtcagtgaataggaatcttcattaggcaaaaaacaacacttgggcgaaaatgaaaaaaaacccaagtatgtgttgaatgcaaagagtatgtttacttgtagcaacattatagaatatattgtgtaatgcaaacatacacaatgccttctaagactgtgaaagcattttttattagtcagtgttctgtagaggcacagaactaataggctagatgtatatatgaagggagtttattaaggagtattgactcacacgatcacaaggtgaagtgccacagcaggccatctgcaagctgaggaacagggaagccaatccaagtcccaaaacctcagaagtaaggaagcctacagtacagcyttcagtctgtggccaaaggcctgagagcccctggaaaatcactgatgtaacaagagtccaaaagctgaagaacttgggtctgatgttcgagggcaggaagtattcagcatgggagaaagatggagaaagctgatttgatggtgcccacccagatagagggtgggtctgcctctccagtccactgactcaaatggcaacaccctcacagacatacccaggaacaacatttgcatctttctttttttttttttaattatactttaagttctagggtacatgtgcacaatgtgcaggtttgttacatatgtattcatgtgctatattggtgcgctgcacccattaactcgtcatttacattaggtatatctcctaatgctatccctccccccttgccccaccccacaacaggcccgggcgtgtgatgttccccaccctgtgtccatgtgttctcattgttcagttcccacmtatgagtgagaacatgtggtgtttggttttctgtccttgcaacagtttgctcagaatgatcgtttccagcttcatccatgtctctacaaaggacgtgaactcatcctttttttatggctgcatagtattccatggtgtatatgtgccacrtttttttaatccagcctatcattgatggacatttgggttggttccaagtctttgctgtygtgaatagtgccgcaataaacatacgtgtgcatgtgtctttatagcagcatgatttataatcctttgggtatatacccagtaatgggatggcttggtcaaatggtatttctagttctagatccttgaggaatctccacactgtcttccacaatggttgaactagtttacagtcctaccaacagtgtaaaagtgttcctatttctccacatcctcttcagcacctgttgtttcctgactttttaccattctaactggtgtgagatggtatctcattgtggttttgatttgcatttctctgatggccagtgatgatgaggatattttcatgtgtctgttggctgcataaatgtcttcttttgagaagtgtctgttcatatcctttgcccactttttgatggggttgtttgatttttttcttggaaatttgtttgagttctttgtagattctggatattagccctttgtcagatgggtagattgtaaaaattttctcccattctgtaggttgcctgttcactctgatggtagtttcttttgctgtgcagaagctctttagtttaattagatcccatttgtcaattttggcttttgttgccattgcttttggtgttttagtcatgaagtccttgcccatgcctaggtcctgaatggtattgcctaggttttcttctagggtttttatggttttaggtctaacatttaagtctttaatccatctcgaattaatttttgtataaggtgtaaggaagggatccagtttcagctttctacatatggccagccagttttcccagcaccatttattaaatagggaatcctttccccattgctggtttttgtcaggtttgtcaaagatcagatggttgtagatgtgtggtattatttctgagggctctgttctgttccattgatctatatctctgttttggtaccagtaccgtgctgttttggttactgtagccttgtcatttagtttgaagtcaggtagaatgatgcctccagctttgttcttttggcttaggattgtcttggcaatgcaggctcttttttsgttccacatgaactttaaagtagtttttttccaattctgtgaagaaagtcattggtagcttaatggggatggcattgaatctacaaattaccttgggcagtatggccattttcacgatattgattcttcctatccatgagcatggaatgttcttccatttgtttgtgtcctcttttatttctttgagcagtggtttgtagttctctttgaagatgtccttcacatcacttgtacgttggattcctaggtattttattctctttgaagcaattgtgaatgggagttcactcatgatttggctctctgtttgtctgttattggtgtataggaatgcttgtgatttttgcacattgattttgtatcctgagacttcgctgaagttgcttatcagcttaaggagattttgggctgagatgatggggttttctaaatatacagtcatgtcatctgcaaacagggacaatttgacttcctcttttcctaattgaataccctttatttctttctcctgcctgattgccctggccagagcttccaacactatgttgaacaggagtggtgagagagggcatccctgtcttgtgccagttttcaaagggaatgcttccagtttttgcccattcagtatgatactggctgtgggtttgtcataaatagctcttattattttcagatatgttccatcaatacctagtttattgagagtttttagcatgaagggctgttgaattttgtcgaaggccttttctgcatctattgagataatcacatggtttttgtcattggttctgtttatatgctggattacgtttattgatttgcatatgttgaaccagccttgcatcccagggatgaagcccacttgatcatagtggataagctttttgaggtgctgttggattyggtttgccagtattttattgaggatttttgcattgatgttcatcagggatattggtctaaaattctctgtttttgttgtgtctctgcccggctttggtatcaggatgatgctggcctcataaaatgagttagggaggattccctctttttctcttgactggactagtttcagaaggaatggtaccagctcctctctatacctctggtagaattcagacgtgaattcgtctggtcctggactttttttggttggtaggctattaattattgcctcaatttctgaatctgttattggtctattcagggattcagcttcttcctggtttagtcttggggagggtgtatgtgtccaggaatttatccatttcttctagattttctagtttatttgcgtagaggtgtttatagtattctctgatggtagtttgtatttctgtgggatyggtgatgatatcccctttatcattttttattgtgtctatttgattcttctctcttttcttctttattagtcttgctagcggtctatcaattttgttgatcttttcaaaaaaccagctcctggattcattgatttttttaaggtttttttgtgtctctgtctccttcggttctgttctgatcttagttatttcttgccttctgctaggttttgaatgtgtttgctcttgcttctctagttcttttaattgtgatattagggtgtcaattttagatctttcctgctttctcttgtgggcatttagtgctacaaatttccctctacacactgctttaaatgtgtcccagagattctggtatgttgtgtctttgctctcattggtttcagggagcatctttatttctgccttcatttcattatgtacccagtagtcattcaggagcaggtcattcagtttccatgtagttgagcggtattgcgggtgttccttaatcctgagttctagtttgattgcactgaggtctgacagacagttttttgtgatttctgttcttttacatttgctgaggagtgctttacttccaactatgtggtcagttttggaataagtgtgatgtgtgctgagaagaatgtatattctgttgatttggggtggagagttctgtagatgtctattagatctgcttggtgcagaactgagttcaattcctggatatccctattaactttctgtctcatggatctgtctaatgttgacagtggggtgttaaagtctcccattattattgtgtgggagtctaagtctctttgtgggtctctaaggacttgctttatgaatctgggtgctcctgtattgggtgcatatatatttaggatagttagctcttcttgttgaattgatccctttgccattatgtaatggccttctttgtctcttttgatctttgttggtttaaagtgtgttttatcagagactaggattgcaaccactgctttgttttgttttccatttgcttggtagatcttcctccatccctttattttgagcctatgtgtgtctctgcacatgagatgggtctcctgaatacagcacactgatgggtcttgactctttatccaatttgccagtctgtgtcttttaattggagcatttagcccatttacatttaaggttaatattgttgtgtgtgaatttgatcctgtcattatcgtgttagctgcttatttggcttgttagttgatgcagtttctttctagcatcgatggtctttacaatttggcatgtttttgcagtggctggtactggttgttcctttccatgtttagggcttccttcgggagctcttttagggcaggcctggtggtgacaaaatctctcagcatttgcttgtctgtaaagaattttatttctccttcacttatgaagcttagtttggctggatgtgaaattctgggttgaaaattctcttctttaagaatgttgaatattggcccccactctcttctggcttgtagagtttctgccaagagaccagctgttagtctgatgggcttccctttgtgggtaacctgacctttctctctggcgcccttaacattttttccttcatttcaactttggtgaatctgacaattaggtgtcttggagttgctcttctcgaggagtatctttgtggcattccctctatttcctgaatttgaatgttggcctgccttgctaggttggggaagttctcctggataatatcctgcagagtgttttccaacttggttccattctccccgtcactttcaggtacaccaatcagacgtagatttggtcttttcatatagtcccatatttcttggaggctttgttcgtttatttttactcttttttctctaaacttctcttcttgcttcttttcattcatttgatcttcaatcacttataccctttcttccacttgatcgaattggctactgaagcttgtgcatgcatcacgtagttctcatgccatggttttcagctccatcaggttatttaaggtcttctctatgctgtttattctagttagccatttgtctaatcttttttcaaggtttttagcttctttgcgatgggttcgagcatcctcctttagctcggagaagtttgttattactgatygtctgaagccttcttctctcaactcgccaaagtcattctccgtccagctttgttccgttgctaccaaggagctgcattcctctggaggagaagaggcactctatttttagaatttttggcttttctgctctggtttctccccatctttgtggttttatctacctttggtctttgatgatggtgacatacagatggggttttggtgtggatgtcctttctgtttgttagttttccttctaacagtcaggaccctcagctgcaggtctgttggagtttgctgcaggtcactccagaccctgtttgcctgggtatcaccatcggaggctgcagaacagcaaatattgcagaacggcaaatgttcctgcctgatccttcttctggaagctttgtctcagaggggtacccggccgtatgaggtgtcagttggcctctactgggaggtgtctcccagttaggctactcgggggtcagggaccaacttaaggaggcagtctgtctgttctcagatctcaaactccatgctgggagaaccactactctcttcaaagctgtcagacagggacgtttaagtctgcagaggtttctgctgccttttgttcagctgtgccctgcccccagaggtggagtctacagaggcaggcaggcctccttgagctgcggtgggctccacccagtttgagcttccyggccactttgtttacctactcaagcctcagcaatggcargcgcccctcccccagcctggctgccacctcgcagttcgatctcatactgctgtgctagcagcgagtgaggctccatgggcrtgggaccctccgagccaggcgtgggatgtaatctcctggtgtgccatttgctaagaccattggaaaatcgcagtattagggtgggagtgaccygattttccaggtgccatgcgtcacagcttcccttggctaggaaagggaattccctgaccccttgcacttcccgggtgaggcgatgccccgccctgcttcggctcatgctccatgggctgcatccactgtccgacaagccccagtgagatgaatctggtacctcagttggaaatgcagaaatcacccgtctctgtattgctcactctgggagctgtagactggaaccgttcctattcatccatcttggaacttccaacactttgcatctttcaatccaatcaagttgacgctcaatattaaccctcaccggaatgttatgtgttgaggcaataattaatagttatccttggttgtttcagaaaatgtcatgattaatagttatagtaaagggaggaattgtaacttgacaaaatagtttggtctagtgtccagtttacagggcattgagatggttttctggtttcccttgttttgccctcagtacacaatgctcagtattcagaaaggctgatgtctattttctccacaagtgctaataaaaatttttaaaatgtggtgtgcattatttatatagttgttttattcataaaagatttaaaatctaggtaagctaactcaaaatgcgactttgtactctgcgatttttaggcctagaagtggtcatgactgtgaacattatgttggcttggaacctttaaaagttcatttggtctgtactgcaggtggcatttggatgaaagcacaggtggtacatacagtacttcgatgactccatctgtttggtgtggcatgtttaagaatgacttctgttaaagggatttgactcgaaatgcaagccctctttcctggcgtgttggtcatttttgtgacattagtggtggaaaagaagctcaaaatggtctctggagtggagtaacagcagggcttacttttgaaattgtctttcaaatgcccttttgggcatggggtcaccgtgtttaaagcttttgaaagactccccacagaaatgaatcaagtgttgcattttcagtgtggtgtccaattttgtgatcagaggtactgtagaggaaagtcgggtgttttcttaaattcctttttctttttggaaaagtcatttacttattacgtttaatataaagaatgttttaaaaagagagagagagagagagaaaacacctggttgttagacaagctggctccatgccaaagtgaaatgaaacatacagcaatcaaatgtcattagcatccaggtccggcattgacccattctttccttgctgaaattgtgtgtgtgtgtgtgtgtgtgtgtgtgtgtgtgtgtgtgtgtgtgtgtgaattcasagaagaggcaaattaatgtggcttagagtgttgaaaaatggacttaagaaagaaaatggggataggaatggctaaaatttggataggtggaaagatgggataaaaacactccaggtgaggaaacaaacttttgttaacttgactttgaatattttggggactatgcatggaatgtatgtctgaggcttttaaattgagaaagcatgcttcgttagacaattatctcttacatgtatgcacagccttatgtgacattatttatataactttagaatatatgtgtgtgtatgtatatgtatatgtgtgtgtatgtatatatatatacaaatacatatacatattggggaaagaaagaattaattagactttaaattcttccctgcttttttccatgacaatattgattattttataatcaatatttagtgataactaaatatatttagtgataactaaataaatttagtgataactaaaaaatgaaataacatagtttagaaaacctacgatgagctcccaaaccttatttctctcgtttatttatttgaaagacatttttcaaaatctgcccctttattaaattgctgatgttatacagacagaaaaaaccagtagtcgggggtagatctgcaaaataaggacgtcaactatgggctgtggaaaccggctcttccaaatctgtgctgcccctaccattggctagttgtcccttcctggggaaattttttgaccccttgagggttgtttcctcgtctacaagatgcgaaaacaacatccacctgaagattgaatgagagcactacctagtgagttgcctaatgaacaactcatgatagacataataaatgccagttgcattctattttcctgtacctcagaaaaatatcaaggcttccctacctaaacattcattttccactgcttcatatctctattagctagtataacttcattctctctttccagctttcatcagcacaatttcattataatattaatttctcatttataaccccgtgttattgtttttattctccttacaagttgtttttgcttcaatgcctctttgtactatcatgaaatatatttcctccattgctgagtgatctcttcaattattctctgttacatgtaccttcctttgatttatctttttacgacctccacaaggcatttttttttctttaggtttgtaatggctttgcttgattctgaaacggtcatggcctcgagggcaaccagagtcttgttcttactgcctgctctatggcttctctagtaaaacctcagctgtgaaagcaagtatctttcacttctcctatgctcaactaacttcagtctttgtgtcctgagatcagacaatctcacatccacgtaaccccaggtcctaccactgcactgggcataaaccaacacatttgcctgctagtcacagtagagaaaaatctgtgaaacctttgtcatttggcaggcacaaagtcattcttgagagaaaaacccagtttgcattaatcaaacagctttcccttcccatttctacctttctttgaggcattgttgaatacacacacacacacacacacacacacacacacacacacacatatatatgtacgtatgtatgtatttttgaaagccattttatttgtaaaattctgtgctatagcaccgactctttataaagagtcatacccatgttaaaatgtcttcttgatatcattaatatccttcttcttgatatttattattcatactttgatatggtttggctgtgtccccatccaaatctcatcttgagattgggtgggatggagctggtgagagataattgaatcctgggggcagtttcccccatactgttctcgtggtagtgaataagtctcgtgagatctgatggtttgataaggggaaacccctttcgcttggctctcatkctctcatctgccaccatgtaagatgtgcctttcaccttccgccctgattgtgaggcctccccagccacgtggaactgtgagtctattaaacctctttttctttataaattatccagtctcaggtatgtctttatcagcaccatgagaacagactaatacacacttgtttgtaggattgaaatctacatgataaataaggtgatttttaaaagatgagcagtttgctgtgcttgttgctgtaagggatcttcagggagtccctgaatctgagaattggaagtaaggttggaagatcatcctgtgcctccctccatccaacacagtaatcttcttaatgtctcagtcagaggctgttcatcactgatgagcctgccactgatgagcagtcctggcatcatcacttcctctgcaaaggacactgtgatctgaggccccactccatgtcaggccactccttagacaaaagctctgtcttctgatgagcttctgctcccttttgcaccatgataatgactttatttttagtaaggatagactcactcaattgatgttttctgctgttggggaaaaattgttttattaagaagcattttccaacaagtaagttgatgttaagtaggcttggatatatttggaattcacgaatgtgttttctccattagttccctgaaaaccagaaaacttgacgtttgttttaatgcaaagatgaactctggttttgtccaacagagctagtgctggcctttgctttcaagccctgtaatctgcatcaaccctcaaattcagtgattcaaaagtgagtgactcacttcgtctttgaaaagaccgtgaatatttctagatttatgagcaattcaaaacagccaggcttttagaagggatttcccaactcattttgttgaaaggtaggactaagacttctctagaaaagaaaccgatctactaagtactaaagagtatttatgagccacggtagactttatttttcagaatcatactacaagtgtaggaatacccaaaccctgccagggttttgaaaattacattaatttatgcccaggtataacccccccatcataaatcctgaaaaatgtgcaggaagactgtgacaggccattctaagagygtaacaagggctacatctttcagcaccagactgatgtttatgtatgtgactacttggaagatgttttacttaatgtaccatgttcttaaattggctctattttaaatataatcgtaagagttacactttatgtttgtatgccaggtagtttataaatgatgattttaaccactccccgtttcacaccaccccagccttatgaggtaagttttattcttcctgctttacctctagggaaactaaaactcagaaactgcaagaccttgccaaggttacgtccaataagtagatcactaccttgggctgttggctgccatactcacattcttcccctgcattctttcccttgtgccttcagcctatctttggaaaggaatttctgatgttaaggcacctatttgtttggctttggtgtagttttgttttttggtgttgtgtttatctgtgcatagagtaacatatggaggtctgggaatccttgtttatcttccaaaattatagttctgtgaaccacaaaatttcacgtaaatcctattaaagctgatgtgaaatagaactagagagatgataggaaaaggagagtgatgaatttattaaagcttactcccttttaatagacaccatcaggctcatgtgttaggttgctagttaattttgtgaggattacctttccaaatgacttcaataatttccactgctctattcaaaaccttattttacatttgaaggcctaataaagaagaaactatgatcctttccttgtgttacttgaaagtttataggaaagcataatcccagatgggatggttctatctgtcccacaacatctgtataagaccgacgctggcatcaaacgcatttcatccacacacgcttcctaaatcagcatcagcatttatgagcaactcttcaagtctcttgttcacatgcatgtcattttaatgcagtttatttgaaacatccggtagaatgttccttcttacccgtttccctaaagcatgagaagaattggcaagtgatgagtcatttctctgtcaaacataggattgatgcatttagaatgtggaagacacagtcatgaccagtcacaccaggccatgggccagaaacccatcaaacaggaggcagagctggaagcacaattttattttacccatttaaaattatgtgtgcattgacaccaaccttcatgcacgtgacccataacccagcaagaattatttcattcatagaaagtcaccaaggcctacttagtcctcacagactacttctattggattctgggtttagctttcccccagcttcacagtggtaatgtttcacacacacacacacacacacacacacacacacacagtggcagcaggaaaccagtctacccattgccttgctgtgtataccaccctggactgagacttgaacccagtccgagcccagctctgacactacccagccatgtgacctgggctcagcttcctttcctgtgaagggtgagagtctcagtgccctcctgacccctggggttgatgggaggggctgctgagatgatgtgtgacaacattaaagttctgcacgcatgtaagctcatttcagatgtgccccaatccctttggcatctttgtgaggacttccatttgccttttgaatgagactacctcttctgattttggtttcaagtcgtaaacacatctttaacttagactcaccatccagcagtcccctgggtatgcagatgccctgcactcttcccagtgccacaccctgctgcaggtgcatggtgccctggccaggtgcgcctgcccttctcttgctgtcagcgtccctcttttcttccagatacagctggggagactccctttacatggagatgtgcctgactccactacaggatgcatttactccggtcttctcttggttactcacagtggcctgttccctcctgacctggggcccagcacaggctgcccaccatctcctgggatgctctcaccctctttcctgctcttcctggagttcagggcctctgttctcccttctcacatacatcactctgtatttactctttgaaagactcatcacactcataaatcaatacttattttatcatcctttgtttaatgtctgtcacctctttttctgcagacttctgagggacagtgctatggactcaatggctgtgtccctctaaaatctatatattgaagccctaacccccagtgtgatgatatttggaggtggggcctttgggaggtgattaggtttgagggtagggctgccatgatgggattgggggccttataaggacgaaggagacagccaagcattctctccctctctctctctctctctctctctctctccctctctccctctctctctctgtccttctctctctctgtccccctctctttctgtcatgtgaggacacaggcaggatgagggctctcactggaacttgagcatgccagcaacctgaacttagacttcctgcctccagaactgtgagaaataaatgtttgctacttaggccacctagtcggtggcaatttgttacagcagtccaaactaagactgtatccccaggatccagcacaatgcccagcatagagattttcagtaaatcttagatgggtgcagtagtgactgtcctgcctctgatttctacccgtcacctgtcacactccctttatactttcccagacagctagcatttcactcacattgctgcacaggcctggtctcctatgagtttgagttatttactgaaattgatattcacaagtattacttcttttcaacaaacatgctaaagcatgaacttctacattagtgtagtaaccttggtaggctgtaaactccccacagccacatgcaggacacttggagtattgcttgtaggaattgacttcaaggcttgaagcttttaagaaaagttctctcaatgaggatatatgtgtgtccttagagaaagaatttcattacataagagaaacccactcactccaattcaggtttggagagtaagctaggtaagcaagcttgaaaattgtgaccacttagggtcaaaaatggcaggtagtaaggttgtcatgctgtggagtgagcaagcacctggggctgttcttaaccttcactattaaccagccgtgtgtcttagctgaattacttaacctctcattgctttgattatttcctctgtaagttgaggggtgtggtgtactatatctatggttatttttctgttctgaaatcgtgtatgtggctgtgtgtgtgcatgcacgtgcatgtcgcgggtgaaatgtactgactcgtaacaaagcttgagagaaaatcaggcttagtacaatggcagtttggttggattaaagccccctttcaaagacaacactcttatctgttgatgttctatatgtttgttaagtaaagcaatacatcaaaacttttcaaatcatggaatatttaaaaaatgataatattttgatggtacactgaagtaaactggtgagatgatggtgtctatatgaggcttgatgaaaactttcaccgcatatttttatgtaattattcataaaacaaaatacaaaatattagggaagatattaaattttgaagttgtgggaaacctccaaataaaaaatgtatcagtttataattgagagtgatgacctctcttcggatttccaacttgaaatgcttcattcagcaktcttcagagagtcaccacttacaagaaattttgctcatagaaagaagtgacaaaaaataaaaaatcattttcacaactattaacttcctattgctgctgtaacaaattactataaatgtagtggcttaaaataacacaaaataattatcttacagttcatctgaactgggttttaatgggctcaaattaagatgtcagtagggctgtgttccttctggaggctctaggcaagaatttgttttcttgccttttccagctcctagaagctgtctgcactccctgactcgtggccccttcctccatctgcaaaacacatcctccagcgtcacatctctttctcccactctgactgtcttgcctggctctgacaaggacactgtgattacattgattcgtcccaagtaatctaggatcttccagcatcctggaagctgcctgcattctttgactcgtggtctcttttgccacgtaaagtaacggactcacaggttttggagatgaggacgaggacaactttgggggaatcattgttcagcttatcgcaaccacccttcaaaaattcccatcaactgaaattatgtttaaagaatcaagcagagtttccttttctgttgctgacaaatgtgatgctgaaatttcttgcaataatgtgaatggatttctaatccaagatcactttttatatcaaatatttcaaagtaatggtgactctgcagaatgggcacacccttgcagagcagccatcttgtagctaaccgggaccaggaaaaggacacgtcagctagaagaagacaggaggtggccagaggctctgagtggctgctgagatgggggcccccatctcacttgtccctctccaccccctgttatcaccctgctgagcactgtgctggctccttgggttcccaggtgatgaggctcttcagcagccctttgtcctcgatgggcgagggacactctgcctgaagtacacatctagctggggggtgctggatgttgctcccagagctgagaccccactttgcttaggccacccctgatctagacagatcagcctcaaagggatgaagatctcacaagcctgccgtggctcccaggtgggaatctaagcaaggcagggagtgtgtgggtatggaacagggcttcagagtcaggctactggtgtcaaacccaggacctcctgatgattagctgcctgacatggtgcaggtcacctcaccttcctgagcagcttctattgtaaactggggttcttgcctcctaggttgctgtagaatgaggtccggagagtgctttgcacagtgctgagaacagcatcaatgctgatcactgatgatgagaatgaggatgctggtgttttcagccttgtcttgttttctttctcccagggtaaattcttagtcatcttcaccttacctgctctgtacttatcaggggtgcttcgtgcaataagcacatgatggaaagtgtcaatcgttgtggcagccacatgacatctaggtcctgatagaagaggccctacccggctgctggttagaggcttgccatgtgcagggctggggctgctgcgttagcaggtgtgttagcattccacaggtgagatcagttgactgtagcaattacttcaaatggaatgaaacagaagccttaagtgattccatctctctttgatactccatttctacctgcataagatcatataacattatgatgaattcctgagctaatttggaaattatacatatttatatttcggttgttattatagcagtagtgcactgatcatttgattccraaagtaatttccttctacaaatttacccttgacattctaaaatgtatattcagatttaatggaaaaaaagatgtgttataaaacaaggcagtgtttttgagcctgaaatagtaagggaagagcattaatttgcttttaagtttaattagaaatggaatgactttctaaatcataattgatagcattttaattaggatattatttttcagtgtctggaatgctcatttttcacatttgagatcaagaaagtacttttcgggatatgtttgcctttgttaaccggttgggtgagccttccagatttttttaagcagatatttttgtaaaaatatttaaatattgattgttaataaagccatttgttttaattcagtggaaaataattttattaaggcttaaataaagctgtgccagcaattttccttcatcacagtgttttggggctgcattaattataagcaatggagctgctggagacatttacacagcacacaaattcctcattgttagcaacggctggtgtgtgctgacagctacctcttagagaaatgcaacccatggtttaacggtggaaagtgtggcattagcataatttcttggcagggacaaagctggggttgcagcattgtcttcaacagtgactccttcgttaacagtgtcttatcaaggcctggactcccggggcgacatgccgccacatgatcgtgtcataggtaaccggaatcctgtgggaaatggctgcttctgaataaaaggggaaggatttaaattgcttatgattatgatttgaaaaggacctgtggaagaaagattctgaaaggaattgcttgtgtttgatcaaaactgacacagtgtcacggcagcttctttgacattgacagtaatgcatgttatagtttccataaggtgatctagaattaaaacattgtattcttcagagaccaattcagactaaaatagatctgctaatgcaaggcttcagagtcaagaataaattatagcccctgaggttctggaagttcatttgcatattgttaagtgtagttcagataattggaaaaaattttttgtaaattttagaagatatatcaagacagtattggaaagtaatagaaaatatcaaataattattttatattaatatttgtcctttatacaataaactattccctgacctcaggattccttttgattttgtgaataataaatagaattataaaactaaatataactggctgggtgcggtggctcacgcctgtaatcccagcattttgggagactgaagtgggcggatcacctgaggtcagggagttcaagaccagcctggccaacatagtgaaaccccatctctactaaaaatacaaaaattagctggacgtggtggcacgcatctgtagtcccagatactcgggaggccgaggcaggagaattgcttgaacctgggaggcggagtttgcagtcagccgagatcgcaccactgcgctcccgcttcggcgacacagcaagactccgcctcaaaaaaacaaacaaacaaggaagctaaatatgactggtaaaatttggtaatataagatgaggaagtagcgaccatttattgagcatttactgtatcctggacaggcagtgtgataagtgctgcacacatttaatacatctaatttacatttgattttaaatttaaatttacattaaatatatgtattaagctgttcttgcattgctataaagaaatactggtgactaggtaatttataaagaaaggaggtttaattggttcgtggttctgtaggctgtacagaaagtatggtgctggcatctgcttctgaggaggcctcaggaagcttacatatgcatggcagaaggcgaagggagagcaggggtctcacaggactagacaggaatgggagcaagagagagagtgggggaagtgccacacacttttaaacaatcagatcccacaagaactcactaccacaaggacagcaccaagccaggagggatccacccccatgacgcaaacacctcccaccaggccccacctccaacaccgaggattatatctcaacatgagacttggaggggacatccaaactatatcaatatatttaattatcttaactctgtgacttactgtcctcaagttgtaaatggggccattaaacatcaagaaaattaagtgatatttccaaagtcactcggctagtagagggcaggtctgagatttgaacccaggtcatttgattctggagcctgcaggattgactctacaacccctgggccatgttctttgtcactactcagttctactgaatccattaagtgattcccctgaggctccttttcaccatccctcttgcataagcgtgattgtgtctgattgtggctatttaaaatacacagcaccctgatcattcatttcatagtcctttctcttgtcagcaattctaccaatttcttctttattcgttttgttgtttttgttgttgttgttctctattggattcacgtgggcatggcattgggctcctctgtgctgaccacgtttccttatctcctctccatcccagtcgtacagcctggaaagagggggtgcgtttcagggatgagaccagagggtatctttgcttcagattttccagagccttcttacttgcggatcctgtgggcccatgaagtgtgtgggggatcatgtatgagtgtggggggtcatatatgagttggggggggtcatgtatgagtgcggggatcatgtatgagtgtggggtttgtgtatgagtggggggttatgtattactgtgggggtccgtgtatgagtaggggggtcatgtttgagtggggggttgtgtatgagtgcggggattgtgtataagtgggggcatcatgtatgagtgtgggggtcgtgtatgagtgcggggggtcatgtgtgggtggggggatcgtgtgtgggtgcggggggtcgtgtgtgggtgcggggggtcgtgtttgagtgcggggagttgtgtatgagtgcggggggtcgtgtatgagtgtgggtatcgtgtacaagtgtggggggtcatgtatgagtgcagagatcgtgtatgagtgggggggtcgtgtatgagtgcggagatcgtgtatgagtgcggagatcgtgtatgagtacgggggatcatgtatgagtggggggggtcatgtatgagtgcggggatcgtgtatgagtgggggggatcgtgtatgagtgtggggatcgtgtacgagtgcggggggtcatgtacgagtgcggagattgtgtatgagtgggggggtcgtgtatgagtgtgggggatcgtgtatgagtggggtgtcgtgtatgagtgtgggtatcgtgtatgagtacagggattgtgtatgagtgcggggatcgtgtatgagtgcggggggtcatgtatgagtgtgggggatcgtgtatgagtaggggggtcgtgtatgagtgcgggggtcgtgtattagtgtgggtgtcgtgtatgagtgtggagatcgtgtatgagtgcggggggtcgtgtataagtgcgggggtcgtgtatgagtgcgggggtcgtgtgtgagtgcggaggtcgtgtatgagtgcaggggatcatgtatgagtcgggggttcaggtatgagtggtggggtcaggtatgagtgtggggatcaggtatgagtgtggagattgtgtatgaatgtggggattatgtatgagtatggggattatgtgtgagtgtggggatcatgtatgagtgtctccaggactgacagaatatcccctggtggtttaagtcaagtggggcccagagaaactctggacagatagagggtgatgctcttagttcctctttttacccataaaacaagaggttcaacagaacaatacattgtttgcaggaacaatatgttctgaaattataagctctgaaatttattcttgaaaagatctttagggccccagaaaggtttaggctcccatatggtttaggggataagctctatgcccggaggtgccctgtgccagcccactcccaggcaacctgtgagctaggcctggccctttacaatttccttgcacccccttggagcaggtgctgaccagaacagcttgatcaccttcccctgtcactgggagttctgtgatcatccacgctccatcagcattctcttttgacaagaagcttgttttgtataatctcccaccggaaatgatggaagtggcctgagatgaagatgagcctcggtaaaatctgttatgttttacttctggaaagtgggattcagcctggattatgaagtacatgaatttgtgttttgcagctcagtggctctcaaccttggctagacagtagaattatgtgaggaactttaaaaataccaaataccatggacttgtcccagaataattaaaatcagaatcgctaaggctgggccctgacagcaacatttcttaaaagcaggcragtagaatgtgcagagagggctaaaccttgagtgagaagatggtgaggcagtgaaggcggctctaatactgctactgctacttgtagtagtgcagctagtactgctagtgaacagttactaggtgcctatcatgtgctggtgttgttctgagcatttttcatagaacaaaattattctcatgcattccttacaataacctatcagcttatttcattttcactgatgtgtacttggaaaaccttgaggaggtacagcagtgtattcagagtgaaatcatgtttcatggggcattctctactacaaaggtgaagtttaacctgtttgtctaggtgcaagatatctgacttttcttttttcttttttttttctttttttttttttttgacaaggtcttgctctgttgcccaggctggaggctggtgtgcagtggcacgatctcagctcactgtgatgtctccctcctggattcaagtaattctcccacctcagctgcctgagtagctgggattacaggtacccaccaccaggctcagctaatttttgtatttttagtggagatggggtttcaccatgttggccaggctagtgtcaaactcctgacctcaggtgatccacccacctcagcttctcaaagtgctgggattataggcatgagccacagcacccagccagatctctgacttttcatatccattgtcttgtcatagaagacttaggtggtcttggacagcaaacatgccttggttctgccagctgagacccaggtgtagtacagtaaacagtgatcttcagattctgagttacaaatcctggcctcctaattcctagaatcagacttcacatgagtttcttgaaatgcatctttgctaaaaatattttataaaactgccaaagtaaagagatcttgataacatactgccatgcagagactcaggtagtacatacaaagtcctccaagtgctccaactaactcctgtgtacttggatgtaacgcctttgtacctttccatgtgatccctcatgttacatttacaacctccctgggagggctccatcatgaagggctagatgggtaaggtgaaatttagattgtgttgtaatttagctggttgcaaaatctgagatcacttgccttctagtcaggtcatttaaaaaacatattaggcagggtgtggtggctcacacctataatcctagcattttgggaggccaaggtgggtggatcacgagatcaggagatcgggaccatcctggctaacatggtgaaaccccatctctactaaaaatacaaaaagttagctgggtgtggtggtgggcgcctgtaatcccagctactcaggaggctgaggcaggagaatggtgtgaacccaggaggcggagcttgcagtaagccgagatcacaccactgcactccagcctgggtgacagaaccagactccgtctaaaaaaaaaaaaaaaaattaaaccgttagtgtagtgttgttggttttggtgtattcttctatcaatgtatagagtatgtaaccaccaccatctgcaaggtatagagcagcagcatggagttcccagggatggactagggcgtcaaagccaccttttgtctcctccgcttacctgaggggcctggttaagcttaagtttctctaagaggttaagctctatggccagccctcactagtgatttcttggcagttaggtgacaaactcagaaagtttggctgatgataggaatgggaatgtgtgaagtttttcccgcttgacaagacactgtaattcatgatccccatcagagggacttgagccatgaaaacaaggctggaatcaaaactctaaaggtataggttacttttcagaaaaaaatgaactgatttacccatagaggcctctgaaaataagaatgtcctgcctggcacagtgctgccgtctggatctgagcctggggtgccctgggtgggtatagacaggacatgtggaggagggtgtcaggagcgtgcttgtcctctgtcctggtccagacccttgccagcccacttccaccttttcttcccttccccgaatttagatcttgagctccatgctcaaaggcctggagagtttggggctgcccttccatccccacaacttaacacccaccatcgactccttgacaaggcagagtagccagaagctcctttgatgcctgggagcctctccaagaaagctcgttttgataacagcactcatcctttgatctccacagggagcaagttaccaacttcattttttaaaattctgacagttttgttgactttgcactctgatgaaagcgtaaaatcctaggatgaaaagctctacctacatatcaaataataaaatagttataccctagaagaagagaaactcactgtctcctgctaaagaaataccttctgtctatgcaacttttctttccccctttctatacctctcttataagggcaaagcatttatagcctctgagttctaagaaaccatgggagcacggtgatctgctggtgagataaccgagataacagggcccatggtccaggtgccaacaccgaggacccttgttcctttatgtgcacagaaagaagcattaaagagagttgtctcatttctggttgggcgcagtggctcacacctgcaatcctagcactttgggagtccaaggcgggtggatcacctgaggtcaggagtttgagaccagcctggccaacatggtgaaaccccatcactactaaaaatacaaaaattagctgggcatgttggcgggtgcctgtaatcccagctactcgggaggctgaggcaggagaattgcttgaacctggaaggcagaggctgcagtgagccgagattgcgccgttgcactccagcccgggcaacaagagcaaaactccatctcaaaaaaaaaaaaaaaaaaaaaagagttgtctcatttctgtgatgtgacatctgattatgaaagtcttctacagtgaaggaatgggggaggaggaaggtagaaggagggaaaagaaagaaagaaggaaggggaaagataagaaaatgacgaattatattagaatatttttgcattttatggagcaggaggtgtcaacagtagtcagcctgtatgggtttgaattccgctgtttgtttactggagatgtgggtaaaatgcttgactaatattgctttgaggggcgcttgtgaggattagataaaatgatctttacaaagtgcctgccaagtagtaaacactcaataaaggttgttatacaatccagtggcaaaaaataggattttcatttcttatttggtttctagatccttctacagaataggaggtgctctgtaaatactgattgaatatgtagatgcgagaatgcctaatgaggaggtagagaactagtgcggcccacattgcccacatctcttcttaccatgctgaggaacttttgtcatgcgtatccrcgcatctcaattttgaggtaatgcttaactctaccagggaaagaatttagtgtagacataactgttaagacagctacaaagccagtgtccttaaaacaaaaagtcattgaatagaaaagagatagaattgaccattttgctgtgatacactgttctcttattttagtatttctcacttagaactaacaaaggttttaactgttgagtcaaaggtatgccataggacttagaccaataccaggtggaaggtagtgagaaggattgtctagaaggaagtgtgagatgccgttagacatccaagctgaggtgctaaggagttagtaggtacccgagcttggagtttgaggaagcaatcaggcatttaaatcattctttttaggagtttttaggaacttcagttcttatggaaacattgagtattctacacatccatgtaaaagcttaacagactggacttcctgtttccactgaggttgaatagaaatgacagtaacaacagtcacaatatttaacttttatcaagggcttacttggtgcttaatcctgacttgggtgctctgtatgcattattccacttaatcccagaccatgtctatgacctggataccatcattctcttcatttacacaaaaagagatagatacggagaaattaagaaaatgacccagtatcatacagatagctaagtcatggcattgagttataaggggataaattatgagatggacttctgcacaatgtgtgtcctctaaaataggtcttttcccccaaactccatgattagtgcttctgttcacttattaaaaacactgggccaggcgcagtggctcacgcctgtaatcccagcactttgggagcccgaggcgggcagatcacttgaggtcaggagttcaagaccagcctggccaacatggagaaaccctgtctctactaaaaatacaaaaaattaaccaggtgtggtggtgcatgcctgtaatcccagctgctcgggaggctgaggcaggagaatcgcttgaacccgggagacggaggttgcagtgagccaagattgcaccactgcactccagcctgggcaacaaagtgagacaccgtctcaaaaaaaaaaaaaaaaaattgcagaccctttggctaaggagcaaactgggctaatgtactagtaatagttccttcttacaagccattgctaagattttggtataaagagttagttaatgtggtatttcgttcattaagtgaatactgagtacctgctattttccaggctctgttctaggaactgaagcaatgaacaggtcacacaagtccctgttctcataaagcttgtacactagctgaaagagaaagacggtaaacaagtaaatgagtgtgctattttagacagggtattcagagtgggcatctataaagaagttccatttgaatagagactgaatgaagagggtggggaagagcttttctggaagaggatagagccagttcaaaaggcccctcattgacaagaggctggagtgctctgaaccacagagaaggctgtggtggctagtggtgcatggagggggaggtggggcstgggtgatgcagggccttacagaccatggcgaggagctgactcttttgtgtgtagagaaattgagtttaagcagagggctaccatgatctagtagataaggctgaacgatctctctggttgctatatgagtaggagaggaaattggtgatagagacacaaggcatctctcatatggcccagagggactggtgagaagtggtcagatttgagttatattttgaaagccaagccaataggacttgtctttgggttggtacctatagcataggggaaaaacatggatcaagaatgactcttgggctttggcctgaaaaatgggacacgtttggaggaagggatatattgtataacccaataaggaagacagtggaggcagaaatttgcaggatggaattggagcaaatagggttctgttttggacaggggaagtgtgagatgcctttagacatccaagctgaggtgccaaggagttagtaggtacccgagcctggagtttgaggtaggaatcaggcatttaaatcgttcttttttaggagtttttaggaacttcagttcttatggaaaatttagtattttagaaatatttagttgttgaggctgtcttcgatccttgagattgattcctggagaacatgctggtgtgtgctgggatttctcacgcttcccctggggaaggcatattcccatgctgagcagatgggagctccaggcagccgcaccagctgcacggtggtagaatatttctaaatagttctctaggcacaggcagctatttttctgaattctttgactcatataacctctttactaaatccaacatagatcttacatcctattcatgcacgctstcagtggagttcagaagtacattaattaaggtctaacaaattgttcatcatgttcacatttaaaagggtcctaaaatagcccaatcatgggcatgctgggtgtttgtgtttaagtgtcttatacactaaaactggaccctgatgttcctttactatatacaaatggccactgtgaacaccaagtgggctataaatcagaagatgacaaagaaaaggggaaggatgatgactcagtatggaaaaacctataagccagaacccgcttatttattatgtttggatacatttccccagttcaactgtccctggcttaagccctgcttcccccttcttagtccagtttcttaagtcatttttgctctctgctgtcaaaagcacctttcatccactcagactaagacactgaccttatcccccaatcatctactgttctctagaggtattcttgcagttccgttccatgattttctacatttcattccattagcttgtttggtcatttttacttttctggtgagatgattttccctagactcacaagagttacccctcttggataggcgccttcgattatactgattgcatctttggctccccaggtgatcagatgtctccagatggtaatgtttacagtgcctgcctcacacagaagcctgagatggcaggaaggactctaggtaggcttttcagatgggtagatgcctgaacatgctctggaaaaaccagtcttctctcctctctgcagtttaccagctgtgtgactgtgcataggttactgagtttctccaggcctctgttctctcctctgttaaaaggggacacttctaatccatctctggtatttgcattaaatagataaatacctgtaaagcacttagcagagtagctgctactgaaaggaagtcagtaaactttaattcccttccaaatccctctgagtcttttattcatcaggaaacaatagccgtgcactctgaatacacacatgccagtaaatggctattagtgaagacaaatcaagctccggaagcaagctagcctgaagagagaagagaaacagacaattttaagacaaattggagaaagagagtatggggttcaggaccggcagcatcagtatctcttgggaactggttagaaatgcaggttctcagactggggctgggcagtcttgtttcaacaagccctgcgggtaattctgaagtacaataacatttgagtaccaatggtctaagctaaactcagcagataatgggtgagaataatggtgcgtgttactgtgtgtgttatgtatgtttgtgtgcatacataaccatgtatgtagaatgtttgtaacagctgaaactattaatcaaacatagtaatatcagcaaaatccagtcaaaccagtgattaattccccatttttctttggtactgttgtctgagcagaaatactgtataactagaatgcttatcttcaataactttgcactaaattcatttgggatttaaaaaacggattcatcaactttttcctttattttctaggaaattccacttacttggatgaccatggaccacctcctagtaaggtaagatctttgcttgtgatataagtcccctttttcttttatcttacttacagcctccaacaagcagaacagatctctcctggacacgaatcattcacaagaaacagtagatgacatatgtgaaattgatgtttaacttctaacaaggaggaagcagaaaagcatgatgatagcccagatgacagggagaaggagccattgttgaatcagtggctgttgctgcccaggcattggagcctgagactgacttcagacctctggcagcttctcctgtttgcacctcattttcatttgccttggcatcgatgctggcccacagtgtgatagccacacccggcctccccatgccttcgggctttggggctagactcacatctgtcctgttctctccagcctaactgggttgggatactccacttgaggccctgccaataccacctcaaggctgccctggcctggcctgtgagtccacttttgtttttcctgtaagcagttttgtctgacttaaggggcagaataatcctttagtatagtttccctaacactgtttactttcttgagctcaatgaaaaccgaatgctaatctactgaaaagtgagcaaactagaacaaattgatcattgtatataagaaaatacatgcartgcaattaccctttattctaaccgtatgtcccttgtacttttttgacatcattttttttccttctaggaaatgatggggattgttgatcagtacttgggaaggggttgtgcttggcaaaataagaagttggcaaccctctatctgtcacttcaagaatgttctttctggcctgtgaaatcttaaagtgtagatacaagcactctagctctccctgtacttggttgttttcttagtctttgaccacttaaggtgatgcctacaaaatgcagttgtaaatacacggtgagaagataatgaacccccaaccttagaggctttggggaaatttactcctgtattagtccattcctgcattgctataaagaaatacccgagactgggtaatttaaaaaattccacaggctgtataggaagcatgatasaggcatctactcagcttctggggaggcttcaggaaactttcaatcatggtggaaggcagagaggaagcaggcgcatcttacgtggccagagcaggaacaagagggattgggggaggtaccacacacttttaaacaaccagatctcacaggaactcactgtcgccatgacagcaccaagggggatagtgctaaaccctgaaaatccaccctcatgatccagtcacctcccaccaggccactccgacactggggatgacaattagacatgagatttgggtggggacacagatccaaacaaatcagccccaaagtatrtttagaccacccccacattcatgagcatgaactttggaagaagatatttctggattcaacactgacgctgccactttctagctgtgtgacagtggatgaattacttaatattttgagcctcagtttctcatgtgcagggtgggactaaaaataccgcttacagcacaggatgcctaaaatgattgaatgagctgatgtatgatgaacacttgacactgacatgcgataaacattaaatcaagggtggctgctgttaactgtactgcagtaacattaaaattattgatgagtggtacagcagtatttatcacagtcgtggaatggttctaccacttgatccaccacctgtttattgaatgcctgtgatgctgcaggtggtagaaatacaaatatgaaacaaaacaagaacaacaacaacaaaaatagcctctattctagaggagcaaaggaatatagaggattatgttctctctggggataaggaccgtgtctaactcgtctcagtatcctcacattcttgtattagcctcaatgcacagaggcacatcatgactattcattaaatttcactgaattagaccatggaatccagagctggaatctgaattaggtcttctggcttccatcccaggttctttcactgagccagtattctcaaactttagcttgcatcgaaagtacctggaggcttattaaaacacagattgctgggcccaggccccagagtgtctgattcagtgggtctggggtgggagctgagcatgtgcatttctcacaagctcccacatgatgctgatgctgtcagtctggagttcacattggagagccactgttctaaaggccatgaatataaagagaaccatttccttagacattttctgtggtgtttttactgttaatagcctagagagagtgatatggctattatctaaagtttatttattaatgtaatgatgactcaccattgtaagttttcttgtagagaaaacatttttagaggggtcagttacctgcctaggagggacaatagagggggaaaagaagaatggtgccgaaggtcctggtaggtgtcctcaccagtgacttcctttttctcccaggtagggaggggcaaggtgaagcactccatagccccctgccctgtcatgatattattgagttggattaggtggctctgtcaatgggacccatcagctgttttcctcaatggctttttgttcctggcttggtaaacaggattttatctggtctgaagacccagaccctttttttatgaacttgcctttttgacctttttccttggtggccagcctgagtcaacactttggtcttcctgctggtcttgctgtggctgggttgtctgtcctgcctgcctctttgctgggattgtcagtgcctagattcggtgttggctggcttcacttccccttctcccatagggtcttccctagctgtgcctcttccccctgcccctacagtctggtcttcaactcccccatatctcccccaacccctaactaaagcttcttgtaatatgcaaaaatgatcaggttatagcagattattcagacccctttagagtaaatccagttttataaactctttactaagtttgaaaattgggagcataatctctttaaatcagcagaagtttacctaatacagaagctttcactataactgtattttcattatctgggattggagcagcaaaayactcttgattttctaagcagtagccataagaagaagaatataaaaatgggtaaaaatattactggtatgtgaacatcttctcatccgttcttattgcttctggcagggtggaaatgaatctcagaagtgatgaggtcagacttccggataaaggtcccttaagtgtcccctggggtggggcctcagtggtttaggtctgtagaccactggcttatccagggacagggtggcatgcagacgatgaggactcacacatgcctggcctctggaatgaacccttaccctggcagggaaaagcaagactcagtccagacccatctttttcatatttgcttagtgctcaaaaaataactttttgatgccaagactgaaagagttgagatctagataaaataagatttttaaaccctgaaaatatactgacgttacaggcgagttctcattttattaaatgttcaatttcacaagtttcacattccacaagtaatagccatttagggaatggggtgtgccacacaacacatactgggcccccgtcctcattctgtccaatattttcataagaaaaaacaaagccctctgattttcacttgtttttaaaatccacttgaacctcacagctcacctcggtttttgaactaagccgctatttacaggtcgatgttaatattttctttcggttgccacattttaccactactttgtatgtacacagaatacggtggtttaaggttagagcactgactaagaatcaccatggagatttctagcaaatgaaacagaaagattattttaagtacaaaaacaaaagcatgatagctctttttgtgaaattgcacgcatatgtttgtatgtatgcctacagagacaagcctggaaagggtaatagtgttttctccaagtggtgagattttgggaagcttctacccagttccttatactttaatgcataatttgagttcattaaagtaacacctgctcaatctaaaaatcagaaaaagaaattttctggtatgagagaagattacagttgggtttaaaggcttcagtgccgtggcctctgcagcatcatgtgcagtgtccacagacccgagaagctgacrtttcccctccttggcttcacttcacctgggacgtgggtacctggtgcaagcagcgggcagcagcaatgataagttctgttggtracaaacaggatgtggatatcatttcatatacattgacatcccaaaccccatagataaggagagctgttctaaccgcctcaaagataataaaatcgctatccatatctgttttttcctgtgtgccacacactatgctaagcacttygcatgcaaaatttaatctctataaatgatataagagaggaagtaatttttaaatccttactttacagataagggagctggattttagagggacaggctaacttgccaaaggtcacacactaagtaagcattggacttgggattccagcccagggctgtgtrtgtagctccagtgctcatgtttttaaccatttcaaaattactaatttaagtagaaatacaataattttctaccttatttctaaatttttgcacttttaaataagcaatctggtacattgattagtataatacacaaattttaaccttcagtataccagaaaaaaatagtcatcaccatttaccatttgggttcaaaggacacttaattttttaaaatcaatgcagtgaacyttttcacatctactttatccgttttcttccagtaacctttgtatacttagctaccttcagcacctgaacgttttcaaactgtatataaagtaaattttggtatacagacttgaaaaggtgaaagaataccatcccacattcatttagcaaaacaggatggtccrggttcttttcacaaaatattatttgagggaatccttcctcttgaacgactgactgtataagaatagcatgttttctttttgtccttagaaatatattgttcattcaatatatttagagagtctaagagaattaatctatcatgtcatcatctgaagagtcgtagtctgacgtttcgtttccatgatcaatttcatcatcatcattagagtcttcagtgccgtcgtgtgatggcttgcattcatctctgatgtttctgttgtttgtgaaatctcatctctctttctgtcagttatcttctttttgtcattataggcaagaatgaaaaatttgaaattctccactctagtcaatgaaattaaaacaaactacaaagatgatgtctctagtctccttttatatcctccaaaaagatgatgtaatactttgggtaatacaataagaaagatggagggtgatgcaatagtgacaatttatttcactaatgaatcattcccttaggctcacattgtttaatatggtagctattagcctcaggtagctatttaaatctaaattaattaaaattaaaaaaataaaaattcagtttctccattgcactagccacatttcaaattctctgtagctatatgcagctagtggttactgtcttgcacaagaaaaatagaacattttcatcatcaaggaacattctactgaatggcagtgttctaatccattctattgttcttatatttttctattactttagtcttcttaaaccttatttgggaataattgatatataactggtgggtaattgttcctgagatgataaaatagcaaactgtttcaagatataggaataataaaattacaaagatgccataatggatcttagattttcttaaacggtctgctggacccatatggtagttgcaaggtagaatgagttttattctctttctttttttaaaaaaaagtattttctctttttctttgkaatatctctaagaaagaataaagttataaaatattaatccatacaaatagctagaactgcttcaaatttataaaacctaaaaaactaaaagtgggtccaatggatgctaatagtatattgagggttaagatatattactgatatctacacttacatacaaaagcatttttatatataaaatattatgtttgcatataaagtaytagtattcaaaattccgttgtaaaatgggttcattagaagrmggcttacaattattatgctgatccagcaatctccaaatgaatgagaagtagtaatatgaactgagataatatttgtatagtgctttgcagtgtctggcagtgaaccattgctcaataaagttgagtccttcctacctacacccccagaagctaatttccctttagtattgattgtttaatgcctacttagtctaagggatcaggaagacatttaaagaattgaagatgatctctgtaatctaacagcttataatctggttgtgtcatgaggtttgatggaatcaaagacagagagcacatgcttctgtgactgatagattcttaagtctaagtgacatgcattcatccaagtgtttactatgcatcaaatttgtcttgggctctgtgctgggtgctgaggctstcaggccacagaatgcacagtctatgccctccrggagtttagtccagtcaaaggacaggctggcaaacagattcatacagtaagtatgctaagtgggctgctggatgctatgatgaggatgcacactcaacacaaggagaatgcaggaagctcaacttgaccttttttccaggtgcaagtcctgaagtttgaataggaggaactaactaggtcagataacctgggatgcggacaggcatggtggcttatgcctctaatccgagcacttttggaggctgaggtgggaggatcgcttgagcccagagagttggaggttacagtgagctatgattgcaccaccactctccagcctgggtgacagagtgagactctgtctcttcaaaaaaaagtctaggatggaaaggatgagaagggatgggcctcactgctggagttttaagagtggtaggtgggaaattgagatatgaactgctttgaggagcttggctttaacaggaaagagagaaaagatgataggcagtggagtccatgtctacgtaattgtgtagtaggaaaggaatgatcagtcacaaatccagttttgaatggtgtcatggattgaattatgttttcccaaaagatacattggatcctaaccccagaatctgtgagtgggatcctgtttgtaattaggctctttgcagatgaagatgaggtcatactggagaagggtggaccctaaagacaatgattgatgtctgtataagaagagggaaatttggacacagagatagagacccacaggagaatgcagtagggacaatggaggcagattgggattatgctgttatgctgccacagaccaaggtacaccaaggatggctggcagccaccaacgagcagagaagcatggagcaggttccccctccaaacccccaggcaggagccagccctatagacaccttgatttcagatttctgacctcctgaactgtgacggtaaatttctgttgttttaagccaccaagtttgtggtactttgttacagcagccccaggtagcaatgcaaatggattgagtttaatatcttcagttactaggatactattaagtattatgccttttaggcattatttgatttgatttaagaaacattgaaaccatttttagaagcttatcaggataatttcagtgctttttttttttyttttttttttgagatggagtctcgctctattgccaggctggagtgtagtggcgcgatcttggctcactgcaacctccgcctcccggattcaagcaattctcctgcctcagcctcccgagtagctgggactacaggtgtgcaccatcatgcctggctaatttttgtatttttagtagagacggggtttcaccatgttggccaggatggtctcgatctcttgaccttgtgatccacccacctcggcctcccaaactgctgggattacaggcatgagccactgcgcctggcatttcagtgcatttttaagttttttttccaaccttccataccactcaggttttccccccaaccttctttcttcacttttcctcatcattctcatgtttttagctgtgttattagccccaacattctctccaatttcttctatttaaaattcattcctgctgttcaaattgtgttatcttctacacaaaaaacatattatattacatcatatttttctctgaaaaggatctcagtgacaattcatttaagacaaagttaccgaagagagagatcctgttgccacacaacagagggacatgagagcaacaaagaaaaacagtaaggaagtctgctgtctctcaaacaatgtgccccyatttctayaggaaacttctcagcctaactaaccgttaggctaacaatatgatacagtttggctgtgtccctaccaaaatctcatcttgaattgtagctcccataattcccaagtgttgtgggaggtagccagtgggagataatcatgggggtggtttcctccatactgttcttgtggtagtgaatccatctcacaagatctgatggttttatgaggggaaactgctttcactgattctcactctcttctcttgtctgctgccatgtgagatgtgcctttcaccttcagccatgatcgtgaggcctccttagccatgtggaactgtgactccgtcaaacctctttcttttgyaaattrcccagtcttgggtatgtctttatcagcagtgtgaaaatggactaatacacaaaactaccacaagttcctaagaaagattacatttttttccccttttaataacttctttagatttrgagacacattgacagaaagaggttccatgttctatagtaaagaaaccatgatgtccattccttgctttgagcttaaagatgaaaacccaaatatattataatgatagtaggtaaattacttatagaaggtattgggagtacaatgaccttcagttggcttggttaagcattggtgaccttggagaagatttctggatccaaaagtccccatttcccggagggcaggattgctggattttgtgtgtatacacagtctcctttggttagcatcacttttacttgcaagagtagatttcagagaaaaatgaatttcttgtttctgtctcccaaaacctcaaagcctatttttcaggatatagacatgcccatccacctggttttcctcttctctgtgaggacctgcaagaagcaaataaatctctggcacaaaattgtgttgtgtgcagggccgccctgcctagcatgcttccatgtggccacagctcctgaagccattgctgctgctaagagggtgcccctggttccacgctcctattcattgttctgtaaagaacatgcgatgtggtaaaaacccacattgtctgattttctttgaaaaacaaagaactggcgttctcaagaagtttataatactttcttatttttgtctaaggctgaaatgatgaaacctctttattttcaacttttcaattatttttaattatgaactattccaaacacaaaaaaaatgaatgagactaataaaatatatatccagtatgtccaatgcactcacccaccccttaggctgaaaacatgtgactgtgttaatttgctgcatgcttccttctgaactttctgttcattcttggtgcctgggaggaggctgagaagcatcggttttagaatcagatctcagttcaaatcctagctacgtcactagttaccctaggtactctaaatgagtacgtcacctctttgagcttcagttttctatttctaaaagaggatagtaatgcccacctcttaggattgtgaggctgaagtgagatcactggaatgcacttagcatgatgcctgacacatggtagcacccagcaatgggtccttggttctatagctgtttccttgatgtagattctggtaactcagtttgctataacttagagcaagcctagttcccagtcccccaccccaccccacaccctattttcgttggagttttacttttattttacttttwaaatttttttaaaatttttttgagactgagtctcacactgtcgtccaggctggagtatagtggtatgatctcggctcactgcaacctccacctcctgggttcaggtgattcttgtgcctcagcctcccgagtagctgggattacaggtgtgcactatcatgcccagctaatttttatattttcagtasagatggggtttcaccatgttggccaggctggtctcaaactcctgacctcaaggagtttgagacctgacctgcctgtcttggcctcccaaagtgctgggattacaggcttgagccaccaggcccagccttatctttttatttttaatttttttttttagagacacagtcttgccctgtcacacaggctggagtacagtggcacaatcatagctcactgtagccttgacctcctgggctcaagttatcttcctgcctcagcctcccaagtagctaggattacaggtgtgtgccactatgcccagctaactttttttttttggtagagatggggtctcactctgttgcccaggctggccttgaacccctggcttcaagtgatccttctgcctcggcctcccaaagtgttgggattataggcatgagccactgcaactggcttctttggatttttaaaagcaattacatgccaattggcagaccagatacgaatctcttaccttataagaacattgaggtcttgtaggtatccccgctttgatgcctttgggctaattcaggacactaagcaaggcctttcacaatcccctgccattttgttttttcctaagaatatattgttctctgtttcaaacctgactttaccaaaagtcctttaaaaaaaaaaatcctacaaaagtacaaaagtgaagctgcttttcattttatggaagaatcaattgcactgggtaatagatttgtgtttaatgattcatgataaatatatcaggtttagagaaagagagacctagcaagacagaatgaggctgggagttaggaatcagtttcactctgatgaacatgaccttgaaagagtcccttccaccctctcattttttttatcattgcaagtgataggaaaattaatgatgtgaacattttatttttaaataattataagagcttctgagaccactgtatgctataaagaactttatgctttggtattctgttggagatgggtaattaatagcttataaggtaaaataatctgcaaaaggaaaacaaatcaaccttacataatagggttattgtttttttaatcccgaagtcgcctgtattcccacttcactcttacttcgcgctcatcacatttcttaaaccatttatgtggaagtgtttggcccagctggctgctttctcagatttcaactttcagtggagatycatgtccaagttcagacacagtcctaaatttatcaattttatgagcatgtaatgtgtctactcttgcccaagaagaayataatgaattcatttcttcctccacaaatgtttagtgctattaagcacatctttcatttttytaattaaaaaattctgtgaagccacagttttaaaaatatgtagtttatgtaattgttcttttagtatcttccccaccccaatccccaggggccagttatcattgataagatgttcaccaagccttatccagaccagcctcagttacaaaatcatgagcttaactggttgttggggctgggctgtctataacaaaaatgaagggctttaaatgaagcatgaaattttaaaatggcacattgttgttggaaagcatatttaatcaagaaactgctttagcaaattaagaaaacccatgccaccattccttggcagagtggcagttgcctcagggctctgcaagttgtagtaacttaatcatcttagcagctcccaatatagcatatagctacctaatccttttttttttttttttttttttttgagatggagtctcgctctgtcgcccaggctggagtgcagtggcaggatctcggctcactgcaagctccgcctcccgggttcacaccattctcctgcctcagcctcccaagtagctgggactacaggcacccgccactacgcccagctaattttttgtatttttagtggagacggggtttcaccatgttagccagaatggtctcgatctcctgacctcatgatctgcccgcctcggcctcccaaagtgctgggattacaggcgtgagccaccgcacccagcytacctaattcttttcttattttttattagattgtatgatcatttctttgttttaaaaattatgcatgcttctattatgttttaatttggaaagtacagaaaattatagactagcaggaaaaaataattacccacaatgccaccacgcaagggcaactaaaatgaaccattttcacccatctagtctttatagtatattaataatattcaagcctcctgtcacatttgttgcaaatatttcatcagtccttgtatgtttaatcaaagtcgtgcatgcacgtaacacacagagtttacagaaccaaagtgcttgttgaaaaacagtggtccccgatggcrccctgcacgtcactttytgctcttttatctggttctttagtattaacttcatatccctggttaacctgttatgttgctgcttccggatttcactcagctttaggcattgtctgtgcaagagaaggatttagctctttcactgcagctgacccacctcccaccccccatcacccttctgtgccatctagccttcttgcctaggtgtatgttattggggctaaatcaatgcccagtgattttattgttgcaactaggtagacaggagtgacagctgagccattatgattatgtctcctttcctgcttatcttttcatttcctttataacaaataattctcttgttttgtaaatttatttacatacttttctatgatccccaatttatccttgaactcttcttcagttgtgtaaatctccctggmgccttcacacacattaggtgttgtgtcagtgtggagttgatgaagtctctcctggggtcttcttgcctgctcccatcagaacggcttgctcgctcaacctcatgctcaggtgtgtcttgggatctcctttcactctcttctgtatcgatatggtttggctgtgtccccacctaggtctcatcttgaattgtagctccaataatccccacgtgttgtgggagggacccagtgggaggcaattgaatcatgagggtaggtctttcctttgctattctcgtgatagtaagtctcacgagatctgatggttttatcaaggggcgtttccctgcacaaactctcttctcttgtctgccaccatgtgagatgtgcctttcaccttctgccgtgattgtgaggcctcccagccttgtggaactgtgagtccattaaacctcttccttttgtaaattgcccagtctgggatatgtctttatcagcagcatgaaaatgaactactacatgtattcactcctatttcctgcattaccatattgtatttgttcctttttgctgctgtaacaattacagcaagcttagtagcttaaagcaacacacatttattgtcttacagttctggaggtcagaagtctgaaatgggtctcactgggctcaaattgaagagtcagcagagatgcgttccttctggaagctctggggcaaatccatttccttgacttttccagcttctagaggccaccagcatttcttgacttatgtctcctttatcttcaaggccagcattgttgcatcctcagatctcagactctccttctcctctctccttccttaatttatcaggacccttgtgattacattggactcacctgggtaatccaggatcctctcctcagctcaggattcttaacttatcacacctgcaaagtcctttttgccatgtagggtaacatattcacagaatttggagatgaggacatgggcatctttgggggaccatcattctgccttctttcctcagcctccagtagcttctcaagaacaggcgcatgggacagaagtcatctgaaatactgcatttctgaaaatatctttatttcatccttgattgatagtttgacatgatatggaattccagattggaaatccatattaatcaagataggttagggtgatgcaattataataaactccaaaatcttagtggctttgcacattcgagtttatttcttgcttgtataagaaatagcttatatagctcagggatccaggctgtttccatcttgtggcattaccgtctcaacacaggacctccaatgttactgtggcacagagcagagaggaactagaggggcacrtagggagacttttcagcccttcagcccagaagtgacccgtgtcactttttttttttttttttttgagacagagttttgctcttgtcaccctgactggagtgcaatggtgtgatcttagctcactgcaacctctgcctcccgggttcaaatgattctcctgcctcagcctcctgagtagctgggattgcaggcgcctgccaccacgcccagctaatttttgtatttttagtagagatgggggttttgccatgttggccaggctggtctcgaactcctgacctcaagtggtccacccgcctcggcctcccaaagtgttgggattacaggcgtgagccactgcgcctggctgacttgtgtcacttctgtgagcagtccattagccagaacttgtcgcaaggccccacttaactgacagagggctgcaagatagagcatatgaatactctgagcattgactatctctgccacaaaatcatgtcccctctgagtatgaaggtttttgccagttttattctagcttccagtatttctgttgagaaaacgaattcctgattttttatatgaacatctaatctgtctctgtggaagcttcttattcttcgtgttctaaaattgtataattctgtgtctggtgtgtataagtttcatgtaccattccagatacttggtggactttgcaatctagaaacagataccctgttctggaaactttgcttgatgttttattttccagaaagataggatttcactctgtaacccaggctggagtacagtggtgtgatcacagctcactgcaaccttgaaatcctgggctcaagtgatcttcccacctcagcctcctgaatagctgggactacaggcatgtgcaaccatgcctggctaattttttttttttttttaattttaatagacccaaggtctagctatgttgcccagccaggtcttgaactcctgggcttaagcgatcctcccgyctcagcctcccaaagtgctaggattacaggcatgagctattgcatctcgcctggttttaatttttacattttttaatgaattttgagtctcacgttgttgccsaggttggtcttgaactcctggccttcagtcatcctcctgcctcagcttcccaaagtgctgggattgtagctgtgagccaccttgcctgtttcttcctctacattttcattttttgtcattctgaacctactcttatttggattttggacctccaggagtagttgtctgtgtttcttggccttgttcctctcattttttcttttctttgkcttttttgctctactgtctagaagagttttgaaactgtcttccactccttctgttgcatttcttccttgctgttctcatatgtttcatttacaagagcttgttgttgttgttgttctctgaatgttccttattataacattctttggttccatacggggtctttacatttcacactaaaggttattataggtatttttattattttttggttgctattctggatggaatatttttccactatgttttaaatttattgttgtaatactgaaaaattactgatataatgtcatgttactgaactttttatttcaataatttttcaattattttctttttcctttttttgatagagaatcacataattgacaaaaagcatgcattttatctctttatccaattctgttttaagttttataacattatccagaataatattatgtaatgtaaagtccatggtgggagactgtgtattaattatcatgtcccccacatttaggacatgtacctatttagttgacaataaatacatgtcaaatgaatgaatgatggttatagacagtatctttcttttgcttcaagttttaataatattaaaaatgttctgtcattgagtataattgtaatttttagtttaagatacatattctttatcatgttaacaaaatattatttttaaattttctgaaagcatacagttattcaagaaaatatgtttcctttgtgggttgtgatcttgcactcaggaacatgtgctgaattagtttaattcaactttattttataaactaataggggtaaaaactaatggggacagacagtttgagacgtgcagacaggcactatttctcagtatttgatttgttgtaacatttttactggtgaccggaagaggaaatgctcagaaaaatctgagtttgcaggtgactctaatatgcaggtgactctaatattttttctggtactactgaaccacaggactatctactaagctcagagtctctgtcacctgtaatgtaggggcttcctcccaggaaaatactgcagcccaaagaggctgtcaaagtactggacaccctggagcacagaatataacagtgtcttgtgcaagccatgatttatctatgtcagagagtttctatgcagttttagtcaacaaagaccaagagaggcataactggctggagaacattcagaaactaataaccaaaatgatcttgggaggtagaagcaaagactaaattaattatgattcttgtcagaagggacattgactctggaaaatcatcaaagcctataaaatcagaagcagtgtgtttgaggtgaacacaaaactcttcaccaaggccttgaacacaactgtggtctgaaattaaatagactcaaagtgcctcaaatcttaaatacgatatatcaaagacaaattgaaggacatcttgtttcttgtgggggatagtaaacagctggacttcatttgcccaaatgacagtacaggccaaaactataaatcagttcctataaaagttgatatatattcatggatgatgaatccacagtagattaggaaaagtgcaatgttgtttagagggacagcctaatattttggagttgatgttcttgaatccagtaagatcattcttattttatatatataataaaataagaaaattagcaaaaattatttccaayatgaatattatttagtggttattgactcttatttacaatttagtaatgcttttyttttttgagacagtctcactctgtcacccaggctggagtgcagtgacacaatcttggttcactgcagcctccacctaccaggttcaagcgattctcctgcctcagcctcctgggtagttgggattacaggcacccaccaccacacccagctaatttttgtgtttttagtagagactgagtttcatcatgttggacaggctggtctcgaacccctgacctcaagtgaagtcctcagtctcccaaagtgctaagataacaggtgtgagccactgcacccagccaatttagtaatttttggttcttgtctccaaagcattcactgggtgctcctgctcagattccccatcttgtaaggctttccttgaagcctccacctcctgcagctgccctaggcagaagctcaatatkgggaaggcatcagcagcaggagtttgaagatcctggtccaagtccyggctcctactcctcctagtcctcatcctggcaaagccaagtactctctctctgagttttgtttttctcacttataaaataggaagtaatgatttcccagtattcttcacattcacatttttgtgaaaaggaaatctagttaacatttctagacgtgctttgggagccataaggtgctggcttcgcaatgatgggtacagatggagtggcctgttttccaaacctctgagtcattacttctctcttccctggtccctgacaccctgcgaatgaacccccatgtggcctcttgctctggcaagctggtttgattatgtgcagggctcctctgcccctgaagcctaaagcctagtgaaaggcagactgggtggagaccctggcagttctcttctaggctcacaccctcatcttgaccttcagctccccttcctccactccatggaaacagaattgtcaatgtatccccctaaaacctagggtagagcaaaaccagctggaccttcccctctgcctttccctggggtgagacctagactccccattggctcccttcccctccccagcccccattaaggggaaattgggagtcatttactttctgtactagctgtgtgggacatgagagaaaaatgagcaatgtgaagccagccaacaacagaaggagacccagggaaggagccaagtggaaaacagcctgaaaaacctttgtgccatcctttgagcgtatcatttcctaccaccagagcctaattctgtccttgaggaatatatgatcttaagacttcacctcctctaagaggaaggcagccttgggctcctgttagagatcttagtgtgcaaaactgcaaagcacttagaatgtcacttctgaccttataatattcttctgtaacaatagctggcacacatcattatacatcatactgttaccggtatgcatatattgttatctccccagctatattgtaattcctcaagggcatggaacatattttatacatcttttttggcttaatggatatgtactaattatgtgtacctagaggaatcctttcatctggcagtcagaggtatccagaatgaacttgtcagttacgtaagccccatccagcatgattccatgatgcagtgcctctagcgcggtgctgtaggacgtgaagcatcacaggtgatttggagaggtggatgcttcttgcccagagtcacttacctgcctggctttgatcttcatgcttctgccgtttctttcttcctcttcaaaaccagatgtcttcctcccmttggccaaaaagaatataccagtgaagtggtatgtcagggcattaataatgagaagtgtgcagactgtagtttatgaggatttcaggttctttgatttagaatatgattgtttgctacaaattaacttcatcatgggtgaatatagcaaaaagtgggcaaaagtaactgatctgggcttgtcatctgtgcacttaatggacaaggtatgagggttatctaattgatgtttctaaagtttcaaaatgtgttcagatacacaatggtcactgaggagagatgttattagcttgactgccattgtattaggttggtgcaaaagtgattgcggtttttgtcatgaaaggtgatagtatagtatttgggggcttaacttctgaagcttagtgaacctacattcacttgaagactctgcctcttactaactgtgatttgggacagatttcagaatttctgctgtcctgtttcctcatgtacaagggatcctatttgatagggttgttgagagaattaattgaaagaaaccatctaaaatgcttagcacaggcctagtctatcctggattaatgaaagtctagtcagttgttggcatrgtatgagttagtgggtttgatgtgcacacataaatgcctgtgcaaatactgaggaagggttctaggagtcacagcaacaagcagagtttgagttatgtaagccttcaaaagtgtgtgttctgaccactgatgttgccatttcaagttattctaaactggttaaccacagatgggattaaagcaaaaattatgaatatattttatttattttattacggtaagacaaaataacagattaacgtgtacacaacaaataatgtgagagaaaaaaaatctctgtttggtaggattagtgttttcacttgtattcagtctggccaacacgggaattgatgctattttaagtatacttttcagccataattatccaagtaaaatcaaaagcagttgtttattgaaaagtactgcatttaagataagaaatttagtatattgcagaccacagtttggagatcacactgaattatatcctacaaggaaatatcattctagataccttatagaggtgtacttatactaaatgttactccagatctcaggaagcatatgttgtagggataccacaacacacataggggagaaatgcacttttaatgagccctactaatttgacattcataattcagaagggagataggctgacatgggcctttttctctgtaaagatcaagaatgtgacagatgattgtaggaacaattactttacaaaagagaaccacctcatttcaaggacctcttagtgcaaagaaagaaaagggtggccattttcttatggccttcagtcatttctttggtttatttagcactggctcaggtactagtttcagggtgtaaaaatccccgatgcagagaacattctgcaactctgcaatacgtacagagccctagaatggaaaagtgctaacgaatttcatgacctaatttaaattccccagtgtggctaattggggaactgtgttttactgatctgaattgctaatttttatagatattaytttaacagctgtccatttgtaatttatgtcagggtgtttccagggcttttttttttttttttttttttttttgacagagtcttgctctgtcacccagccttgagtgcagtggcacgatcttggctcactgcaacctccgtctcgcaggttcaagcaattctcctacctcagcctcccgagtagctgggattacaggtgcctgccaccatgcccagctaatttttgtatttttagtagagatatggtttcaccatgttggccaggttggtctcaaactcctgaccagggtctcattttagctaagtgtaattgtatatgttttgtggcatttggctcgagtcaaatcaattttaaatctgccaraaaagtttgktttaactagtttttattcctagtaaaaataggctctcattactaattattttgagtaggtatatatagtatatttttaattggtgatatattggaatacccttttagaataataatgtttcatctaatcagaaatctaaacaaccacttggtgattactgtgtactcaaagccagttagtacattagcgaagtcaccaaaagaatcatttccatttcaaaatcttgggcgtttggtggtatatatttttattttagtgtatgagaaagtcaaccattgctatcccaaatgacagaagttattcttttgcttattacatttaattatttttctttgccatttaattgtaatacagggcttctatattttgaatgtgtgttaaacgaatttagatttataattttatattttaatgattaatatcaaattctctttttaactctgtgaacatgagtcatttgaattactcagttatgcagacaacatattttcagctacctatatctagttcaaaacgtgccaatgaaagatctgttttcccttattttagttacaaatgatcttgtaatcaggattagttcaaaaagaacaaaatatttttacagcataacaaaaggctgttgatgataaacctgaatcatccatttattggaggtctgagaacttaaattagtctatcagttcatgtgaatctctttcttaaaccttagcaaaaaacatttcaatagtttactcttaatcatctaattatttactgttgattttgtggttgtatgaccattgaatgcttgaattatagctcaaagctatcattcattcaaaattaaggattacaaggatgtgttttcatatattgttttgtattatgytacatttcactttttattggaaataatatttatcttgtaattttctctttgagaataagtatattttggtaaaattcctcttcagttcactttgtgagaaattcaaatttaataggcagtaattgaacttttttaaaagagcactgatctttaatggtaatcattgtgatggctgctaaaggatgtaataggtagtttcatttgcctttggtcctgagcaatctgaacaacagaattccaaaagtcccattcatatagagagatgcccgwgcgcttcctaccgctcagatacggtcatggtttccttttaatggtggtaatggcaccaaaagtagatgtttgattttttaatattcttccacatatatgtataaaattaaaatttcccatcttactctaaaaagactctacttgtattccaattgcaggcacccaaaggtgctttgtgcaggcagtttttgtttagtttttgttttggcagtagagcctgtaggtcctcagggatgcagcggctctcaggatctacattattcatgcatcgttgtttaacgtccttctagcagcaaggatgtgtgctggcagaccacctccactttcacttagaaaattgccagcyagtgctcctgccttctaagtgattactttgctttgctcgaagtatctatatgaagataaatcttttgctaggtagcaattcctcaagcactgtcccccccgccacagcaaaaatgatggcagatatggtgtgttcaaatgactgctaaataggcaagctgcattttcacaggatagtgtataatattttaagaactattgtcttgattatgcaaatatagaaagaactagcaaagcttactggggaaaagcaataggaactgttctgcattgtttttggggaagaagtgtttgctatttaatgatttggaagtttgcttcttgttattggaacttagcattagtttgattaccttggtaaatacacatacatttcacaatcaaaatagattatttaaatctcccaaggtagcctgggatgctttttttttttttttttttttttgagacagagtttcactctcgttgcccaggctggagtgcaatggcacgatcttggctcaccacaacctccgcctcctgggttcaaacgattcttctgcctcagcctcccaagtagctgggataacaggcatgcaccaccacacccagctaagtttgtatttttagtagagatggggtttctccatgttggtcaggctggtctcaaactcccgacctcaggtgatccgcccgcctgaacctcccaaagtgctggcattacaggcaggatgcttttttgacacccccacttctactcagctttctttccttccktcagaaccctgttcagggtgtgaaggacaagttaagccatctccgtctctctcatactgcagcccacctgttcttyaggtcataaccacagactcacatctttaaagaaagttagcaaatcaactcagaacccttacatgggtctttctctcctgctgtctcatcaatcagagcaagttcaactttctactaaatttatctatatttatatatgtatgtttataaaaggtatgagttaggtgtgcaaaaatgtaacattatgggttaaataaccttatttaacccataccttacatgatttaaggtattactaaacatgcatcctaargtaaataaacccagcacaggaactgcccatttccactgatgatagaaaggtgtctgtttctaatcgtttagtctcagcttctcaggggtctccccttctcatttctttcttcctttctccttccggctgatccaagttcccagggggcctttggggaacagacccttgtccaggcgctgtcctctgtccaggattgtctcagttcactaggcctggtcttgggattcagcccattgcttccacgtctgaattggctggccctgacccctccagggtctctggtgaagcccagaggccctgcatccccccttgccctgaccccaggcacctctagcccttttttcagagattcagaaaagttccagaaatgttcttatcatgaattgccccaggatcgtgtgtctgagaaggtcactcagtcatcaccactctgaagctcaagctctaatgagaagctggacctctctctgagaggtagagcctcagagctcacaccctgggaggccagctccttgttctgtaggactcccagaacattatctgcgatttctgtcaacctgttcytccctagatcacttggcccaagggagagaaccactagaccttttcctagggacccaaacagcttctgaaatctgatcttgtccttctttatccttatcctgttgactgacggaacctttgtctccttttgggaggcaactagctcttaccttattcttagcaatctttggttctgttgatacacttgatgccttccccttcaagttttactctttagaattccacatcactctcctctcaatcatttggcgttggaaaattttggctttcaggacaaatagctttcccaaaaagtcacaaatgaaaatttagaagctaaaaagagaaacagaagatagaaagtaattatcagaaaaaaaaaaatcagacatgaaaccggaattgtcttcttttgtatattgtctccattcctttttaaattacatctttcttttgttcttgtattaattgtcttattaattccatgctttttggaggggaaaaggatggagaaagtggtaaacagcctcaaatcctttttgccagcaaagaaatgatcatttaaaatagattcaggccggccatagtggctcacgcctgtaatcccagcactttgtgagactaaggggggcagatcacttgaggtcaggagttcaagaccagcctgatcaacatggtgaaaccctgtctctactaaaaatataaaaattagctgggcatggtggtgagcacctgyaatcccagctactcgggaggccgaggcaggagaatcgtctgaaccttggagacggaggttgcagtgagccgagatcatgccaatgcactccagcctgggtgacacagcgagggtctatttcaaaacataaaataaaataaattggaatactctatctatgcgtcttttatgtggcaccttgtgtgsctttcctgagttcaaataagccactgaaaaaatacctcagtgaaagtttcaatccatgagttgtttcttttcatctcaaggctgcttatcagaggacataaaacagcattaactgtgacagaagaaaaggacgaaggccgagcaggcycatatccctgcgtaagtcctgaaccatgcttcgttaaagtctgtactttgaagagtttcaggccttgttgttaatcaataactctagccatgtagtgtgcagtttaagagaacacaaggatcaaggagaagcaactcttatctacattgcttttgcctgtaatggcttccataatttatccacaaggagaaacaagcaatgagaaaaatcctccctggccggtcagagcctgttcatattttggcaacaaatgaagctaaggagttgtcaggtgtggtagattattcccaagaggatgtgttttatttttatcttgtgatgaaacgccctctgatgagcacagcagatagcacttttaacaaactctctttggagaataagtatttaattctattacagaatgccaacaaggtggctgtttcacaatgaactgtcccctgtgaagtactgtagagcagatacagggtgcacctcagttgttatttgaaggatcagttatcagtggtaatgtgcacttaaatccactgggaatcttgtgaaaatgcagtaggtctggagaggggcccaagatttggcatttctgacacgcttccaggttattttaatgcctggtccctgtttctcacttyacacagcaaagttttagagcaccttagagatctcaaataactttgtgcrgaaatttcttactggattagtggagccagtaaggacttgcaatgccaktggcttttatgggcccctcagcttgccaatcattagggaaattgcccaactggaaactaatagcttaagcaaggaaaatcccgtccctggccaggacagcacctctgcaaacatccatccggaattgattctgatgttctgactgtgcatcggaagggtagcttgaagaatgcctttattttagactctgcccacctgcaggctacaggactcatttccaggactgtgtaaaacattgtatctataggagcaagcaatttctacagtccgtatttgggaccaaaaatctttttttttttttttttttttttttgaggattggaatgaccaaggaaccagttagaatggatcagatgtatttctgttgatttacaaaagataatttcattgtcagtaatgaatgtccctaaatgttttggacacaataaggagtttcaggagaaaaccgtaatagtgagtagttatccttttcttaggattttgattccttaacatgaaatgctgattccaatgctttggctttcctatgtcagttcatacaaacttctgattttattaattattgcttctgtagagaataatctgccatattagacgaaagtcattttatcaaaccaaggaaaaatattaagtctactagaaaatataagagttttattgactattgtctttaaatttttttaaaattatggaacagtttaaatgtacaaaaatgaaagtayaggttacaaagccctatatacattaatcttctagctgcactggttaccaacttatggtgctaggggctaaatgtgtctccccaagattcatatgttgaagtctaatccccagtgtgatagcagtaggaggggagcctttgggcagtgattagttcatgagggtggaacccttataaatggaattagtgcccttataggaagagatacaacttgctcttggacttcccatcctccagaactatgggaaataagttttcattccaatgcagtattttgatgaaaatgtgtcataagtggtgctgaatgttttccattgtactgcattaggagatacataaggtttggtttctctttttttgcaatattgttaaatacagtcttaactttaagtatagtcttaactttcatactctcatacgagagttcagaaatcttacccgaaactcgattctacctttgataaatgaaatatggcagtggtccccaacctttttggcaccagggaccagttgtgtggaagataatttttccatrgattggggggtgggtggggaggatggtttcaggatgaaactgttccacctcagatggtcaggcattagattctcacagggaacgtgcaaccattaatatatcccttgcatgtgtagttcgtagtcttttctatgatatgtagtccaatttaatttgcaatggtttgaatgtttgtgtcctcccaaaattcgtataccagaacctaatccctaatgtgatagtataagagttcacgctcctatgagaatataatactgccgctgatctaataggaggcagaggtcaggcagtaatgctcactcgcccgcccaccactcacctctttctgtgcagcccagttcgttacaggccacggaccagtaccagtccatagcccaggggtgggggatccctgaaatatggtatatagaactaaatatataaaatctaatatatacattgatatttatatatgtaatataaaagattatgtctttcaggcttctataacaaaataccatagactgggtagcttataaactacagaaagttatttctcacagttctggagggtggaaggtcaaaaggtcaagatgctggccgattcagtgtctggtgactgcctgattcctggttcacwgatggtgccttctcacatggtggagggggcatggcaattctctggggtctttttttataagagcactaatcccgtttatgcctcaggacctaatcacttycccaaagtcccacctcttatactatcacattagggattagcttccggcatatgaattttgggaagacacaaacattcaaatgatagcagattaaattggactacatgtcatagaaaagacaaaattaaagtggcctatacaagatagaagtttagcaaatctaaagataggcacctctgagtggtatgacatccccacagtcatccaggaaccatatttttgcgtgtatgtcttccatgcttaagattgcctcatgttccaaaatggcccctggagctctagccatcatatctgcttctctggctggtaacataaatggagataagagggtaggaaaaaaaagccctacctcccaggtcagccagtcccagaccccaaacaaggatgtctgcatatttcaaaatggcaattcataccttcaaaaaaagcaggaaatgttggaaagtcaggattcccactgtgggaagctgtcaaaatattaataaggtatttcaaagactttgggcagccacaaacgataaacrtccattacatgtagtttagaattgtatcctagtgcaactgttattatgtgaacatgattaccaaatcttggaaagaaaagattggctcaaatatgaaaaatagrggaatgcataagaatccagagaaatcctttgctaacatattgtcagtatttgataaatttttgtcctaacaccaggctgaaatggaagctcaactcaggtttgcccaagaagaagcaggactcctgatttgaagggtggtgtgggggagggtttctagcagggaatggatgcttaagccagtggtgggacatagatgttacatagttttcctcagtgctataaagaaacaygaaacaaatagcttctccagcaaccagagccaacagactgtcacttctctaaacatttaagctgctthcctgcagttctattttcaaagtaaatgatctattcagctgtttgcttttgttgtttgttttggcaggaaatttgaatagggacagaataatagctaaaattgattgagtacttactgcgtgccacacactgttttgggtagtttacatttaaacatcacaggccataatattggcrttattactagccattttacggrtggataaactaaggcacagagaggttaagtaatttgccgaaagggatgctgcrggtaagagctagaactgggatttgcactctggcactatgctgtattgtaatagatccaccgtaacrcatatcctcccgtgagtatattttgcaaattgtgaagggaarcaaggggagggagaatggggcattggctctaagttgcttcattatagagagtgaaacggggagaagagattgtctggggttcacagtgttagtgcagacatcgttctggatcctgggtgccgccccctctttagcgcctcactcactggcggatcttagcccaggaagctgagggcaaccttaggccctagaacttgccacccatctgagctcccgtcctcctttctgccgctccttcatgtcctccacttctgagagcagttttgagtcacatcccttgtgggagatgcctcagccctaccctgaaactgaaccctgcccccacatagccccagcaccttgcgtttgagcacaccacttcccaggttgtgcaggcctcagattttgagtacagtgtcgtaatacgtatttggcctgtaacttgcgctgagatgcatggataagccattttaatttagctgtatagcaaaacccatccttgacagaaagtgtggactaacacagaggcaatttcttcctgccttgctcatcacgttgcatagttagagccaatccctcaagccctccttcccttcctcccttccagctcccatgtgctcctctggtctgattcgacaccatggcctagccttgtgcagtgtgcaaagaggagaaaggagtgaagaaagggaagaggaggggaggggtcctaggcagggcttggaggctgtgacagtcaccctgtaggctccaaattgagacagtggcctggggaggaaaggctgcttagggcagcagcacccccccaccctcctttcttccccctcagccatttgctctgttttctggaatatctgcctctctctcatccaccaactgtatacactgccgtgagggctgggacttaccttcatagctgcatttagcccattacctagtacacagggccatgcatatagcaggacctcaataaacatttaatgaatagaattcagtatttattatcacagtccttgaactcacaaaagctgaagtcacatactaactgtatataaagagaccgtctttaccccatgagtcttaaaagcggggttgcttggaccattcgtcaatggaagaattacgtggcgtgctgttaaaaatgtaggttcccaggcttcacctgagagtgtgattctgtggagctgggggtctgaatttttaacctgtgtccccagtgactctaagttacaggccaaatacgtattacgacactgtactcaaaatctgaggcctgcacaacctgggaagyggtgtgctcaaacgcaaggtgctggggctatgtgggggcaggggtcagyttcagggtagggctgaggcatctcccacaggggmtgtgactcaaaactgctctcagaagtggaggacatgaaggagyggcagaaaggaggacgggagctcagatgggtggcaagttctagggcctaaggttgccctcagcttcctgggctaagatccgccaggtagaccgtggaactcattttcagaaatgaccgaagcagcatttcttgatctttcttaaaactctgtcgctcttgcttgatactctatactgccctctctgtgcattgataactgtgggtcccgggtggctgcaaaccacatgtgccatgcaccagaaggggcattgttgtgactgaggccggatgaccttaagaatgaaacccaagccctcgtggggttaaaattccagaagtaccttagtatttgctgcaaaaccatcggtaaggaggaaaaccccactgctttatgaattgaatactaacctggaactactcccaaatcaattggactttggtttctcattcagaatcttcactgaatgttcttaagtgagttttaagataccatttccatgtaaaaagcttctaaagacttgtttgagagtgtacttggaaaagaagcatttttatccggtcttacatacgtaatcaaaattaatcgcttttcccccagcctatctctgctactttcagctgttaaatagccatttgatttaatatagcacctcattcttcagtgatcttcagcagctgacacctgaatttgtctgcagacaatgtgctttttaaagaattggcctgctggtgcttttgatgtaaattttatagggccatcatctttagatttttctttatcaaacaaartactctcttttttattattcttacttgcattctcatgatgattaaaatatcacaggaaatgtgtgtggttgagtccatatttcctaactatattttatgattaggctcygccagatggctcctaccatacataataaaatgtcagaggtgcagcggtaacctcgttatggtgtgcatttgaactcagtcctagcaccgtgctaggtccctaggcacatccttttttctttactttccttatcttattctttttattgttaaactttttttagttctatttttaatttgtgcatttttgttatttggaagatagctttgttagccaccttgcatcccttctggaatagactaggagatgtataaatatgtatctttaatgaacatgaatagagaaaaccaagatatttctattgtccagcttttggttcattttgattcccaccaccatctttgcatggctgttgctgtaagcctgtgatctttactatagtactctgatttcctgcaagaaaaatgaaactgaaccccgttaatacccagtctccaactcccaagcattccctacatacaaatgcttcctcccacacagttaggatatgtctttctcctccagatacctctaccatggggtgcacctccacctcctctccaacaaggctgtcaagggttctgctacctcctcactgccactgagcrccttccaacatggctgccaccaccagaggtcttgccagctcacagctgtaatagttcctgctcccactacctgctccagcccagccaaaggaaatgtcagagtcagttagaagctgggagaacccctctatctctccatagtgtgctcagtgtcagagccgtgtgtgtgtgtgtgtgtgtgtgtgtgkacacttctgttggtaggggctacaagtagatgactatcaacacctgcttctatagccacagtgaattcccagtccagcagggaagaaggtatgtctttaaggtttttctacataatgaaataattatgctttcataatcttgtcccacaggtaccatggtggtcatggcaaaatgcagaacccaaaagttttcaaaatagtttgtcttctgaaaactgttattcagtgccaagtttgttcttgatgtttttcttctaaatattttgtcctgtttgatgaaacaagtaatctatggtcattatttctaaaacatatttccttttttaatggctatggcaccagttaagccttttagactttccagggtgttgccaggtggcttctgactactgtcatccattaaaatggcttaatttgagtttgaggactagacaggaagacacaggtttaaaggcccatatttactagaataacattgttaaaaggaaacattttaataaattaacagtttatttgagcaaaatatgattcatggatcaggcagttttcaaaatcataagaggttcagagagagctgcactctgcatcatgggcagtatttatagacagagtagaaggcaggtacacaaaaaacttgattccttacagctcagctttgcgttcactggatgtggtctgatcagttggtagcctgttattggctgaagcttagaccggcttgtgattggctgagacccagctatctttacacaaattagactcccaattatgtttccattcatttaaatacatggtagattttgtttcatcttcagggtttttgatgctagctgttgacctttagaggacacattgtgagcctcttggtcctaattgctgtacgttttgagacagatcttgctgatgtctttggttccagcctcgcccccaccactccatcctccacactggccaatgtggtctctctggaggccccctgcttcaccctcttctgatgccctgaggatggaggggtaggagcaaagttcttccctccctttttccactccaaccctcctgyccaccctcgagaggtttctttgtttgcttttatttgtttttgagacaagatcttgctctgtcactcaggctggaatgcggtggcccaatcctggctcactgcaatctcaacctcctgggctcaagcaatccttccacctcagcctcctgagtagctgggaccacaggtgcatgccactatgcctggctagtttttgttgtgttttgtagagatgagattccaccatgttgcccaggctgctctcgaactcccaggctcaacctactcactcgtctctacctcccagtgcttttgttttttaataattccttgtgatttcttgcctgctcttttaaaagcaagactgggactctttaagagatggtgtgttatttttaataaatctctgtaccctgaccgtgttcccatcaggagcgtcagaaggacaaacagcagctaagtgagcctctaccarcgagtgttatagacccctttataagctctcctcattaggcatttctggcacctaaaatagatggctggaraggtaattagatgcagttacttgcaaaagtctcagaggcattttcttgatagtacacaagaggagtctattaattagttctaacaaggaaggtttaaataacatcagttaatggccaattgctggtggcaaccaggcagacagaatccagagtccctgggctgagcttcatcctttgcctggaaggggaagagttccatgaagacagagctcctgcctgtagtctctctgggaagattaaatacatacagattaaggagttgagaataatttagtgccaagctctgtactaataattgtaagtccaacaagtgaacaggagaatcgcccagagatggagaagacgtgagtgtttgggtccaacagcaatcataacttgctttttcctaagtgattttgtgtgttgtatagtatgcttgttgtttgttgggtggttgtgaaaaagcattccatccgtatggggagattaggctggagccccaaaacaaaaactctacctctccagggactctctgtctggcagcctatgaggaacaggtattgtgttagaattaattaagcatttccctctctggagccatcctttggaatgcacacatccctgggaggagagacccaccaagctttctgcactccaggtgaacagctatagagaaacttcctctgagcaggatggacctggagcatccttgtgggttatggaagcacaggaaggggacagaggcccttcagcatccagtcgcagtcatgaagtgccactccccatggtctggtgcctctggagccccatctccctccagttggctgtccccactgccgccacccatgccccactcttccaccctgtgccccagccatgtgatacatctctacccagagcagggctccagtccccaccctctcctcaaacacccagcatcatcagagccagaattagtaaggaggacatcggccacaggaaacaacctcagatttaacatgagaggggagtggagaagagagcactggaaagtctcatggtggggaagagagataaaatgtacactattgttttcaaaaatgtaattctattcacataccaggaaattctcccttttaaagtgtacaattcagtggtttttagtatattcacaaaattttgccaccattaccactgtccaattcaaagcatttttgtcactccaaaaagaaaccctgtacctattgactgtcactccccacatcccccatgacctccaacccctgacaaccactagcatactgcctgtctctatgattttgcctacaggattctgagcatttcatataagtggaatcatacaatatacaatatgtggcctttatgtctgacttctcttactcagcataatgttttcgaggtctgtccatgtaggaggtatcagttcatttctttctatggcagaatactattccttatttgcatagagatgatctttctttttcttttttttttttttgagtcggagtctcgctctgtcccccaggctggagtgcagtggcacgatctcagctcactgcaagctccctctcgcgggttcacaccattctcctgcctcagcctcctcagtacctaggagtacctaggtactttttttttgtattttctatagagacagggtttcactgtgttagccaggatggtcttgatctcctgacctcgtgatccgcccgcctcggcctcccaaattgctgggattacaggcatgagccaccatacctggccttcttttattattattattattttatttatttatttttgagatggagtctctctctgtcacccaggctggagtgcagtggcacgatctcggcttactgcaacctccacctcccaggttcaagcagttctcatgcctcaacgtcccaagtagctgggattacaggcatgccccatgacacctggctaattttttaatttttagtagagatggagtttcaccgtgttggccaggctggtctcaaactcttggcctggcctcaagtgatccacccatctcggcctcccaaagtgctgagattacaggcataagccttttagtgtccagctgcctgtacccaactcccacccttaaaaaaaatgcttatgcttaaaatagtgacattgcatggacataccatgttttagttatctgcttatcatttcatgggcatttcagtcgtctccacttttgggttattatgaataatgcttctacgaatatttcaatacaagactttggggacatatcttgggtatacacctaggagtggaatttctgggtcatatagtaactctatgtttagctttttgaggagctgccagactgttttccaaagtggatgcaccattttacattccaccagcaatgtaggaggcttccagtgtctttgtatccttgccaacatttgtcattgttcatctttttgattatagtcagccaggtggctataaagtggtatctcattgtgattactccatgttttttaatcagtgtttaaagggttagcatgttctgtgtttcagggatataagcaaaatgctagagtctcttcctaattatttttagttacagttttaagaataataggctttggctgggtgcggtggctcatgyctgtaatcccagcactttgggaggccgaggcgggtggatcacaaggtcaggagatcragaccatcacctgacccaggatgagggattggccagtagggtgtgctcagaattttagcccctccccactcctgggggcctttgtccagggcaggacttagatatacaactgtacttggattgtagttggtcgcttggaagccagataggccggggttcctgttttcagctgggctgagggctctgacattcaacaaaggatttaatgcccctggacctcggtttcctcgtcagtaaataatattggtgatatttccttctgatgactatagccctcttatggtattgtgatgattcaatgaaatgagctttataaagcagctggtctaagacctgacaaatccaagtgcttactaaacagtagttaattttatgtcttatcctaagggacttgacacaggtattattttctctagaagatgggtcagcaaactatgacccataggccacatcagtgtaatattttacctcccacaagctaagaattgttttgacattttttaaagggttgtaatcaaaacaaagaatatgtgacctaagtttcctgattcttgctctaggcccttctctgacagcccctcgtccctgccctgctcacccccacttcagggccagatgtccctactcattggtcccttatcaccttgtacttatctctgacatagcccttttcacaaagaaatccctaggagacaatcagcagcttctccawcactgcatcctcgggcacacagtaggaagttagcagctgtgagttcagggaatgaaaggggagttggggagaagaggacactgaagacggttttgccagccacacagttttgcttaagtcctaaggggagaggagactggcacttggctttggctgtcctcctgtgcattgcatttgagcagagcaatgcccttgtcccaattgtatccycagatacgttagtgtggggggacactctgaatttcccctaggccgtcacatgtgggctggacttcccaggaacacatttcttggtaattcacaactcccttycggagaagaaacttggcctgtgggtaacagaccccaacccaatagctcttgggcctctcctggaaagacacagctttctctcagccaggctgcatgaattcaggatttgcattctcttggttggggctgggctgagagaaggtggaatgcgtgtttttgagattctaaataagaaaagcaggcgtgactatgcctgcttgattctattactttggggcattttcaaagaatttcttgtctccacttatttttctaatattcatgtttatgttgaattcctcatgcagaaactgatgcattgcttttaccccagagctttcactgacgtttgatggaattagctstgcaaacactgctgacatgatgtgccctcctgttttggttccttctgtactaaacatgatttttacaatgaacttgagctctgtgtatgagagaaaaagaaggagactgatttgtgacctgactacttgcccccataaaaaagtccagaagagcccaccgattaaagcatataagatgaaggcaggacagcaackgtctgaggggagcagatgtttaaggtgcttccagcaatctgagttgagcggtttacaattctcaggcaaaagcaggcacaagctttttcaacagataaggaacacctttaaaaagaaagggaygaatgcagatgaaggacttgcaactcacaatgacttttaaactttctacaaaaaaaaagaaagaagaaaaagagaaaaaacctttaaagtttatagtagtaggttttttccaaaggttgccaatgtgtaggttgtttgcaaacattgcccagtggaagaaaggggggaatatttccaagtcacaattctacacgtttaatgtcaaagcctactaaatattactcctcttgaatcttcaaaggaattgtgtataaattcctgaaaaataaaattgcatttctgcacttggatgcaagtgaccctttggtcactccccatgatgactggatgaacatagtttaaccttgagagcaactctcacaactaggtcaaaagttgtttattgaccacataatttccaggtgcaagatgctttgaatttttaatgcgcttacactaaaattacacaggggctgaaagattgtttagctggacttctgagcaaatgagtgtggttgttattgttgttttaagtagaccacatacattcacagaagggaactttaccgtgacctagcagattacaaaaactacagtgagttcctttgacagcttgtgagtagagaaatatatttataacaaacatttcttcttctccagctacctttggcttccaaccataaatattttataaactacccccagaaatgtttaatgacagacttttaaagtaattgaagaaagaaagcagcacactttatgagatcctttccactgacatattttgatcatcgatacagcatttcgaagctaatagtgctgttactacaatgtcagtgtactacaggatcaaaaggaatgatatgagacttagaactcttttcactgtgagtgcacttgattttgattttctcagaggataatacctgtagccatttttaaaaatgaataaaattagcaaaaaattaaaaagagaaaggcctatatcagaaatgcattgggctaacaaacagaaaacctgacaagagtgacccacacaagtggagagccctttttatttcatgcattaagcagtccaggtctggtgtggtggcactgtgatatcactggggtctacctcttatcttcgttctctgtcttcattagcttgcagatcttggcttgtagcatggccctcatgcttcttgcctcatggtcacaggattgcttctgcaactctaggcgtggtgtctgtgttccagggaggagaatagaatggaaagtcaaggcagaggactgaaaaacratgccagaggaatctgtctgtcattaaaaattgcccaagaggccaactcagcagtgttcatttataactcattcatttgttgaatgaatggacagaactccatcactctatcactcccaacttcaagtgagtctagggtgactatttttagctgggcatattgttacctagaatgaggtcatggttcctttaggaagagaggaaagtagatattaggtaagcaactagcagaatctgctatagggggttgtcatttcaaaatattctatatagttagtaataggtttgaaaaaatgtttttttttcatattgaaggtgaggactctatggggatgaaagaaagcaattaacaatacaataatggggtatatttaccttctgaatttaaaatattctctgaagacattactgctggagcatggtaagaattcatccatcattcagttgtccttacrtccccgttatgtattgagctaagtacagttgcaaagagagagaacaaaacaaagagagagtgagaaagagagagagagagaaaggggagggaaaggggaggaggaggaccartgggagggaggaaggggaaaaatcrtagaaatacrttgaagtcttggccttcccatagccttacaggctagtgagttcatcaggttagcgtaattggtgaaaaaacaattatataaaccatcataccactaattgccatagttgaacaaactttactttggattttctggtagccaagaaaaaatggggccataaatggtaatgtcgttctcattttccatgagaagaaaaaataatacagtcatttgtcctacagtgtagtggattagagagcttgagtaccagctctggaatagactttgaacaagttatttaatccccctaattcccagccttttcttctttaatatgggagcactaatactcatggttctgaggtcattttacaaattaagtgagatattgcgtgaaaggcaccaccaaattaagagccctgggatgaaaaaaaatgagaaagatagaagacawtgtgctcaatgacatccccattccaaaacagaactggattgtgagatgtcctatcatatggtgtcacttgagagctgccaaggatatgatgccaaaatgtcactcagtcaaagcagctctagatggggccaagaagttatgcttcaatagacagctttttgatggtccaacttggaccaaggctaaaaattcaaaatgtacagagaaatggatggagtctgtatcctcaaacaatctcccttacttttgacatctttcagccagccctttgatagacataagcagctctccatccaagggtacagtccccagtgaaggcctggaggggaggtatttgtgtcactggtggaggatgagctcctgcactacaatgacataggttggacagtggccttacccagactctgacccaagcaagtgctcaacccatcactaagattttttttttttttcactctattgccctagggcaactacagtctgagatcagcaatagactcttaaaacctggggctcttgccctcattttaaacttctgtttccttcatttgtttctttaactaaactctcctgatgaggattttcttattgcttagtcaggtccaacttcttgaccattataggggaagtcagaagttttatatccatccagtgagtctagctatagagacaattgttgctctataaactgtctttctcttttcctctttctatcagatcacaaaatcccaagagatggaaaatatctgtatcaatttataaaaatattttttgaataatgatttattttatttagcactgtttgatagcctgaatgtaataacagttccctataggaaatgggttcccccatccatcctggtggagatttctgaaaaatctgtttacccaggaccaggtaacagatgaaagcaaaaaccagccaatagatactgtggaaaagagcattccatgatcagatctatgctggtggattgcgtctagattccatgccacatttgttcaaaattaattcaattatgaaaaaggtatacttgtgaaaagcccccaacatgtaggcagttaagacataatttcatctgagagcaatttaaatgtcttattgccatctctagctaaaaataccttatgatttctggattcttgtgtggagttaatctcccagctcaagttcaccttgttgctaattctctatctcatttcagtgtgggaagcaatgtcattttatgtagaaaggaatgtatttcatctctcctcttctccagctatcagcaaatctatgcctagggcagggagcagctgtggggatatggataggacacagccatggatccttcgcacatgttgagaatgtccttggtgtttgctgctcttactcccttttctgtagatgaggaatggagattttcatgaacaggtgtttgaagaatcaagaacaacagggcctttgagtggtggggtacagcagaccctactggttacttactccatatccattctcccacagcctccccctctttagcagaaatctgacttgttcaagttttaccctaagaggaaggcagttccaccctagctcatgagtgagtcctgattaatctaagcctagcatggttgtcttatttcctttgctcatggctagttgagatgtacactggaagtttagaccaaaccaatggaacatgagaaattttctcagggccttctaggtaggattttcagatcttaaaggaagcacccaggaaagayagtctcttcttgccccagactttgtaattctgcatgggatggctggaactgcagcagccatcatgaaacataagaaaagctagtctgaggacaatgctggcatttccaggatggaagagcgagatggaacaaaagtatggaatgaggcctaaaacctccatacctaaggacttttgtaagagaatatattttcctatttatttacgagagaatgtattctctttattgtttgagtttcgttgggtttttggttacctgcagatacaagcatcctcgtattgatacatggagatgtaacataaagcagagaagttctttagccatgtttaacccatttgttcttgagctgcaactcagttgtcctgctgtgttgctatgctcagtatgtatgaggggaaacactaggccagagagttgatgaattttgtatggtgtgttttccttgcatatcatacgtgcaacacacagacacacacacgatgtgaaaaatgccaagaagccaattccacatagccaaatcaaacatgggagggaggctagaaagtttcttattaatgcaaatcaataagaattgggtaggtgtactttgcaaagggaaaatggctatccctttgaagccatacaatttctagagataccaagactccgttcaaatgccgtgttctctgtgaccccttccctgagttctcaaggccaagttgatcaccccttccgttctcataccactgtatgcatatctctagtggggcgcttaccacatggtatcagcgcaagcagtgtcagcgttcaattcccttgttagattgtgagttcttacagggcaagagacttgttgtaacctttgatgtattcacttattcaacaattatttattgagtgcctactatgtgccaggcattgagctgaacactgaagatacaatagtcagaaaaagcagatgtggcccctgcagtcatggagtttaaaatctagtgagacaggcaatcaaataattacagcagtcaaccaatttcttatgcctaaccaaatgactagcacgcagtaaatgctcaataattacttgctgaatttagtcacagaattttcaatattctgtgccaccttttatcttcctggaagctagcctaagttcatacgatggtggaaaacctcctaggggaaagagaggtgaagcccccacatgcaggctgttttcaagcatctgtttgtattgcacttactaatgtcttaatggccaaagcaagtcatgtggccagtctagagggccgtgtggaaggaagttacacggtgcagggataggaagaggtgtgactggtcaggggccattatcgtaccaatctgccacactattttaaattatgggttatgttatataagcctaaaactcagctaagagatttaaacaatgatcatttgaatctaagaataagtttctcagtacaattcacactcaagaaactaacatttgattcagacatttcaaatggaaaataatgatgtgattcacagtgaacagtatatccaagcttttggtcttaaaatctttgcacagtgctttgatgagagaggagtcttggcagccaagtgtggctgtttccccagcctttatactattttcagtgagggcagtctcttcttctgagggttgtaatgagaataatggactctttccccactaacatccagagaagatcattctaaatcgagtggttggcccatgccaacaatatctgctataaattatgaaacytccaatcaataatcaatacttctcctctatttgtataatagcaaatgagttttgaggttggactcagagtataaattgttaactaaaacaaaataggataaatatagagaaatgaaacttagctttagagcagactcttaaaccttagaagtctgtataaacaaaagtgtctatgcatgttttatttggagatttgtgtgattaaacaaaaatgtattacagatctgaatggagagtcaaattaagtgtgtgggtctagtggagagattatctatccaaaygcatttttgtaattccgtactctggtccaaaagttaatgtaaaaagccaatcgaattgattaatactaaaaatggaacaactgcaaactagaacwaatttgagaaccctcctactttcatcctcagagtttgtctaataaggacttttggacgactgaatacatagcatgtaagaaagtgttagaaatggctacaagtctgatgtgactgcaacaatattactcataatgtttttgagcacaacaaaaacatacagggtacatccacatgcataacagatgttcacgggaagatgaggttaaacaggacttccacatccacgtgggtttctccacttaattttgatcataaaagccatagagaagttgaaaggsctcttagaagagtggacagaagccgccaagcacaagtgcagtagggctaccttgtgtatgcaaaaggaagacaagtcccacttggaaatatgccttcaggaaggtttagcctcgcaaacttgcactctcccattgtgcttacatttcatgtgtgtggcatgtggatttcatttctctttctgtcaaacatacaagtattccatggattcctatggacccaactgcagtttgaattttagaaactgtaacatttttggccgagcgcggtgcctcatgcctgtaatcccagcgctttcagaagccgaggcaggtgaatcacttgaggccaggagttcgagaccagcctggccaacagggtgaaatcctgtctgtaataaaaatacaaaaattagccaggcatgatgctgtgtgcctgtaatcctagctgttcaggaggctgaggaatgagaatcactggaggctgagaagcagaggtagcaatgaaccaagattgtgctcctgcactccagcctgggcaacagagcaagacctcgtctcaaaaaaaaggaaactgtaacattctgtggtaatgagatacccagtttatggctgctttttgcctattatttgtgtactgaccacagaagcttaaagggtactgtggcattaaaagtgaatctctttgttcctcatatgtatatttttttcatatttgttaatttgaaatttgaaaatattcatcttttggtctatggcattgatagcattcaccagtgtcacctgaaatttgagttcctgctcaaactggaagtcttgtatttttttcctgaagcactcttcaaggatccaactatggtagcttaatcattacatctagaaaatgacttatggctccttgtgaaaattgcttctttgtatgaaaattctggtacagcatgcaggctattgtgttctgggaatagcatagtgatgatgtgcgttatggagataacaggacattaggtatacagaatggaattaatatttagaagtgcaggatgccactcagataaccctgtggtcatccctaagtattgtgtagccctcggttaacatatggcacatggacagggaggagccttgggaatcattaggttcagtgccctcattctatactttgaggaaactttgacttagagaagttgttcaggatcatttgctcatgtcactcaactacttagagtgataaagccaaggggaatgccagagtttcataactttcagtccagggaaccttcgacttcaacatactttttcttctgtaacgtagcaaatcaggggtttcaaaatattatgaatgttaagaaaaaattggtagattttcttatagttttaagagataactgaaagagcatcctttataataataaatatgacagcattggttctacagcacttactataatcgtattttcatcccaatagtctagtctatactctttattaattatccactatatacataacagatagattatttttattaattatccactatgcacataacagatagacccagatggacttgtaaatgatctatggctatatttatttttctgtaggtagcattacacatggaattgtttcaagtgggaacaggggaagagaagaaagccaaaggttcagatttggcatagctcttggagaagatgggcttgaataatgagaagcacrcaggatgtcatttgagagttgtggatggaaagagccttctgttcaggaggattgcaatgaggggamatagaattctgagatcggttctgtgtatttcctcccctagaatggaggaaaggagactgggagcagaagagatgatggtaattagaaaacagatgtgtgtggctcagatggtttgatgggcaaaggccagtgagaatcactgccgagttctgggaggctttggcgatgatctcaaaatgggaagcttgaaatgattaaaactgtggaaaggaagagaaagataaaaggaagataaaggtagatttattatgggacaagcccaaacaagaataggacagccaaggtgtccaaaataaaactgggaacgcctatggagttggaacccatgtcatcagcacaaattactggaactttgttttttctgtttctttaatgaatatattccacaaacaaggaaacacggtaaaatctagttttaacttttaaggcgttttccagattatatcttggtagcaatatggactgaaattaatttaatagcttcagaagaaaatatcatttattgggttataacctaactttcccctttttataagtgaggaaactggggctcaagggtgtgaagtgactggcttctagcaccacagtgtcctaggaactttaacatgaggatttgctgagtggatttaaactgctcacagtcctatggacagtgaggaacagaattgtccctgaattcaggccttgcacagccctggctgtgactctttcaagtgttagtttgattaaccatgaaatggagttgctgaaaaatcatgaactgcagttttattcgtcaagcaaagtcatttcacagtcagtataatattcatgctaagggtctaatgctttaacaacattcagtataaatttcagttaacctacacattcagttaaccagcacacctgttctctaactagcctgggagagtgtgagcatacttatgaggttaattatgactggtaaatgtgagtggagctcatcaacacacaatgagaccccaggaagacacaacagtgcccttcgccccaactcctctccaggatcacgcaggcaaccttctccccagccttaatccctcagaaggcttcaaggacccactcagccacttaatacagaaagctgggagtcctctgtgacagcacttcctcaaagctgatggagttggcagagggccctggtgagctttttagagagagactcctgactctcatcctagactgtgattcagttcgtcttagagtgtggcccagaaatctgcatttttaaaagttctgtgaggaatttgaatatacagttatttgcgaaccacagcttgtactatattaagtatcattttgcagagaattaaaagcagcactgatgttaattcttccaacattaccaatccccagaagagctctatagactctgggtctcatagactatgaaagtcttggtccagaccacatttactttttacctagaaagccttccttctcttctccccatttcaaaccagggctaagctattgaacttgtggatgtcatctggtggtggttcctgtcgtgctcaggatcttggaaagatttctgtttatctggcacgctccacacaggcctgtcaggctctggggatttgtggcatttgcagaacttacaaggcaggcagcataaaaatatataattcatagaatgaaagattttggaggccccttcacttttacaaattggccataaaatagaaatcacagacataacattcatataaccgcagttgccaagaatgaagaatcacttgggggagggagagggtgcttgaggagtttcatgtgtacttctctatagggcacctaaagaaagagtgagcattcaaactctctgtgcaaatgataataggaacattaaagtagaggatagagttctcggcctgacaattgcaagtatctgttaaggataatgaagatttcgagattgatcctaagaggtctttaaaagtcttttcacagtgattgagtttatcatttgagggcatttgcttgtcctgatagacattccaaatatacttaggattttgtatacattttactataacttactgcttcttggttttttcctttcccagtggaagcagttgacaatatttgaggcagctgtctactttgaccgcctgtgatatatcaggggaaggagggaagggaaaagtatacatcctgccaccttcttctccaattagctgcgttgacactctgggcttccattagctttctagaaagagtccttaggaaggagagagaggctaatctgctcctgtcagttccacttaagccttctggggacttgagtcatggctgagtaatggctgatgatactggttgtgatcrccgactgttgaaaaacagtgtattcaatgaggttggatacatgcaagacataaaaaaggaaagaggatctctgtcacagaagtcaaactaaaaattctcttcactatttgatttgtatattaaagaagtgtcatcttaggagtcaggagagccgagagctgggctttcgtggttatgtgtcactctagctttgtgaccttgaagatgccaaatgatatttctgggcttcagtttactcatgtaaaaatagttgtaatatctacatagtgtaaaggaaaatttcatccaaatcaaacacagattgggctggagatgggggtgatagagggtgatagttgtggctagggggtgttgaatggatgaattattctaaattgcttctggacctcaaactccattatgttaggaatctgtgatccacggggagtatggggggcacacagagggagttacttggatgctactaatgatacttaagccatttgataatttacactcttagagaaatgcacagccagagtaaaagacagttatgctgtttcattctgtattgttaaacaaggatgaaaagggtttacatgtcacagaacctaggacagggtcagtccctccctccttaaaaatcagtccttttttttttttttttttttttttttttgccmtctttccagaaagkgcatttcaaataaaaggkgatgaacatttttaaagcagaccttcaraaacaaatctatcttattttctttttgkttatttatttttatttttttgagactaagtatcactctgtcacccaggctgaagtgcaatggcgcgatctcagctcactgcaatctctgcctctcggcttcaagcgattctcctgcctcagcctcctgagtagctgggactacaggcacctgccaccactcctagctaattttgtatttttagtagagacagtgtttcaccgtgttggccaggctggtctcgaactcctgacctcaggtgatccacccacctcagcctcccaaagtggtgggattacaggtatgagccaccatgcctggccatcagaaacaaatctatagttctaccaggaacaggaggaatctgcttcttgttaacactgtatccaacatctacacattgatttagctgcttaattcggcaagtttcaatgcattacataggttcttttagaaaatgattaaaaaccccaccctaaatttcagacaggtttacttacgtttgtggtagtgcattaggtgtctttaaaactcacaaggctgattccagaaattttagtgaaaacacatttcctgcttttatgttcatatcatgtaggtgtgtattggtatttagagaaatgatagaagtaccgtcactgtgaggatgttaagccctcctttatctcaagttattatcgtasacccagctgcagaaatgayacaggatgttttgttcttatagacgcgttctttttaaataacaaactttcaaactattagttggaagcttgccacaaactaataaaacaattagaattaacatcttttaaaaaatgaattacccaatagcctaaaggtaaataacatctttggttattagtaaaaagaatcagatagatactaagcctgctactgtgctgattacscaaacaattcaggagaaattaagtgatttcacctaagttttctaggtaagtgcctcagttattcacttaaactgtccaagaggcacctgtactcttgtaataaagtacttacctatgtggtaactcccatcttctaggtcattaattcagatgtaacacattcttccttgctattccgtaatgtgctatgagacgggaaaaaatgcacctatcccaattgttggacagtttgtttctatggaggaattaaactctgagtttatgttggcagctctgtcgtagccataatttcataccccagcctggttgtaatggaaactccaacttataaatgctatttgtaccattaaactaaacatgaaacctaattcaaccttcctgatcataaccttgtagccaagaatgtaatttatttttctgaatatctggacttctgtaattgttgccaatgaacaggcttttgaagtactcactgattaaaccataagtaacaatgacctattaaaatgaccatctttttattttctctgatgacttcaaatagcatttggtcagataaagcagctgtatttgaagattctcttggtttcacattttagtgaaatygttgtgttaattagtgttaagcagcacattaaattcctcagagcagttagggctcattcagtgtctgtttaggctctttatgtacaaagcacattctaggcactgtgaggacacatagtagactggccctcaagaaacaaggtattactcataagaaaaaaatacataatggaaaaattgcaccaaaatggcatgtgactggttgttaagtgaatgatatagatattatattttattccagtgacaactagcctttaagcttcaaatttattaaatgctaccctgcatacaaatatttcaggaaaattaaattaacctataattgcaaaggcaaaaattcaaatgacctaccataatatatttatgtttgcagtgtatttatgattttctactgtgctttattatttagttttgagctttttaaaatgaccttctgttatgagtatgtgctgaatgaaggaatcctttgattattgtcagttgttgatcaatgctgagcattcaaaatggagaaatatctttattgcagataaaaatgattaatcatagatgcttttcataatagctatgaaaaatatataataaagtagataatagtataaatagtatataatattatatcaaaatagataaacagtagtatatcaagataagaagtagataatagtatataaaaatcattgtccactaggcaattagaaaggaaaaagaaaggaaagacattcatattggaaaggaagaagtaaaacttctctgtttgcacatagcatgatcttattatagaaaatcctaaagaatccacacaaaaaaactattggaattaataaatgagttcagcaagattgtggaatataagatcaatatagaaaaatcaatcrtatttttaccaatcagtccaaaatgaaactaagagaagaattctatttataatgacatcaaaaagaataaattcaacaacagcagtataaggcatgagcaatgaaaacaacaaaacatcaaagaaacgaattaaaggagaactaaataaataggaagacatccatgttcatggattggaagacaatattgttaaggtggctgtcgtaatcaaatttatctacagattcaatgcagtccttatcataatctcaactacttttttgggcagatattagcaagctgaccctaaagttcacatggaaatgcaaaggacacagagtagccaaaaacaatcttgaaaaggaagaacaaagttggagggacttacccttcccttcccaatttaaaaacttagaacaaagctataataagactgtgtggtactgacatgagtataaacatatagattaagggaatagaattgagaatccagaaataataatgaccccaaatacacttatggttagtgaatttttgacaagggtactaaacagctaagtggggaaagaatagaaagaggagtcttttcaacaaatggtgctgtgacaattggatatttgcatgcagaagaatgaagttagacaactaactcacaccacacacaaaagtaacttaaaatggatcaaatacctaaatgttagaaataaagctataaaactctcaggaggaaacataaatgtatatctttacgatcttagattaggcaatagtttcttagatatgacaccaaaaccaaaacaaccagagaaaatttagataaattggactcagtcaaaatgaaaaacttctgtgcttcaaaggacaccataaagaaaatgaaaagacaacttacaggatgggagaaaatatttgtagattatgtatttgcaaatccagaatatatatatggaactcttaaaatgcaataataaaaagacaatttgtaaatggatgatggatttgaatagacatttctccaaagaaaatatacaaatggccaataagcacatgaaaaaatgctcaacatcattagtcacagggaaatgcaaatcgaaatcacaacgagataccacttcacagcaacgaggatgggtataataaacaaccaaaaagacagtaacaggtcaggcatggtggctcatgcctgtaatcccagcactttgggaggccgaggccagcagattgcttgagctcaggagtttgagaccagcttgggcaacatggtgaaaccctgtctctaccaaaaaaaaaaaaaattacaaaaattagccagtcgtggtgtgtgcctgtagtcccagctactcgggaagctaaggtgggaggatcgcatgagcccgggagacggaggttggtgagcccaggatcatgccactgcactccagcctgggcagaagagtgagaccctgtctaaaaaaataaaaaaatacatatatatcaataacaagtgttggcaaggatgtgcagaaattggaaccctcatatgttgttggtaggaatataaaatagtatagctgtattgaaaatggtttagcagtccttcaaaaaattaaacctacggttaccatatgatccagcaattccactccactcctgacctgttactgtcttcttggttgtttattatacccatcctcatggctgtgaagtggtatctcattgcgattttgatttgcatttccctgtgactaatgatgttgagcattttttcatgtgcttgttggccatttgtatattttctttggagaaatatctattcaaatccatcatccatttacaaattgtctttctattattgcattttaagagttctggaattccactccacttcttgatcactctgtaaattaagttgttctgataaagcataatagcaaaaaatattgtcattaaggaacatatttatgtattttgtttttaaaaagaaacaaaacaagtttgataatcaatcttagagactgcctgaaatttcatcagtgcagagagttaagaagaccaacatttctcttgttatatcatgaagataaatatagtttatcacttctgatgaactgatatacatcctttttattaatctgattataggcctttttcactcagatttattatatgaaacagttattgttctgaaattgagggaagaatcctaagtatttccatacagacgtttcatgtttgttctcttggtttttttcccaggtactacctttcccaagccaggtggtgtacaacagggtaggcaagtgtgggagccgtactgtggtcttgcttctgagaatcttgtcggagaagcacggatttaatttggtcacatcagacattcacaacaaaaccaggcttactaaaaatgaacaagtaagttgactttgcacattgttaaattgtgttttgcttcagctcatttgtgtaactagtgggtgccttacaggtcatccttcagactcctgatgagtgaataccagagttttgayttcatgctgtatttttgccagagtgtggaaggaaatttaagttaagggttccataagaactctataaaccagggaatatccatgaagggatacttccattaggactgatgaaggactgtatgtacttgcccttgtctagttagctaaaattagcratatatacatctcaaagagtcataccaccgagctataaataatgctgacatcttcaccatcaaaatgagaagattttattttaatattcttccctcttcattttctcaccaatgtccaggatctttatggttgtattggttgatgggggacatgagcttcctgctatgggaaactcagaggatcttaggctttgagagcagcatttggaatgttcagtggtaggaaaagaatgaccccacttcacaggaacaattttgccctagtgtagctgagctgtacaagtggacgtgctgatggtaggatgggagtgctgtcctctaccaagaagctatgaaggtttactttgcaaacctgtatagaggtaagggcaacagtctctgtgggggtgctttgctaatgtagaaaagtcagatagagtgttctcatggtcattttacagagttgggtttgtcatcctggtctcagaaactggcttctgtccccttacatacataggatgagcagccacccaatgagtggtacctgcatgttgggaagaaacaaggaacatggctcactatcaggttgagatcatcattataaaaatttcctcatgcctgtaatcccagcactttgggagcctgaggatcgagatcaaggccaggattgagactatcctggccaacatggtgaaactgcgtctctactaaaaatacaaaaaaattagctgggcatggtggcacgtgcctgtagtcccagctattcgggaggcggaggcaggagaatcacttgaacccagraggcagaggttgcagtgagtcaagattgcaccactgcactccagcctggagacagagcgagactttgtctcaataaataaataataaataagtaaataaaaaaataaataaataaatttccatccatgtccattttctttggacataatctccagctttgaaacattcagaacctcacaaacagagggaatctcattcttaatttaccaattgcgtatttccattttatcttgggggaaagtagaactgttttaagacagtaacatagccaaccatacttgttctaaagccactatgttttgtgtcttttataatacagakatcaaattgcccactcctttgcaaacttccattaaaaaatcactcagtatcaagtttaaatagccattaccagcacgaatagttaaagaatcattaccaatcagcaaaaaatattttaaggttataccttgtaggttccatattaggrtctccaaagaaaagaatgatctttggtggcatttaaggatattgcattttatgtataagattgtacatacagtaggggcaggttctctttgattaccttacttgattgaagagctaatgtgattaggctggtgatgcctttttaactgcctgaaagaaaggaattataaataaatacattattgcaattttattataattattaaatttggtgttcttttgaatctaactcttayggcctgcttatctatgggattacacttaaatataatatcatcatactcagttcccagatgcctcataaaacacagttgctagattttagttcccactgcaggagagacaacaaactacctgcagagagcaggacaaaagtaactcaaggattagacattgggatgttcaggaattgttagaagaaagaacacaaagtacagtatttaaatgtgccttgggattttatagagatcaacctagtttgtttcctatgaggagcaaacatgaaaaagtaaaatacacttgtaactatgaatggaataatttagaataaaaattaacagcaatttactaaccatgtatagattgttagatccagaaagggttaaagacaaagtcttccttctcttctaaaatataggctagctctcatctgtttggaatggttggcttgtctggaagccagagaagagactagacagtcttttaagattctttccagccctgtgattctgtgatatatttgtacaacttctagcataatctgtgtattgtgtagttgaaacatttctgattcctgtggtcaaagtgacctagaatatatttcataacttcattattccagatttctattaaattgtaaggcagttttaaaaacgcatggcaaaggtaaagataaggtagaaaaaacaaatatataattttaatgtgaaaacaaacataataacagtaactattacctctccgcagccatctggctctggcatgcagagagagaagccaggaaataaaaggacaagaaacccagtttgaagttcaacaacatttagagaaacactttttttgtccttgtattgcttttattaaagtttcaacgtgcataaacagaaaaaatattattttaatatatattcaagaaataatttgtggtatgaatagctccttttttkgtaatttattagaggaatgaagggggaaatggtttagaagactagtggaaattgtagtcagttgttctcacctataaatggtagaattctgaaaatttgttcccatagaatcattgtcctctagagttaataacaattccacttcaggtgcrgtatgacttaaacaggctcttgtgggctggcctgggactttatccaccgtgtagagaatttcttttatgagaaaatgtgctccaagtttcaaactactgacttacaaatgaactttggaatattatccatttctaagaccagattatctattccatttcattcrtacaaaaaggcacctctctgggccacagtcaaattcacacatgcattgctctctggagggtagttgtgatcatacacacacacacacacacacacacacacacacacacacacacagagctaaattttttaaatctattaaatggaacaagacactgaagggattattaaaaaggaaagggagtgtgaagacaccaaatgttagaatgcctataaaaatcccactacatctgtccttataaaaatagaaatacctttgaagttcatattttgggaaatatcacctcaacagcagagcatgggcaatggctgctgggcaagtgttggactttcgcacagctcatcatgcaaacctgtgatgacatcattgcatttatgcyctaaaactagatttcaggtcttaagctggcttaaattatctcttgaaaaatggagattatatacagctttgaaaaatagggaatttttttccccagaagacatggcatgtgattgccaaaaaaacacataaccatctttggttaagaggtgacaccatctttctgagcattgctctaaatacaagaaaggtcagagtgctgcaggtgtattacaactatgagaatccataattactttcattctctttaaagaaaagcaaaagttaccagcatattgagaaggcacataattttactatttctatttctgttgaaactgaggattacgtgttggatacagcacctacaacytgcattgtttttcttcattgtttcattgaactttttggacctaaaaatatactactgagtgggtatgattccctgttttatgggtgagacacctaagacaatcagattgtaactttccaaatacattgtaatgactatcagtggctcttggccttgaacctaggccttccttaatccaaaagccattctcatcatgcagtgtttatctcctctagctggatagcagaatctcagcagagccttttaaaacctagagttgcagtggcccttctcctggagattctggggtagagcccagaaaactttttctttaatgaagtgtcacaagagattttatgatgcagccagggttaagaagctctgtcgaaatcatcataccagcattgccctaggtatgttcctgagaatcctagtcctctaagacattgaaagaaaaaaaatattatggttcaataaatttggtaaatgttgcgtgccttgtcccgaatgaatcaattcacgatgattattcgcattttgaagacttcgaaaattaaaaacaaaactgcaaacaaactgtttgactggatttcacctagcgtttttgcagtcttcattgttcaggggagtcttaatgagtgtttgtgactcatttgcattctgcagaactccagttcattgtctgtgaaatactaggcaagtccacatcctcccaccagttgtaacagtaaaggctactatatcactataaacgtaacatctgttctgaccctccaacagctattcaaattattaaaaccttgaagagttatataaagggtggaggagagagagatcctatgcccatgtgccctagatagctttagcttccttatcaaaacactatttccttacaatattttaaatttccctctcctgttgctcttgccccctgcaagtttcaagtctgaatggtggctagaaagcagtgagacttagggggaaaaaacccaactcacctaaaaaaatcatgttaagtttgtaaaagtctacaggctacagggatccctaaggcatggttaatcgggcctctgtttaatcaagaaggtgggccaggcatggtggctcacgcctgtaatcccagcactctgggaggccgaggcrgtggatcacctgaggtcaggagttcgagaccagcctggccaacatggtgaaaccctgtctctactaaaaacacaaaaattagatgggcgtggtggtgcacgcctgtaatcccagctactcaggaggctgagggaagagaatcacttgaacccaggaggcagaggttgcagtgagccgaagttgcacgactgcactccagcctgggcgacagagcaagactccatctcaaaaaaaaaaaaaaaaaaaaaaaaaaggccgggtgcggtggctcatacctgtaatctcagcactttgggaggctgaggcgggcggatcacgaggtcaggagatcaagaccatcctggctaacatggtgaaaccctgtctctactaaacaaaatacaaaaaattagccgggcgtggtggcgggtgcctgtagtcccaactacttgggaggctgaggcaggataatggcctgaacctgggaggtggagcttgcagtgagccgagattgcgccactgcactctagcctgggcgacagagcragactccatcccaaaaaaaaaaaaaaaaaaaaaaaggtgcactcattcatttttacagcagatttctctgttttttgttcattcactttgatgaatatttattgagaacctagtattaatgtgcgtattaaaccccagacagcccactagatattagtgcaccctatttctaatcctcgaggcaacattgttaggaaagcattattgccccatgttagaaggaggaataagtgtgtacaggaatctgattaaaatatagtgtaaattaagaataatgtgggagaataagacttgaaagcaaacgggggtcaaatcccgaactttaaatgctgggcttcggagttggaactttcttctgtagacagtgggaagctattccatttatgcctgaggtagcaatttttttaaatttttgcaatcagaccttggcaatgaccttgagcagtaggatgtaaataactcccacatgcttagcgttccaataatggaacactaggcatacatgggttaataaaaaattgttcttaatcacgataggcaccaaaatctgctggggagcgttctcacaatatgtgtattcaggtcccactgcaaaatacagagctaaacttgtaaaggcagagccaaagttatttgtattttgcaggggaaaaactcccgaagaggtcctcacgcacagccctagcaaggaatgatttcacaaaagcctctgattattagaaagttttccttttattgaagtgaatcctttactacgctaggaaaatcccgctgtcacctgagactctctcaaacccctgaagactccatgcgtccctgaagatttatgaagtgttgtctcctcatgagcctctctctttatcccaggaacctttctctggcttgacatgttttggaaaagcctcgcttagaatgaccgtcagaacttcccgactttataggagtggggacagtgtccacaggcatgagagtgctccaactggaccttagagtcaaaccaaagagaggagcctggtccctttccatgccacagggattagttcacacagccctgcagacgtctagtcttggagccctacasacagaaactgagtccgctaatagaaacttggtggaaaaaaaaaaaagaaaaacaaggaagaagcagcaaggcctgcaaaaataaaataagtttttcctttccttccagttgcagccatgagattttctctgtaattgagacccaggctctttgccttgatcatgtcattgctccccctggtggacttcttcttcattgcaggcgtgtgttgcgctgactgcttcccgcaggccatcctgcctcctgcttacaagggctaccccatactgtgggaagagggaagggtcaccggagcctccagccatcttcccaggctctgaggttcaagggccaaggctcttcctgtgagctactccttattttgctttgatatgttaaaaacatgtcctttctgtaaaatgctttgcaaaattgtaagacgtctaggtgttcatgagtgacacagaattcacttatgaaccacgtagggttagataccgcctctgctgacaaatatttgccaagaagtcaggagcaaagtctgactgtgttggtagaactgcaggtaaaggttttctgctgcaccatcccagccagtcaggttgaaagcaaaagattaggaattacttactgatatgctgtgatctgatttttttcttttaggtatctttcattacatagttatcttttttagtatttaaaattaattttctgttcttgttaggatatatactcagttttcccacctagaacttttaaaaagtattatctctggcattttaaagcttttatttttgtattatttcataatgcttttccatctgttagaactttctttcaaattttcagcacatcacaagaaaagaagaaaatttatattccataaaccttctttgttctccagacttttgtgctaaccaatctgttccttccattttgaaaggttatgtatagatcaaawctcggtgggaatggtgaatagattgcagccagtaaataaaaaacaggatttagggtttggaaagacttggatttcaatcctggctttacctcttgtgtggataaggctttaagcaaccaatgcagccttttgtgcctcagtttcttaacctctacagtagggayaataatacttatccatggctgggcacggtggctcacacctgtaatcctagcactttggcaggccaaggcrggtggatcacctgaggtcaggagttcaagaccagcctgaccaacatggtgaaaccctgtctctactaaaaatacaaaaattagctgggcgtggtggcaggcgcctataatcccagctactggggaggctggggcaggagaatcgcttgaacctgggagggggaggttgcagtgagccaagattgcgccactgcactccagcctgggcagcagagtgagacttcgtctcaaaataataataataataataataataataataataataataataatacttatccgtgggtttcttgtccactgcactccagcctgggcagcagagactttgtctcaaaataataataataataataataataataataataataatattacttattcatggggttcttgtgaggattaaatgacaccatatgtataaagagcaccttggtgcactcagaaaatgggagtctgtttgatggtgttatgtcctggatgttataatggtaagactgtttgccccatgtgacaccaggataatgaacatatgggtctgtctcagaaaggctaaattcatagcctgagtgctagataattctgtcttcagttaactatacatttcttgactccaaaaaggatttctaaagatgatagcttcatttcataaatatttgtggggtgtatgttctgtccaagtaccttgagtaggctttctaggggataaagcctgcccccaaccctcacagaatttacatttcagctcagactcgtgcacaaactcaactacaatgtaatgtagaaagtgcatgtcctgaagaattttcagatgcactgctatggaaggtcatgttcaaaaccaagcccatttccccccttatctgcagccaaatcttttcctcccccagcattgcccatctccatgaatggataccatcacgtattyggttgtcctagccaggaatctgggaaggaagctctcttggccacttgccctgcctcccttccattggcaggtagtcacctccttaaccctcccggaacctccccttctgtcttacttacattgacttakttcagtggttctcacacttttgtgccttagcatcccttggaaggcttggcaaaacacagactgctggcaccccttcccccagagttccttctaattcagaaggcctggggcggatcctgagaatttgcatttctaacaagtctcgggtgatgctgatgctgcaggtctggggaccacactgaaaaccacgacctcagttcatgccattgtcatttgctgttgggattattgcccagtcttcctggctgtgcttctgtatctaatccttacccttcttcacattctccaccctgtcctcagatctggaaaaaagaattttttctggctgttgatcacccacagaataaatgtcagaattcctgctgtgatctgcagtgccctccattacctgactcttacctgattctctagtctcacctgctactttgctgatcccatctcggatcactgaacacctctggcacactgaactcctgcagttccttggtgccgtatcattttatgttctgccttttgtatctgctcttcattatttgcaatgccatgaatccctttctttcctggctaactcctctaggcccttccagactactgagggaaacctccctggggaagcattacctctccatctgaatgtagagagaggtgcttcacttatctaccatctacctcatggtggttatcacatgattgtacctgcctcttagtccacctcacccacaagactctgacagcttcctaacagcaagaaccaaatccatcatctctatagccataaccctgagcaacattgcctgatacagaggggagatcaaaggatgttgaatgaaaagggctatccagaaaggctacttggaggggtagatattttagccagaggtgaagagtggttagtatttagacacacaaggagtagcagaagaacattctgaaagagggaacttaaactggagcttggacttggtcaggctttagtgtgaggaaggaacaaggagggctctcatttggctggccacagcatgtgtggtcctgagagccagttgagggaaatagcacaggtggaattcacatggctcaacacaccattgaattatgggagtccgggaaagagctggatcaaaggtgggaatatgccgagcaccagtaacctgaaccagactgtccagagatggatgaggctggataaagagtaaagatgggtgaggattaagtgtgtttgtggccatggtggagtttgagggcaccattaggacatattccactgtcttcttcatgtgtcttcccacccatcttattcgtgtttttatctccagtgcctaataagtactcaatgaatgatgagtgaatttatgccatggaatcagactaaaggccaggagtggtcccgcatgagccagggagaggagaggtggctcgttggtgattttaggtggtgccattgtcaccccctgatgcctctcctgcaaataagatttaggtgaaggaacaggcaggctgctggccatggggggaggaccaggcaagagacctcaagcaatggcagcaacgagttcagaatatgactgcttgtcgccaaaaacaaggaaagtcttagaatttgtgaagatcaaaccggctgagagctgaaatgtaccctctgccttcactgtgctaatacaataaacacgagcattagtaccttgattctatgtttaaagataacgtctagaaagagttatacattgtcactgctaatccatttttttcctcctgaaatagacagctttatgactattatgacactgttctcaaaatctaactactactattcttccattaaatttaacacattgacatgtgtttagagaatataatttaatgtggaatatgtgaaagaaacgtttttccttctgacctgttcttccagttttcttgtacagtactagggggctttcttgtatgactcttctgtgtgcagagaaatatctgaataaaataacctagagataaaagtgttaatggtctttacattaaacatacacacagtcaagagttatttttccaagcaggcaccctcagagataaattacctatggttatgtctccaaaccagtaattccattagtaaatgcatcaaaaatcaaaatgaacaacgtgaccacgcaggaagttttactaccaaaaacaagcacttgcaggtggtgtgtcgaggataaacagtagataaagaggcaggattcaatttccttttatactgaggtttgaggacagacagaccattattcactcatacctgccactgactaacagaagcacagggtttatgaactgcgagtcatttacctttaaaattcaatttcattccttcaatcgttgtgagcttgaatatctaattacaaggtttatacactgagatcctagtgtaataatctataaagcgtgtactagttggagttaattcattgaacaaatatttatcgagcacttatatatgtgtcagcccctgtgttagacatgaaggaacaaggcagacttgggytttctgtcatgtttgagacaaacctggagttccagactcttattttattgttcttgttgctactgcggttcacatgtgaatgactggttttgtttccagtttttcaacttgaactatttcataaaacatgaaatgttgcacttctgacattcatccaaagtagcaagctgcaatgtgcttttaaaaaattccacagtgtgttcgttttgatggggccaaccagaaaaactagggaaagagaagttcagaaagttagggagtcataagaatgcttggaatttctaacagattttactaaacattttctgtatcatgacatgttccagaaggccataaaagttagtttatacgaatataaactactttttgccttgctgataactgcaaataaataattcagatgaccacccaccaaaacaccaagacatttgggggtttatgtgtttcctacagaatattttccttwtaaatttcatggtcaaggagcacaagaatgaagtagtacctcattttattccatttttaaattctgcagcacctgtttcaatatttttgtatatcccaataatatcatttacagaataagataatgactaacctccttccttgatttgactttaaaggaagggatagaaggcattcttttatttacattttagtacagcaacacactgatttctccagtcaaaattacttaatctgtcacgttgctttcatggtaacaatcaactaaatgagacacaggactatcaatttggatagcactgttttattcgctaaggagccttatgtaaaacttgataaatgttgcacttataccgctggtccactgggaataagtgggaataaaaagagtcggatattggccaggygcggaggctcacgcttgtaatcccagcactttgggaggccgaggcgggcggatcacgaggtcagaagttcgagaccacggtgaaaccctgtctctactaaaaaatacaaaaaattagccrggcgtggtggcgggcgcctgtagtcccagctactcagagaggctgaggcaggagaatggcgtgaacccgggaggcggagcttgcagtgaaccgagatcgagctactgcactccagcctgggygacagagcgagactccatctcaaaaaaaaaaaaaaaaaaaagagtgggatacataacctttaacttaatatggcttggtaaattagatcctatatatgctaatttttactttttttaatagatggaactgattaaaaatataagtactgccgaacaaccctatttattcactcgacatgttcatttcctcaacttctcaaggtaagacattttccagtttaatggttctttcattttcttctaaygaacagttactttagaaatctacctttatttacaaggcagtgcaattgcccttgaaaagacatttttaatccgtttatttttgctacggagggatcaaaatttgaaatatttgaacagaaacttcatttcttcctagactactgtcttaaatcttataaaaacttggaattatttttaatgagaagccatttgacctaatagctcttttttaaaaaggaatcagattttgtattgaaacaaataagaaggcaggagatgggtattttagcataaatattttattgcacatttttgtacaatttgaacctgcacagaactctagaaataatttagtgctagagtaatgagtattttctaggatccaaagtaccagcctctgtctgtctttttaatacaatcgtgtgccacatcacgacattttggtcaatgacagacctcatatatacattaatccataagattataatatggtatttttaccatatcttttctatgtttagatacacaaatgattattattgtgtcacagttgcctccagtattcagtatagtcacatgctgtccaggtttgtagcccagaagcaacaggctgtactctacagcatagttacgcagtaggccgtgccatcgaggtttgtgtatgtactctatgatgcttgcacaaccacgaaatcacctaatgatgcatttctcagaatgtacccctgacattaagcaatgcgtgactgtaaaccrtttgattttctaagcctcacgtgtttgatgctggggaggtatttaaaattctggtttttgtttccagcagctgtggtcttctgataacaatgcaaatcttcaaattcaggtttttagattccctatttgttaaattactagcttcaggttctgagtgttctcttccccagtctttcattagcataggttgattgtcactgtgcctcactcctttgctgatggccctcagtgttttgctctccctgtgctggctcaagtctgcatacacagctgctatctaatagctgacagatcactggatccagaggcagatctgctggagaccagcctgggaacctccgggcctcccttgtcagccmtctgacgggyacttctgtcatcttaacatggggttgacagttccttgcaggtccacacgagagcaccaaaggacccagggcagcaggcaacatctgctagttagtgctgacccagtggctcctgcaggccaggcaccaagggagctgggtctggaggagctgctgctctggtccagggtgcctgacaacccacctggctggaagaagatttcagccatccaaggacttccctgctatgcagcaggtcctgtgcaagttaagtgcaaagaatgagattcagtaaagcaagttattaagcagagaaaaggagctgctgccttatctttaaaagcaagtgttccctgaagtttcctgggccttcctgataaccagagttcctgggatggtaacaggactcctgcaaattttccacagtaatccagggccaggtgctgggcagctaggactgtgttttcaaccacatttataaaatggcttgttactggattatccagggtgtgtgccctgcctcttaattccagaaggccacatgcatattattagacatgattagataacaaggcttattagctctttcaggcattgtattttatgacttgcaaagagaaaagcgctgcttccctgatccttgctgttctagcgcgtttccttctgagtcacccctgacatccttaaacctcattcatgaacacttcttgcttcataggtcaaatctttacaaccaaacagattgcaatgcaacaaattttaaayatttatgtctgaacagtgtaaaacacaaattagaagccatggccagtatcttaattgggttggcagatcacagtatggtggccatattctgtgatggcctctaccaacaaacacgtgtacaggagtttagtcttcatttaattctgaaaggaaaaaaaatgataaatgccttttagaagataccatgtctacagaaaacagtgctggcctggccgtcaggacctctggtgtcagaactggcctcccaactggtcatgattctcggcaagctgttcaacctcttgggggtctctgttttctatttttccatctgtaaaacaaggacagttctcagtcatccctaccatatagggatgctctgaacctgtgaaggaaaggccttctgagagaaggatgctgtattggtccgttttcatgctgctgatatccaagactgggaagaaaaataggtttaattggacttacagttccacgtggctggggaggcctcagaatcatggcaggagtcgaaaggcacttcttacatggtggcggcaagagaaaatgaggaagatgcaaaagcggaaatccctgataaaaccatcatatcttgtgagacttattcgctaccacgagaacagtatgggggaaaccaccccatgattcaaattatctcccatcaggtccctcccacaatacatgggaattacagatgtacaattcaagataagatttgggtggggacacggagccaaaacatatcagatgctgtatacattcagagtggcagttaaaaaggcaattctgtagacgtctcaggctgagcccactgcccagctcctgactcggtttctatggaaacaccttgaggacagggctgggctctgcttctcctccctcagttctattttactcaattaaacacatgtctatggattaccttctctcttctatacactacatgagaactgggacttctgcagtcaacattaaatgttttccttgcctttgggagactctaagttcttcttccattaaagtgtaacagatgtaaggagagggtggtcacagggcttcccctagcggaggtgggaagcaggaacttccctgtgggatgaggactctgggaaggtgtttcttcggggaggtgagggatgggtcagctttagacaagtgaagggggagagcattcccagcacagcgaccagcagaagagcagggccaagaggaactgaaagggatgcagtgcaacccaggatggacatgactggactggaacagcagtcaagagttttaagcagaaataacaagagactgcctgaccagctttgctgctttcaataaaaagccagaactgactccccaggagcaacctcttcctctcttcacacccacataccagggcctgggcccttagctaccagccttccataaaaatgaagagaatgatcagttgaactttaatatatgacaagattatgattgttccactcatagaacatgggacattaaaaaatcagcttttcattgtttaagggagtagctttatctaaggaaaatttctctgtcaatatgcaattgacagagaaaaacaactaagctggaacttcttaagaggcctttgacattacttttttttgagatggagtcttactctgtcgcccaggctggagtgcagcggtgcaatctcagctcacygtaacctcagttcaagcgattctcctgcctcagcctcccgagtagctggaattacaggcatgcaccaccacacctggctaatttttctatttttagtggagacagggtttcaccatgttggccaggctggcctcaaaactcatggcctcaagtgatttgcccacctcagcctcccaagtgctgggattacaggcgtgagccaccatgcaaagccaaggacattaacatactttaaaaaataacttttagatgtattttgactgataagttataaagataatgaagctgatcttaagaaacctacccttatagctgctgacagacctattgcttgtttcaggataatgaggttcccatgagaagaactgacactgcaacctaatattattgttgatatttccaatcctccacacatcgttaacatgccgcacggtacttgctggcaagcagactgtaaggatgaaagtcaggcctccctccccacactttttttgcacacaaatggtcagaacttttgaagggtaaggcattataccatagctaattgccctttctttttttattccattaaagatggcatttttaccttgaaatttagacagtcttgagtcatgtacaatgcgatcccgtgagcacttggtgtttctctagctgacctacttcgttttttttcaccttctaggcttcttgtcctgtttcttctttttccttttttagagttagaaggaaccatatctagttttattaatccagagatgggaagtaattggttcagaccatcaggtgttttgcctcagggaaggtttcctgcccggggacttatgcacagcgagctctcagcagagatctcaggcttcagtggggattcctgacttgcacactgggttgctgttgcacacagttgtggaactccctagaaattcaagccaggcaaatgtttttcacctggactatctggagaattgagttaaaactaccttggcctaaaaggtgcttctctttgttaggatgtttaagtaggatttttaatatttgcatactatggtttcaggtatcttttttcagttttcagagttaactttaagaagcagtttctgaaaaagatcaactttccaacatcaacagcatccctccaaatctatcttagatccacacactagaaagccttgcaacagactacaattcaaatttgtctgtcccctgcccccaattttgtttgttttctaagcttgtattttttggggggcgtataaatatttttgcaatctacaatgcccctcacccttccaaatgtgcttttgcagggaaacccttaagaagctttgcctcagaacccgatgctgtcaaaatagtccaaatgcattatgagagacaccaatatgctaaataatttcaaaccaccacttcccttatccttttttcacatcattcttcctttctctgccatgaccccctcaccttcctttgcttccatttctgtcttctcctgtatctcagatggtggttccggtgccaatagtaacttgcaaaaacaaacaaacagtgtgaaaattagtcaatcaccagaaaagcagtggggtgtgatgtgcaagggggtgcattttggacaccttttctcttccctacaagtgaagtctcaattactgatgtgaacagtgtttcttctatcaacttttgtgaacaaactctgccctctgatggcattatttaacaaaacaaatcagacttcgctaattccacaagtcaatttggttttcacatcttatttgtaaatgttgacttttttattcttcttagccaagtgaccaattcaattctgtgcccttcaaatctcttatcttttgacagacactgcaaactctgaagaaagcaccaaagtaaaaatcggtattagcagttaacaccgtctctgcctccttaaatacagcgcagaagttccatttacaagtgcgagttttctctgggttttgcctttgtgaaccctggctggactcgtcttcctaaattggcactttcttcctcatgtttctgcttttccctctatggggagtggatctctgccgctgcatgggccaccagctgtgttggcccatcagggatgagtataatctggactttccctcatttcctgattattccttactgtttatttcatgccttgtcaattcatcttcctctgtgagtgggagccctgacccaaatacccacctccttccccatttgtctcagcttctcacagcaaatgtttccatctctcctgccttgggacagaccggagagcagagcacagctgtctcttctgcttgtgttttgtgatggatggtgggcggrggggagtctagtcctgggcagaggagatggaagtgcccactgcagggggtgtgaggacagaagccagacctccccaccatgctggcccccactggaccttcagggactcttgttactgtgacgggctccagcaaagggccctttaacagccagcttggctgggcgcagtgactgacacctgtaatcccagcactttgggaggccgaggcaggcggatcacttgaggtcaggagttcgagaccagcctggccaacacggcgaaaccccatctctactaaaaatacaaaaattagatgggcatggtgatgggcgcctgtaatcccaactacttgggagactgtggcaggagaatcgcttgaacccaggaggcagatgttgcagtaagccgagatcacgccattgcactccagcctgggcaacaagagcgaaactccgtctcaaaaataaacagccagctctacccctctccgcctcagccactcctcactctgcccccaaaaggtcctgttcttttccatgatggcctttctctcacttcaaactgtcttcctccctcactgatcaagggtcaaagccctgggcctctggcctatggtacttttcaccctttaatgtagatagtggcacaaagataacctctgcttccaggccagaggctaaaaaggaggtaggcttttggcagaatggtggttaccaggggtggggaaagcaggaaaagggatttttttgttgaatgggcagagtttccatttgtgaacgtgaaaacgttttggagacgggtgataatgatgacttcacaacaatgtgaatgttttgataccactgaattgtacacttgaaaatgatgaaaagggcaaatatatacattttactagaatttcttagaagaacaggatatactttcaaaaactgattccaatcacagtaatctctactataattggagtacaaaacagtcttaattctccgggataattctggtcttaagtattgatttaatatgtgcaataattattacctcaggaagaatgcctttcaaattttgatgaaaatatacctaagatttttaccctagtgctttgtgtagctgtggaagaggtgactaatattatcgatgggttgattaattgattgaggtagcagtgtgggaccaatgctgatgaaaatgctcagaatgaggtgttcggaaatgcctctcagagtgagaaacatgcagttatgctttctagaaaattattccctgctgcagagcttcatcttctcatcaaaaaaaatgagtaaaaatttaaaaaatacgacacagtggcagagtccaaaggaagcccagaggagtgcttacagagtcggggaataggatctgtcaacaaatgtcgaagaaattggtaatgcctgctattttaggatgacttaaaagagagcttcaaagatgcaggagtaattgtggtgactgaaggacaaaagggtatgttgttgaacaaaaaacaaaatatggcctgactcttctactctctagtgtatgcactacttagaacctgtgatcagccgtagtcaccacaattttttagcgctccataaagatcaaattagagctttagattataaaatgaagggaaataagtcttaagataaaagccaaaggaatgtttgaaagaaacaacaaaaagttaaaagaattaaaattgaagttgaaaaggctaagcattgtaaaagcataggagatgcaaatcctttgtgtcaaatggttcaaacaaaaggaaatgtgcataaaaggaaaatgttaaatattggctgagtataagaaagacttttcaactgatacagtggacttcacagggaggttgtggaatcttctctcaaggcttttaaaaatcactgtatgggatggtagggtacaaaccattctcagccccaaaatgaaatcatgagtgagcaaaaggttcaggtgacccagggactttataaatagtagccagaaattctgaccagagttttaaattacttagaggagaaactgatgctgaaagaagatggaatgagggtagggaaattgcttccctactcaggcactaggacatgtgctatgctctggtccctgatggtagcatggtggtattctggcctcttctgtataacggacgtgtcaccccagattttcccaatttggcggaagctgtgtgtacagagggttggcagccggcaaccattattgccttctgcaaaggggaagatatatacaagacacctgtttgtcatagttagaaacttctagagagagcctactatattatctgatacttgacaatacattcttaagccatctaaaacttccattttggaaaattattctggaagtcttgcattggattgcaacgtgcaaacaagagcaagtcatccatgctcatcaagacttcccagtccttacttctctcgccattgatcaaagatggcagtggtgaggctgagagccatctcctgatgggatgctgtgcatggattcacatgattgggcatttctgctaactagcactagcagtcattcttcacatgaacataaaagaacagttgaggtttttaaaagcatgaagcaattttgagggtctaattaggtgcatatttggtatgcaagccttgtcttcctagtccctagctttattactttagttgctgtttatcatagatatgaaacccaatttaattttaaaagggggataaatctggggtgtgtacagtagttagctggtggttggcacagctaactcctgggactccagttagttgttcatccagttacatgaatgtgtatttctgagaactaacaagattcgcattgcaaggctaatctcacccatgagcagtgtgtgttccaatgtggtagtatttaagggctccagggtgtcattcatatgtcctggtgcctgaaattccactatctcagagttgttcctttggattcttctctctgaagattctttttaaaaatgcagataaaccaggaacaacattatatgaattcatacacagaaaaggatgggggcttgttattactttcctctgacaacagagccccatgatatgggaagaaacgttaacaactgagaggcacacactcagatgttcatttcttcatttggtcatcatttgttgagcacctactgtgtgccacacactgagctagagcgtgtcgttcctggctgcaggaggcccacagtctgatgggagaggcacacatttccacacagtgcaagagagagggcccagggcacagaggagggaggcatggaccctgggttgggcattaattgctgagggatgtgatgtgactccaggctgggttttgaaaggtgaatggagtctgccagctggggagaggcaggagcggggtcctgtcagtttgttttctcttagttctttctgacccctgacagaatgtccaggcacattcctcagaaggtcacgaggccatagggctagagaaccctgcaggcccctcaggaggtcaccagagcatgccctctgcccagagactggggcactctccccgaactcctcaaggctactgctttcaagcagttcaaagagaaaaagaaggaatcattaagagaaatccagccaatctcatcactctgcttcgggaagaccttgttcttgggccaagatttagtggattcatctaatcctttcatggaaggaattaaaatggaacacctggctatttgcwttatttttatctgaagccacttgccatcacttgaggataattatgttgaattttgtttcattcttgatatcccacacaaaatttcctcaactccagaaatcacttttccataattaagagcatagattctagagccagattgcctggacccatatcctagttcagctacaagttatgaamcttattcctgcctcagtttccccaagtgtaaatgaggataattattttttctactccattgacgtgttatggggcttcagcaagctggttacatgaggtatttagaacaaggtgaatagcgagtgctcagtgaagactggctgttattcactcccttactgcagagcacctgacccggaactgtttgaattacaatatagaggaagtgccgtctcacccagcaaggcagtcagaacctaccaatcaactgaaayattcaccgagggccaattgtgtccctgtgggttctgttctagccattggaaatactaaatccaatacagagtggcccccatcctcaagaaacctacagcctggtgagaaaactagacaccatctcttccttaacatgcacaatggtgtggtttgtaccgtgctatactatgaaatgtcctcacagcccctcaacaggtacctggaacaggtatcatcctccccacttcctgcatgataataaaatgcytatcaggaaacaccgtttgcttattacgtgtcattggcaccttagcataggaggtcatctttcaataagttaacctagagggaaggggagatgttgtctaagtaggccctgttttcgtcctgcagtgatgggttgtaacgaactcaatgtttgtgttaggtttggaggagaccagcctgtctacatcaacatcattagagaccccgtcaaccggttcttatccaactattttttccgtcgctttggagactggagaggggaacaaaatcacatgatccgcacccccagcatgaggcaggaggagcgctacctggtaagtcctgtcgcatgcaraaggcggtctccccactgcctgaggagtgggccctccaccagggaaggytcactcttcccttcccaggccttctccttggcgcctccatggagcgtggcgcagagagggtgcttccgcaggaaggaggtcttggcgagagaaactggttccgggtgacccagatcctaatgaacatttcctcaaattattttctgattttgctttgctcagttgtctttagtgctaggttttgggacccagagcgttaacagtctttcctaaggagtcctgactagcactgtagtgcttaagaagaacaaaggtgttgggggggtgtctgttagagggcggcagagccccttctcatccctcagcccattcagttcccatgaccactctgggagggggaggtgttttcagatgaggaccctgagattctaaaggttgtgggatttgccacagtcacctctcaggtaagggcgcaactgcgaccgactgttwcgggtttcctgccttcacagtctgggttctttccaccacagcgcgatagaaccctgtcattgcaccagtaattgtttgctttctctggacttgttttgggaccctcagctccataagggatgttagtctcgagcccagtaattatttccgcagcacagaggttggtaacaaaaacggagggcggagttgcgcgtctttctttcagcactagaacgaaaggtacatttcccatccctgtgttgagaaacatgtactgaggagctgacagcctggtgcccaggaggctgaaatcctggtctctgtgtctgagagagcccttggggttcacccggacccatcctgggctgttgtcgggcacaagcaggaaagtaggaagtgttgaggatcagtcagaggtgttgttcccaaagctggaagatcgcccagagctgaggccactgctgatgtgccgtcagcagcagccttgccgctggagaaaagcaccgaatctcagggccacggccaggacggctgcttcctcatctcattttaaaaacataatggaagtggatgttcagaggctgggagcatttggggatgatgtcccctcagtgtcacgttcatgttttcaaatccatgattagagtagagaaaactgagatacagagaagttagtgtctcagccagggccagacgactacaccagacccacggctttccactcaccttcrgtatttgatcaactacctaaggcttcagtgaaatattttgatgattttatttttatttttattttcttcctttgatgatatattttaaaagtggcttttccctttttttttttttttttttttagtttttatggcgaaaccctaatctatttctttataggttatgaggccgggcgcagtggctcacgcctgtaatcccagcactttgggaggccgaggcaggtgcatcacttgaggccaggagatcgagaccagcctggccaacatggtgaaaacctgtctttattaaaaatacaaaaattagccgagcatggtggcgcatgcctgtgatcccagcgaattgggaggctgaggcaggagaatcctttgaatccgggaggcagaggttgcagtgagccaagatcgtgctactgcactccagcctaggtgccagaccgagactccatctcaaaaaataataataataataattaaataaaataaaaaactataggttatgaatatgactatatgttttttatttggtgagacgtgtattcagagtatagaaacactacaagaataatgtcttctctaattatctttattatttgttttggatcttgattaatatatctatatgctctttaaaaacagcatacattccatttaatccagacaattttttcatagttctgattcaatcctcatgctaagaaagttagaaccaaaggacagcagaaaatgccaaaaaaccaacaatacagaaacacgtcttatgaacactactcttcaaatattaatgtaagagttragaggaatgctctagcttcttccgttctgtcaagcttctgttgccatcctgtaaatcatttcatataatgcagttttcacacactcacacaaataataagctgcaatcattagagagaaaggtggcaaatgtgaggggaaaaaattatggtttggagtttccatttgttcgtttttgtttttgttttgagacacagtcttgctctgttgcccaggctggagcgcagtggcaagatctctgctcactgcaacctccacctccggggttcaagcgattctcctgcttcagcctccccagcagctaggactacaggtgcttcccaccacgcctggttaatttttgtatttttagtagaggcgggggtttcaccatgttggccaggctggtctcgaactcctgacctaaaatgatccacccacctcagcctcccaaagtgctgagattacaggtgtgagccaccgtgcccagcctggtttggagtttttttaaaaaggtcataaaatattgaaagttggtagttggggcaagtgttatatttttgaagagctggtaactgcctttgttatgtgacttgagagattgtagagagatttccctgcctggaattctgcccttagaaatttgtaggggctcctttccaaatgtaagcactgtgttcgggaagggtctatgtcagatgaggtcatcagatcgatccttggcaaggccccagcaggaaagcactgggctccccaaagcagcacagcagaaactcgggggggctcagattcaagagaggagagcctggtggtgggggggaggggtgtccccttcatgatctggttccagcctgacctggttagaaggctgtcttcttgttcaaaggatagtttgtttatttggaagaagatggtctattgcctttttttaatagctgaaacttttaattccatctccttggtcccattagacccttgaaataaaattgccccctttcagaagagtctgtcctcattttggcaaaggctgggtagtcagttgtttgactcaaaagagggtgttgtttgtgtctcagcggggcgcaggcagctgtgaggagcccactgtcccctccttgccggccacccctcccctcsgaggcccttccctgcacaccgcatgcccacagggtcttggttgctggcctgaaatgagtctgctgatttaccacgtcattccagatctcagtgctctaaagccccttgctttatcccattgccaaaattcgggcagttctgcccctggccctgagcctcacagagctgcttagcatacagctgggagtggccagtgcctgcctccaagcctgctctgaggatgaaataatatcatcttgtgaggcagggtggtttggaagaaaatggaaagggtaaaggaatcctaggatttgcaggaaccccaaagaggatgaggactctctcattttacaggtgtgggaacgggcctgggattcggggtgggktaaagtccctgccaggaggagaatccagacctcctgattccacttcggtgctgtttgcccactcagaccttatgttcctgaagggtaaagggagaagaggactgggccgagtcccacgcttttgaagcagaatcatttgatgtaacatcgtctctccatctttacaaagacatcgctgttacagcaatttgttttcaaatattcaagcatcttatagctataccttattttctgggaacaactagcttttctcaaactttctatttctttccaaactcttcttcctttgcatttcctggaaaatcatttttaaataaattagtgctcgcatagatgcaagttcaacttctagcagccatactgtgaaaaggcagttgtcttaggctcatttctttttgtccagagctggaagctccccagtgtggaggtggctgcctcctttttgggggtgggagtcctctgaacccaggcacacttggacacatcccagcacctgagactctaatccagctcatgtccagcctcctttatttccagggtagggaaatacctggcacacagaccatatttaatgaatggtggaaagctttttctaatgaagagcaactgttgtcatctccagatgagggagagcatcttattcctgctgaagccactcccttttccartcttggagcttccatgaaagtggatttcttatgctgtcattttcaccctgctggttacacatcaagttctcaaaaatgtcaaattgggctgctgccctaaccattattgccacttcactaggccatcctccatttgaagaataggaagaaaagggagaaaatcttcccagagagaacactgcctctgtgacactgtttattcggcttggctgtaaaatgtggaaagtaatgcatgtttaaaagaaaagatgtgtaatttacagcttcttaattcataaagaattcagtgaatcatgttggccctgttggattctggagaagtctgaaaattggccagagtcagcaaaggtttttagaaagctatgcattttaatctacttgaaagttttggactctgaatgtcctttaactttgaaagtatacatatgaaataccagcatgtggaaatttccactctgtcccaaccagctgagactgtcctttgagcaaaagaaacctcaggcattgcctctatttctaaggcattgtttttcttaaataaataaaatgaagaagkgctttggattgtctgctttttaagtgtttcagtaaatatctatgttttccaaatacgtgacggtaagaaagttacgctcttggtcttcaactagttcaaatttagcttccaattgtaggctgagccaggggcccaagataaggtgtatttatattcccttctcagctgccttagctgggtgacttggatttagcctctgtgaaccttgcttgtctcatctgtacaatgggaccatattacctactttgcctgcattacagggttgttgggagagtctattgagcattctacacagaagtgctttggaagctaaaactctccaaaacacatttcagtattgatgctcccacccccttggctccgttactggctccacatgacctaaaggggccatttttcctccagacctggagctcctctgctcagggagtccatagaggctgctgttttcctggggctcaggacatactgggtcctgaaccctcaggtctgcttctgctgtggtctcaaattgcctcactagattccttcccccgggaacctgtttctaaggaaactacttctctttgtgttcccaacagctggagatgtgttttgatcccagcccgctggcatacatttgtcttgtgtttatttacttggaaacctaagctcctgtaggccctgggttggaaagtcatatacacgcgcactctccctctccgaggagtaacgagaaaggcacgccagagccgaatgctccgccaggctgatgcaagccatccaggagcayggaggaccaggaagccccagcttcagagatacgctgcgaaatacatttgtcctgggtgtatctaaagcaggagtcacaggtgattttaggaccaaaggccacttctgggggttagcaagacctgagggtatccctgggagtttcaggcaaacagaaaacaagatgggtgaaggagggggcaagggaggagaggagggaccaacaaagggattttggagctagaatagaatgctaccccctgccacctgtgctaccaccaaacggcagccatgtgtgtagtgtgtagcaggttagcatgctttgcctcatgttagggtgtccgccctcacagcctctcctggcgtaggtatgagcactcctcattcccctcttatgaaccaggatggcgatcccagagaggctgagtggtggtgaagatcaaaccacaaataaggggaacttgcatgaggctaccttagttacaaggggcttacgagtcacccaggttacctctgtatcaggagccacggggcaggagaactgtgggaatgaagacaaaaggattgcaggccagtgaaggctaggaaacgaatgccaggcagagccaggccccatgggaagcacatgaaccacagcacagctaagccacacggaaaccagaagttgttgagacctagagccacttccagcacccaagtgtcagtgcccaggctgcccaggggttctcagttctcttcagccatcttcaaagacaccaacggtgggttgagcccctcttatgcttcacacctctccttctaccatctcatttctctagcccagctggaaagggctctccacttttaaggacttatgtcattagattgggctcaccccgataatccggcatagtgtcccctctcaaggtctgtaaccgtactcacatttgcagagtcctttttgccatacaaggtaacatattcacaggtcccagggattaggatagggacaccttcgacgtccattattttgcctaccacagtgtcatcaaggataacttagcaggggggagaggggactgtggaggggacatgggtgtgacaggcattctgacacttggctatgccacttataagtgctcaccactgtgcattctactatgcagtggcaccaaaccatggctttcctggccctagtctgcaaaactaagtggccagtcatacattttttttttcttctactagtgactcatccaccaatccatccgtcattcgttcattcactcaataaacattgatttagtactttctgtgtagtaggagctattgtaggaactggaaataaaatgttgagctaaaatggacactgtcagtcctcatggagctcacagactgccagggagacaggcattcatcccaaaaccatacagatgtatgtgaaatagtggctgcatcacatcctacatgtaggatgtaggctgcatcctacaatgcagagacatggcgctgtccaggcattgaatggggcagttggcaagtctggaagtcagagaagtgttggttgagctatatctgaagggaaagaggagaaggaagaacacccaggcatagggcacatacaaagccctgtggcagaagggaacacagcacggaggaagaaccagggaagctgcagcagggcgagctgaggaagaaaggaaagagctgggtgcagtgatgtgggcaggcaggtggtgggccccacagagcctcccagaccatcttaaagatccctggggaggcactaaaggacttaaagcaaaagaggcatgtttacaggacatcctgaatcttttacattttgtgggaggaatcactttggctacaacatacagagtacagaagggcttcaagtcgatgtggatagaccagctagatagatcagaggctactgcagtgatccaagtgcaagataaaccaaggaggaagtttttatgggacatcaaccatgtgcaaagagcagctccaggtggggtcaggggcagcaatgagggagcaattacaaagacattgaagactcattgctgtgcttccagttgcttgccgcctagttagcaamagaagacccaaacttgaaaagcttaataccaagaaggagatattaataatagctcagtgcagccatataggacttgtcattggctgggatgtgttaaattagcaatctgaaaattgcggggaggaacgaaatcagcaagagttggggttgttgggagcggcttcccagaaaaggagaggcggacagaggagaggtgggtgctgtctttaggggtagaagaagatgcagcagaagtaaggctctggggacagcaggaggggactgttccaagtkaagtgacactttagaaagtgtgtaaaagcctgagagcaagaggctcactctggtgaaccgcctatttggcaggagcggagggcttagggaggtgaggagcttgggtacagtaaagtgtttctccagatgtcccagttgtgggggaagcaacgctgctctgatggctgccaaggcaggtttgcctgacctgctgtctccatgcaaggtcccatcaggagcacgcaccgcaagggccgccagagcacagccaggtgcatccgccggccacctgtcagctgagctcatctgctgtgagccccgcccctcgctgtgagtcagcggagctgctgcagctgtgtcccgccgctggcgctcagcgctgcacccctactggggcaggtggctaacatttattaaggcggtggttctcagccttggccacttgtggaggctttaaaaactactgatkcctgggtcccacacccgaaagttctggtttaataggtctagggtgcagcctgggctttggrattttttttttttttaagcttcagaagtgaggccaaygtgtagctgaggttgagaactactgaggaattaacaacgtatccgttcctgactgtattagcaggagctgttttcactgagagaagcaccccctgaatgccttatggaagcttaccttcttatcctctgcccatttggaaaaacctgcatttgccttcttccccttagacatttttatttgttaggcttttcattggcatatgcaaataaatgtcattaaagaggtttgatgatatagtgcaatattatgtgttgtatttatgaatattctataaatgtcttaagtcagactttcttctaaagttgaagtaaataatatttcttatccagaaaccaaggtgtgcattatagtatacatttcagatctcactttaggaagccatgctttaaacagtaaaacagaatgagcactttgatgwataaaatattttagcatctggacatctttttatttaggttgacgaggcacttggagtccattgccatctcttcaaagagacatgtgacattctttaaatgcargccaattcatacaaagacatgtaaatgctaaattaaaagatgtgggtgagtagaactacattttaaatgcagtcaggaaatgttctctgaatgcagtcagaggtcttgctattgaaagaagcgatgggatgaagttttatataaagtaaaaaactaatggctccatttaactttgttaacattttgaattttataccccacacttatttttgcagaagttggcatgcctctatagttgtcctcaattgctttgccatttgtaatatttttttccctacccagctgttttacatacacagtataaattccccaaaggctgaatgatctccaaacgtgttcttcaaaatattttgcaaagtctgaagacaggaaaagtaagtgtaaaacatctaagagatttgttggaatctcagcttgaattctaattgcgagtacttatgaaaatgtcaatattaacatgaaatagctggcagtttttctaataaatgtaaattgaattagatagtgtgtaattggaaaaatacttgcttcactcaggcttctcaaaacaagactcaggatttgttagctgcggcagccttgccctctaatggctggaagttgaaggacaggactaaaatacttttgactataaggaggatggaaactaagaagagggaatgtctgaccatttgtcaccatattgagggcttcttcccaaagcatggggcatgatgtcgatgttagcatgagcttattattaaaaggaggtgggtaggtggggagccaaggccatgctaagtatcttggagcttcagaataagcttggatagaaacaggtattatagatgcctaatctcctgaaatgcagttgaaagttcaaacttgccttataatattaaaaaaaaaaatacccgaacaagttatacaataaataatctagcctggacattgtgatggtctggtttatagtcattgagatttgctaagcacatgtaacaaacaacgtttgttcccttttctgattgaccaatgagtgtttcagacagagtagaaatgataccagtagaagtggtttggcagaaatttcataagaagtttgatttcatcccatgttctttctgggaaagcagccaggaataaatggaacaggtggggtcttaactggctacaaaatcacacagcctctagaacaaaccgctttttctctgatcctaaacccatgcagatattcacagttgaatgaaagaattttaaccaaagcttactcaatttcatgacaagcaaagcttttaaaacaccgatctgcaagaagccccagccgcctaatgggtaaggcattggctcctaaaaaatggctctgcatttcatattacaaagtaaaaacacaatggaattgtatcaacattcagctaaaagtttgcatatgcatctccctttgcattagaggtgaaataacactggtttgacttttatagtaagactgctgtcccgttaccctctgcagagcattattcactcacttccgggttttgtaattaaccacttggataagacttgtagaaagagtcagcagatgtataagacaaagttatcaagttcaacaactaaaaaggaaactttgatgataaatgtcaggtataatcgatggcattctatgtcttatcactattaataaaaaccctgtgagattaagacaagggtcctaaaccaaggcaataaaattagccgagaccagtcttgatgaccgctcatctttatttctcttggtaactattactcaggtatttcttttttacattctcatacattgctttttaaacccttcaaattatttcatgtctgtaagtcttatgttttgaactaaaatgtaacttgataatagaatatcatcttgtctctcagtacctgtcacagctccctgttaaacacccaataacagatgcgaggatgtgtggagctccaacgatgtttgcctcttttccctacttgcacgtgcaatttcaacatattctgaacacctgtaatgtgccagatactgtcaacctgtctccagttcatcttcttccaatccatgatcaaagtgtccagtgtgtatctgactttgtcattgtcttgcttaaaacactcctatgtctttctgatctttaaatgtaatattagctatcatcattataataataatattattatttgatcaaagagcctcacaactgcatgtgaatttacagttatctcaataaaatttcagttagaaaaaaagcatcatgcaccaatagagaaaagataggtttatgaataaatagtgtaggaaaaattagaccgttaaggaacccaacatacatcaaataaattcagatggattaaaaaggtaaaatgtgagaaatcagaaggatgtgtatctgagccacggaggctgtgagttgtctatcctgtggaaggagacatgactgagctagaggatggcaaagcatataggcaatggaagaaatcacaaaagaaatgaattttagatttgtctttagataatttaacagtttatttcacaaaaaggcattataggcaacattaacaggcaaatcgaatggagacaatatttacaaatatgacaaagaatttattcttaaagatattaagatataagaagtcttataaatcagtaaaaaaaagactaattccccattgaaaarttacaagtaaaattcyggataatctaaaaaatgctcagcctcatctataatttttgaactgcaaattaaagcaatatgtcacttttaaggtattaaactggcagagacttcagaaattataagtagtggtatgctcataaatgtttaataaccacctctggcgggggtggggggttgttttgtaactttgccaatttctgtggtgtcaatacttctcaccatggtgatttcaaactacgaacatgacatcactgaatacagcagagttaagagatgggcatttgcctcttataagctgttactatctggctccagcacatttccaattcatactctgctgtcaagggtacatcagaatggacatgtccatgtatttctggtatcaggattccgggagcgtggtccatcttgtgcatcattcaattcctccgcccttcacctgcacaccatgtcatcatacgtttttatctttgccaggctgagagatgagaaattatgtgtcagtaggataagttgcatttctctcgttwtgagtgaagttgagcatcttctcacatgtttaagaggcatttgtattttcctttctcatcttatcattgcccattttgctaacattctgatytctagaaacttttcagaaaattacagaaatttgcccactatttttgatataaattgcaagtattgttttcctagttagtaatctcttttaactttctttgtgatgttttttacatgcagaattttatttctttgtggtcaaatttatcaacctttttctttttatggcttctgagttttgtgttatactcagaaggatcttattaactctgaaactataaaaaatattctccatggtgtcttctagagttttgttgttattcatgttaaattaaaatctttaatacttctgaaatttattctggtgtcaggtataacatatcaatgtagtttcttttttttccagatggctaacaaactatcccatttatacaataatttgtgttttcctcattaaagtatcacctttattatatgagaaattcttggttttagagggatctgttttttcttttggcttttattttgttccattaatgtgtatctttatatacagaacactattctatatatttatatatatacacactgttgtaacctattgtataattacataatacatakttttattatgtaatatgcaatagtataattatataatatagagtgactatttatatatacattttattatctggcagggtccagtctttcctctttactcagctttttccccaattgtcctaggtctttgtctttgttcatttttccttaggaactttaaaatcagcttgttcagggtcgggcgtggtggctcacgcctgtaatcccggcactttgggaggccagggcgggcggatcatgaggtcaggagatcgagcccatcctggctaacatggtgaaaccccgtctctactaaagatacaaaaaaattagccggaygaggtggcgggtgccagtagtcccagctactcgggaggctgaggcaggagaatggtgtgaactcgggaggtggagcttgcagtgagccaagatcgcgccactgtactccagcctggrtgacagagtgagaatctgtctcaaaaaaaaaaaaaaaaaaaagaaaagaaaatcagcttgttcagccgtccgctacccccaccccacattcatacccagaataccctgtgtgttgggtttactttgagctttagattaaggtagggaggattgacgtctgtatgtggagtcttattatttgagaatgtattttgcctttccatttgctcagaacttctgttatatctctccagagttttaaagttttcttcatttagatcttgcacatttcttaagttgatttctagatatttggtttgttgttgttgtaattttacatattattactgttactaatttctatatattacctttaactcagtcaccttagtaagtgaattctatgtttgtcaagaaattttcacagattattttcagtttaccagataaaattatatccccaggtgataattttatctttcttttttctagtttttataactcttatccatttgtttttgttgtatctctagaacagtgttaaatataatgttgataaaaatgacccagcaatcccattactgggtatatacccaaaggattatacatcacatacattttatagtatatagtctttacataggctgtaaagacacatgcacatgtgtgtttattgcagcattgtttataatagcaaagacttggaactaacccaaatgcccatcaatgacagactagataaagaaaatgtggcacatatataccgtggaatactatgcagccataaaaaagaatgagttcatgtcctttgcagggacatggatgaagctggaaaccatcatcctcagcaaactaacacaagaacagaaaaccaaacaccgcatgttctcactcataagtgggagttgaacaatgagaacacatggacacagggaggggaacatcacacaccggggcctgtcaggggttggggggaaaggggagggagagcattaggacaaatacctaatacatgcggggcttaaaacctagatgacaggttgatagttgcagcaaaccaccatgggacgtgtatacctgtgtarcaaacctgcacgttcagcatatgtattccagaacttaaggtaaaaatttttwwwaaaaaaaattggtttctcatagaagtcagataattgaagtaaaagttaaattgctaattgccaaatttcgctcatttctacttttattctactagagtatgatgtctaggatccagatcctttgggatttcatctcagggagaatataagcagcatcagtctcaacaactagtaatagaaaaacctaaggaaaaagacaaagattatcatattaacacccctcggccccgcatgcacctgtaacctacgtgtcctttttgataacccaccacttccagagtggcttcattstcaaccacctgtgtcaccagagtaaattcaagtgtgtcctttcttgaggtttctggactggatgttgtcttgtgtcctttcccatgggtgtggtttccctggcagtcagttcctcagtgaccacatttaacaaattgtaataaatgcagactagaaccataattcacagttttgcaayacaaaggaaagatgaaaaacaactggaggcttmaagtcctgtgagatacccattttaccttgctttaattacggcagcagatgtaaatttgatttgccccaagcctaggtggtctttggctagggctcattcacctctgacacagagaccccacatctccctgacttctgttgaagaagtactgggaaggtctttgaatggaccctgagcacacttgacattggaaaagggagaaatctttgactaagaccctgtactttgagcagttttcagtccatccattcagctacaaatgtggaagcaaatatgccaaggtccttgaaaagaatgttgatgcttgattgcacgatgtttccctttaaagttttggccttgagaacttcaaagtgatgacactgttcttcctgccatgcccrctcttagctctgtgtggtcagtaagcagcgactcttatttttcttttatttttggaaactaagttggagtgagggcataaaccccctcacttgaattgttttggcttaagatgtatctgagattttaactttgttatttccagctgcttccctcattaaatttaggtcattaatttcataaatcagcatatgccttttacttttatgtgcaaagcccaggtgttaaagctcgagtaactctttgtttggaatggtgggtttcgtatytggcccatcccaaatgggcttattgtgcctcacaatatttctttccttccctaagtcctttggtccttcatctttatcaaggactcacagtctctcttgggtatccgataagagtttgtacggtcagtttcgtacatcttgcctaatctatttttgtccaatatgattgcttgttacttaaaactttggaataacctacatatatcacctatataccatgctcctgattttttaaaaagagttatttccttaatctagtcagtccaatcagcagtgaaattctttttatttttttcttagaatgtctctcagatgtccccatcttctctccacggctgctgccaacaccacagtctttaacttttttcaactctcccatacctcctaactgctctcctcaaattccagacattctccctctctttcagcttttgcatagtgctgccagattagcctcccaaagcagcacttcacatcatatcgtttaatttcttgcttaagaagcttggtgacttttgcccactgtggtgaattctacaggcctttctctgtctttcaaggctcttaacaatctggacctatcctgccagccctgacatattgctttcccaaataaacgctaatccaaccaagcttctgacatcatctttcagaaaaagctcatcctcatctctattcttgtccttatgctgataacctaagttgaaaggccttttttgtctttttcttctttttttgagacaggatcttcctctgttgcctaggttggagtkcagtggttgggatctcagctcgctgcagcctctacctyccaggttcaaaccatcctcctccctcagtctcccaagtagctgggactacaggcacaagccaccacgcctgactaatttttgtaattttttttttgtagaaatgagktctcactrtgttacccaggctggtctcaaactcctaagctcaagtgatcctcccacctaggcctcccaaagtgctgggattaaaggcatgagtcaccacacctggccggaaagaccacctttgtcttttttctctccacctcctatccatcrttcaaattctcatctgcagtctctcatgatcccagcctttgagatgttctcccttttctagaattccagttgcccatgtgctttacaccatttctttttcctgaagtcacactatattccaggtactgtttagcactagaatcctcaacttaatcctcacaatgatcttatgaaaaggtgtgactgtgatcttattttagagttgagaatcctgatgctcagagaggttaagtaacttgcctacagtgaagccgcctccattaagtgataaaaccaggatgctcacccaggcagacaggcttcagaaaccttgttcttaaccactatgccaaactgcttctttttgtcctatgtgacactgtcattgattccttagtccttcccagcctgactgtcagctcctgaagggcaggtgccatcttcactgctttatttacatcccattgcctccgtggagcttattgcataggaaggtcttagaatttgctgcatgtgggtagggaactttcctgtctttttcacctgtacttcttcagcacctaaacacacacacagggtctgacacataataagagctcaaaaattattagctcagtaaatgactaagtgcatacatatttgatttattcacagtttgaaaaatatatgatcacatcagtgcatcctttgcatatttttcattcatataaatgtgcatatctgtatttcctgtgcaagcatctccggtgcctctgggtcactgctgttgattaagctggacacgtctttctaggccataaaatggatgtgtctttatctgtttgtgctgctgtaacaaaatacctgacactgggtaatttataaagaaaagaaatttctttctcacagttctggagactgctaagtccaagatcaaagtgccagcaggttcagttgtctggtgagggcttctgtctgcttctaagatggttcttctggaggagaagcatgctatgtcttcacactgaaaaaggcagaagggcaagcgagtgaactccctccrtcaagccttttttgtttttttttttttgagatggagtcttacactgtcacccaggctagaatgccatggtgcaattttggctcactgcaacctctgcatcctgggttcaagtgattctcctgcctcagccctccaagtaggtggggctacaggcgtgcaccaccacacctggctaattttyttatttttagtagagtcrgggttgctccatgttggccaggctggtctcgaacacttgacctcaaatgatccgcccaactcggcctcccaaagtgctgggattactggcatgaaccactgcacccaacctgtcaagcccttttgtaaggccacctagtcccattcacaagggaagagatcccatggcccttcacctcttaaaggcccacctcctaatactatgacattggcaacacctgagttctggagtgaccacattgaaaccatagtaggatgctttgtatcctcagcaaagttaattgttgcttgttcaatcttacagtttctacccagggcacagagggtctcagagtacatcactccattatagctgatgaaattaagctacaccagtttactcaaactaatacgttattatcaaaaagaagcacttctgttatgcttagcagccttaacagtgcttttaaacttgaggtttatgagcacttgcttttagatactaatcattacaggtaagtaaaatgttgtcattagtccaacaaatcttcagaatttaattttcaaaaaggtttccttttcctgggaaagctcttctaaactggggcaagatattatttgtttcattccctgtacctaaaactacttgggcctccctttttaatccagtattgatttaaatgtttttgataaaagacacctcatttaattctctctaaatgtgattagagaaagtcaggtttctgcagagcacagtctgtatttaatttatttgcaaagccatattgagcactgagaattttaagattcagtcaaaataaataattttacattacggcatcagttaacaccaagttttcaaagggcttttcgctttaaaaaactcaaaacacctcattaagtcaaccgtcttccaagaatgtgctattcaccaagatagccttattagtccctttttgcaagtgacaaagctgtggcaagaaacaattaaacatcttaccagcggctcttggaatggagtcttactgggtaggcccttgacctgtgagcctaccgtcattggcacagtagaataggaggctaggaacaaggcaggaatgaaaacaatcagaagcaagaagccaaatggaagaacaggattcgtcatcaaggtcttttaacatgggatccyatggagttgataaaaggaaaaaaaaatcatacctcaattagtcataatatttcaaggcagaaaagaaacatagaggttatctcatctcagccagtcatttgagttgttacggctggagcaggagggttggaaatgtcacacagagttaactcctgctatcatgctgccagcaaaggctgagccctatggggtgtttaccaggaaaagcgaatgtaggaaataaaatgtcaagaagaaatttgtgaagtacaagaatgtctgaaaagagcgtatgttaagttctgaaacaaaatgataaaactcagaagtgacagctgttacctaaacttttccaatgtgttgttcaccaatctacttctgaagacagcctagtgcaacctcattccttgtccagaaaaggaggacgtagtcttcaaggtgaccaaatcaccataggagaccctatcrccaccacccccacatcacacagtgtacacatgcatgtgtacaaacacacgataacatcgatgccagtggctgaaatttgacttgttcttttttwaaaaaattaaactgttcttcctgggttttttcctttaactataaataaacccggtgggtctggcattttgttaccaacatcttttcaggaacctacccatctgcaactgattattatatacatcatgtgcataaatgtttagactacttatattcagatatggtcaattccttcattcttcctttcaacaaatgcacagcacctactctgtagccagccctttagcagatgttgagaatgcactaatgaaaaacacagatgtggttctagccctcccagagtatataatctatcagggaaaacagacattaaacaagtattgggagagatgatcaggctgtgggaacaatacgtgcataggtcaagggtcccaagtactgcaagaatctcatatggatragaacaggggtgtgatatgaaagctggagaggtgggcaatagatcaatcatcaaagcccttaaaaagatattctaaatatttgaagctttatgctaaagacaataaaaagtcctagacatcatgacatgataggatttgcatttatttatttatttttaattaatttgttttttagagacgggatctcactctgtcttgcaggctggagtgcagtggcacaatcatagctcactgcagcctcaaacccctgggctcaagcaatcctcccacctcagcctgccaagtagctcgggctataggtgtgcactaccctagcgaatggggccttgctgtgtttcccaggctggtcctgactcctggccttgagccatctttctgccttggcctcccaragtgctgggattacaggcatgagccactgcactcagccaagattttcatttagaaaatcttgcaaggggaggatgtttggagtagagcaaaataaactattttggtttgaaataggattgtcatggtacatgagaccaagaggaatggataaagacatgtctatgtaataagatcaacaattgtttcatgagtaattggctatggagctaaaggatgaagaggcgttcagratgattctaggtttctagttggagtaagctgatgcaaggtactgctgagggtagggaataacgggacggatgtgcaggaaaaataaattctgctttggatatgctgagtttcaggtgcttgcagtacatatgaatggagacacccagcaggcagaaaagtgggctgtgctgaatatgtggaattggaagttatcagtatccaaagagagggtaatcaatctactaaaatattctgtgaaggttgagatcatgtctggaacaatgttggtgctcagtaattatctgctgaagttgttgaattagagccatggggtgcgtatcagggatgaggataaaagagcccagagtcacccattttttagcaccaactgaggactttgaagcaaaacaacaacaacaacaacaacaaaaactgaacaagagtcccaggaagagtacaatatagaggtgtggtggtgtcagagaatcagaggaaaaaagttctgagaggttcatgactgtcagaagcttcaaggaagaatatctaaaatgagaatagaaaacgtaaccattagatttctactaatcttggcaagagcagtttccatttagtgacaagggtagaagcaagatggatatgcagatggggcaagaaagatgtggaaaaaatgaagatagtggtggggaagtctggtctgcattggcctggtgaggcatgcagaggtatgcgtgggattgtcacgttctctttcaggatcacttaccaaaggaagaggtaggtcctcagaacctaaagcgcaaggagattccacattactcttctcttaaaaaacaaatactattgagcacataccatatacacaacctraagggcttcttcaagatgcagataccaagatgagattggatgtgcaagagatttattgggggaaatgcctgtgaagggaaaaggaggcaggaagagccatsaaacccatagtagatctgattcctataaagaacaggggaaggactattgggtaaggagagcctcagaacacagtgtagttttaagaaagtttcagtcaggccaaggggaagttgtcagccaaagtcattcatcagaggagtcctgtgtgttgcaggaatgggcctgccttagacaacttgtcacactagtcactgcctgatattagcctacgggaagcatgcccttggcacaaatgaggtgataaaatcgaacaaagcagctgggaccattggttacttactcttccagcaatgggagagattcatggctgccacatatgtaatatctcatttaattcttacagcatccccctaagattggtattattatacctgttttgcagatgagatgccaaggattacagaggttaagtaacttgcctcagttcataccactagtaagtaatagagcctggatttcagctagtggtatgttagagctggctcagactaatcgagtcaattttttatttttaggaattgcgctagtcagttgacacaaagacagtagcttgaaaatttggccatataggagtatttacagcatggaaatctgcatatgctacacatcagtcctttgtttgtttgcttgtttctgaaaagatggttgttaggcatttgccggtacaccactgatttgaarccaggtcatctgatgctacagctgactctccaacctctatgctacagacaattggcttcatgattccctgacacatttctgatgcaaaaaattcctgaaaccaccctcctcctcggaatccctgtggagagcttgccatgccctgtattttgcttttccctgaattgccgtcatcatcatttttatgtctccctacctggatagaaagttcctcaaggacagagagtgcaatcactttatgctccctgtctttgcagtgtcctgcacaccacactgctcagtaactattcactgttgaaggtgatgctgattgatatacatcatcaccctactggtgattaaggattggtaacatctacaaaataatacaaaagattgtgcttcatacagatgtatctttctgaatcttacattttataatggcagacactattggaaaaatgtgttttaacctcaagatgaccatttaagagaactgtgacatccattacagcccagggatctggttgatgtgcttcctgcccactcccacccacaaaccaggagatacattaattacttgcctccctggccactctcagtttattgggaaattgtttatcctcccagcttgtctagaaaataaaatatgcatgctgcttggaagcagggaggtatgcagaagcytccagatctccagactcttctctcactgcgtcttggggcctgagagcttagctctgcaaagaacaacccaggaagggtcaggatggacagggcactgcagtctctgcaccaagtggtgtgccctacatggccctgagacttcagaagactcgggtcttargctcactgcagactgtgtaacgtgaataacaaaaaaaaaatttctactgcacatgagtaagctgcagaagactttgtgccttgaagcttccttccagatgaaaaagcgggtctctcatgaaaagaacgcttgccttcaagaaaagctctttaaaatcttttgacatggcaaaagaatctgtaacttgccacttgtacatcacttccaaaaatgtttcttccttcttaatttattttaaaaattttgtttcaggacccaccgtgtgacaggcacattttccaccatttgggaaacatcattgaatagaatgagaattcctactgccatgacactaacactgcagtgacatccgtagckccaaaactcttgatcttcatcatgtgctttcattcatcagacgtgtattcgttcagccaaacagacatgagcatctactttrtgccaagctcagtggtgagggctacagcttcaaaaacagaatatggactatgctctcgaggaattgtctaaggagagaggcacacacagctagggttctaacatcagagctttatctaggagcaccaccagaggtgtggggagctcgtgtctgtgaggcttcctggaggaggtgttacctcagttgagtcttgcaggatgagtacaasgtccaagcagagagggtgtaatttgaaatagcttgatacagaggaggaactaaaggcagtgaagggtgctggggtataaagtttgaggcaggaggtagcaagaactgaaacttgacattgaacagttaggcagagcctgcatcatgcatcaattacctggtttactccctttattcaaaaaacaggctgggtgcggtggctcatgcctgtaagtccagcactttgggaggtcaaagcrggtgaatcacttgaggccaggagtttgagaccagcctggctaacatgacgaaaccctgactctactaaaaatacaaaaggtagcccagcatggtggcgtgtgcctgtagtcccagctactcaggaggctgaggcacaagaattgcttgaacttgggaggtggaggttgcagttagccaagatcacattactggactccagcctgggtgacagagaaagaccctgtctcaaaaaaaaaaaaaaaaaaaagcaaaaaacaacaatagcaacacctataaccacaattaactttctttcttgtgttctccgaaagattggcaggaaggcagatgaggatgtttccctggtctctaatctgaagctgtagattcctacaacatgtaatactgtcccaccctccccacctcttcccaaccaaatgccaatccactccgcttcatcatttccaagtccacccttcaaagtagacttcgcctattcccaaggatgcagttccatctctccttctcctccttgtcctctgctcctgttaattcactgatccactgggcagaaactccaagtctgtcactctctcccacccttattccaatgctcctgtgccaacaaggagtgacccaagcagtgagctttacagccagcacctgctccttctggaatggcccttctcagaaatgcaggaacctcagcagtccttcctcagccaataagaatgagataatagaggttcaaaggctttgaaaacacaagaggcacataattcagtgtttttgttattatcatttgaggcctctagacttctgaagaagctacttctggtctgtgagaacttcatgaaggtggaattacttgacttcagtaaaggcccccccccccccccgcaaatgaaaaccttgattaaaaagtttaaaaattcaaaaggaatggtgaagatagggaaggactgagaatgaattattaagaggttggaaatttcagagccttcctttttgaagaagctggctgagttccaaaagaaatccaagtcctgaatttctattacttctaacaaactgcattagcatgttaccaacacttatwaactgacttaaaagaagactagggcattaaattaaaaagtaagccatgagactattaccaaaataaaaggaaagcaagagggatttgcctttgtccttgttcagagaaactgaaarcaaacttggattgcattaacagaagtatctgttctaccaactgcaaaagtgccaaaggagatcatataggtccccaactctgtcatgagtccttccaggtgaacagagaccttgttaaattaaggcaatcacattcagcctcccaagaagggagcctataaaactgagaagccaaagctaatccagtcctttcccattctaattaaagaggctkaagggcttgtctcacctaacactgtctcatcttcatgccacttcctcaaataaaggagtcagtgagaagttaccaattcacatggtaaataacaaactctcctgagttttttggataatcaaatgagttttcctttgttcattccatccctccccatttggaatttagatggaagaatgtctaagtcgatgaaaatccaactaaagaaacattggcctctttgtggaggaatctcacatttaagtacaaaaaaaattaagcgtttaggggaagaaagttcaaagacttttgcttcctttgttcttttaaatattttatttggagttcggcattacagtcaggacaacctacagtaagaaaaccaggctttcgtataaaagttactgaaaggtgctatacaccaacatacttttatatctaccatatttttatattctttatatctttcattttaaaatatttatttggtgtggcaggtttatggtagctttttatygtcctctttttgcttggccatattttatataataaacaggaactggttttataatagaagtatttgaagacaaagaataagatttgatgccatgagatctttctttcttttaaatccaaatagttaagcagatcaacctatgaagagcgagaagccaaaggagatgtttcatgataaggtaactagatggtatttttccattagctgcttgacctctttmacgtgacaccagtgtgttttcctggataaaattacaatcccagatattcagacgttcagattcatattttccatcttagcccacgaaagctttactttggggattttgcagaaaattctggcttgtgtttcagtcatttgccttttctctgtggaagccagcaggaaacagtagcagatcctgacaatccccagacgtcccagggaaagtgcaaagaggctcggcattaattgattaagaggttctttcaaagcgcaacttctctctaaaactactcactttaaatcatgagactagctgcaaactgcaatatttataagagacataaatattgaagaacacagtgacactctcctaggagcaggaactagaagtggaaagagcagtgttccacgtagactcagtaagacttggaagctgatcgtatctattcattcactcaagaaaatattggctaagcgtctcctgtgggctggcactctcctaagccctggaacaggagtgaacaagggagacaaagccccacctgtcatggagctgacatcctagtgaggtgaggcaggtagtaaacagacagataattaatatatatcaggtggtgaccgaaagctaagaaaaataagaggacaatgagtaactgcggatgctatttatgtcaagaatcaaaagtttgttctgaggcaggtgttctctatatggggtccacagatccccacaaaaagttcaygggtaaattacagaggatctctgaatgatagtggcaaaaaatacatcatagttttaccaacttaaagtttgcaaatgttcgtktttgaatgtaggcaacaaacagtggcaatattaacagtacctgtcatgccaccaatagaactcataaattttttttaatttttatttttattattatactttaagttctagggtacatgtgcacaatgtgcaggtttgttacatatgtatacatgtgccatgttggtgtgctgcacccgttaactcatcatttacattaggtatatctcctaatgctatccctcccccctccccccaccccacgacaggccccggtgtgtgatgttccccaccctgtgtccaagtgttctcattgttcaattcccacctatagaattcatagatattttatatcaactgttactggagatgtctcaatcattcatactaacataattcttggatcaatgtcatggtagatattagacccattgagaaatcttgtcattcaatacattgaacaagcatatatgttacttatcacaactttgtagtattttgataaataattcaatggattaggtctcctttataatcctgtttattatatacatttaagcatattgccctgaaaagtgaatccttagactacatcaaactgctaggaggtcagtagcagaagtgctttatgcaaacttcccatacttcttcacacaatattaaaaatatgagtactcaggggttgacgtttagaacaataaataatttttactgctccatcaagaacatccttaagataaactggtgtttttattgtcgtragtatggtggtgaagaataccatgacctgtggaacagtttggtccaccgtctgcattcttgtgaatgagccacctgtttatgatcatagccttgctccatccacacaaatgtcaacaccatcaacaggcaaagaacaccttaggattcttatgaaaaccagttggttcttgtggaccscttaaagagttttagagtcccgaggccgatcgcggtggctcacgcctgtaatcccagcactttgagaggccgaggcgggcagatcacgaggtcaggagatcgagaccatcctggccaacacggtgaaaccccgtctctactaaaaatacaaaaaaaattagccgggcgttgaggcaggagaatggggtgaacccgaggggcggagcttgcagtgagccgagatcgcgccactgcactccagcctgggcgagagagtgagattacgtctcaaaacaaaaaacaaaaaacaaaaacagttttagagtcctgccgggggtctgtggacctcactttgagaaccactgtgctagattaaatggcaaatacagattcctttaagcatttggaccacccagaggactctatttgcatgaaaacttggttgtggttgtagttttgctgtccaactctctgaaattgaagttttaaccaagcgtttaaggtagaattttaaaaatctcagtagaaaataatcttctgttgacttttcttcatggccccagagacctagcatgagaatacaggtcaggaaatacattttacagcaggagcatatggatggcccctgctcaaggaaagaaataaccaatacttgagggaatcttaacctcttttgtgtcatgaacctctttagcagtctagtgaagtctacagacctcttctcagaatgtttttaaatgcatatcataaaatacttaggattacaaagaaaacaaattatactgaaatacatttctatccacagacccctttgggcggctcagcattcaaggctaataaccacttgcttccttcaatcccaactggcaaggaggagcaccaaaggaggtgacatttgtttcttagtgcatttgtttctaggtcagttaacatcttaaatgcccaaattctgaatgtcagtaagttcgatttctacrtctaaacaaggccagggcaagaaagtggaataagaagaatgagtttctcctgagccttccatcagacctagtggcacaggtcatcagctaaatacacaatcttcctaaaggagggtgaccctgggctgggggccaggaagatcttgggcaccatctgcataatagtctagtaccgttgagaattctccagtgggagtttccaaaagtttggttactctttttgaaaaaaaaaaattgttttatattgaaactttatttttctctgttttttaaaccaaactagcatccttagacttattatacttggagaaactgtctagaacttagtgctaaaagttaaggataaaagaatttagagacttgtgtgacttactaaaggataaaaccaataacaagctgatactgtttgtatatttgtccccacccaaatctcattttgaattgtaatccccagtattggaggtggggcctggtgggaagtgatcagakcattgacgcaaatttttcatgaatggtttagcagcgactccttggtgctgacctcatgatagtgagtgagttctcaggagatctggccatttaaaagtgtgtggcccctcctcccctgagcctcacttgctcctgcttttgccatgtgatgtggctgctcccacttcaccttctgccatgattggaagcttgctgaggcctccctagaagctgagcagatgccagcaccatgcttcctgcacagcctgcagatcactgggtcagttaaacctcttttccttataaattacccagtcttgaatatttctttccttttttttttttttttttttttttttttgttgagacagaatctcactctgtcacccaggctggaatgcagtggcatgatcttggctcactgcaacctctgcctcccaagttcaagcgattcttgtgcctcagcctcccaacaacctgggactacaggcatgcaccagcacgctggctaattttttttgtatttttggtagagacaaggttttgccatgttggccaagctgatctcgaacttctggcctcaagtgatccacttgcctcagcctcccaaaatgctgggattacaggtgtgagccactgtgcctggcctcagatatttatagcaatgcaagagtgggctagtaaacaaccccatagtaaaagtttctacattcttggtggaatggttataaattaatgaaaaacaatttattcactttaataggagaaaatgttggttctgatagtggaaaactgctgataatccaaagagcctctctgtttaatcttagaattaatgaaagtattctagcatcatggtctcctctgattgtgttttttgggggactaatattgaagtgagttcttattctctgattcaagggtaaggaggtcagttggtcacttgaaactattccaagactgggaagacaacctgtgattttaaatttgccacaaataatccaccaggcggatattcacctcttcgctagtcaagagtttcactgtggtctttacagtcctactttgtttcctcataaaggaaagcacactctctaagaccccacagcttttctttctgtccccmccaccaggctcttttcctttttcccgttttccttgccctgctcactgcagtttctctttcagggccaagatgaatcctcaagtccttgcatttccaggaccacttcatccaatgttgctgaacccttcatagcccttaatctatagattcaaaactcaaagtgcctgttcaccccttacctctgcagaatgctatcttgtagtctgtaaagcattttcacatattttttctttaatccccatagccatcctgtaaaagaatttgtcctatccttatcttgtgtgtgtgtgtgtgagacagagtctcactctgtcgcacaagctggagtgcagtggggcgatctyggctcactgcaacctccgcctcccgggttcaagctattctygtacctcagcttcccaagtasctggaattataggcacgcaccaccacacttggctaatttttgtatttttagcagagttggggttttgccattggccaggctggtctcgaactcctggcctcaagtgatccgcccgcctcggcctcccaaagtgctgggattccaggcatgagccgctgcgcccagcctcggtcctgttcttattttagaggtaagaaacctgatgctcaaaaagatggagtgcttcacccattgtgactcagcagctagcacagaagcaagacccaaacccagatcatctgatggctaagccagggttttcttctctatttcacagatatcttctgtgttctagtcgcattacaaactctacttgttccttatctactagcattattcttgccagaaacatagtacagcaggttataaaatcttattttgaagtggctatgactaaagacagtggggcataaaccagttacctgtgggtcacatgtgacttgccgaygtgttttgtttcatatatgggttttgttgttgtttgtagtaccaacatttaagaattgagagatctcacacaaagatccaaattcaaatttctagcttctcttgacaggtgagaatattgggcaaccctgggacaaattttgtgtggcagagactggctggagctgaacagcatctgccccctggagacagggcgtgtgcattcctagtttgccctgcgtttctccacccctcagtatctgcaggcacagggccctattcatgcattcacatgacctggcaggcacctgtgggcattggtaattgctgtcccagctctggagcctgtattcagcagggggtgggggcagagtggggacagactgcacacaacacrgtgcccagcagatgttgggaacccagtaagagcagcgttgaaggatgctacattcactgagtgttataccttgagtgttgaaagtgctgagatcgccatagagaattgattcttccactctctggctttgaaaactgttcatgataagaaagaggaagagaaagagcccctcctaaatattatatgtttaatcaggtttgttatggttatygttgtttctgagacaggatctcactctgtcaccaggctggagtgcagtggcatgatcttggctcactgcagcctctgcctcccaggttcaagygattctcctccctcagcctcccaagtagctgggactacaggcacttgccaccatgcccagctaatttttgtatttttagtaaagatggggttttgccatgttggccaagctggtcttgaactcctgacctcaggtgatctgcctgccccggcttcccaaagtgctgggattacaggcacaagccaccacacctgccctgtttaatcagtttttcaccaggaagactgcttttcctcctacagactctttctcttgtgtgtctaaatgataaatatagttctacatttaccctgtggaattgatctcttcatcatcagagtaattaacatattttaacttgagtgtatatttgcttttctttggctttggttctcaacttgaggaaagatagatctgggaaattctgttttagtagttcttcatttcagtacttatgtgtgtagaagttattctagtgacttgaattttttgtgtgtttatacagccttggtctgattcatgggtagttaacctaaaaaggggagggaatatcaataagagaaaggaaagagtaataagagaaaaaaatgctattataacacagcctttattttttatgtttttaattagaatttttattttagattcaggttgtatatgtggaggtttgttgcaagggtgtattgcatgtgtttgagcttctgttgatcttggcaccagataatgaacatagtacccagtaggaaggcttgcagcctttgctgtctccctccctgcttttggagtccccgtgtctgttctcatcttcagaggatatgaactggggtttatgttggttcactaaatgtatawatcctaagatgtacctgcatataataaaaatagggaacattctataagaaagctgtgagagaaatctcaaataccagcataataaaggggcttgatttcgtagctttttttcttggattccatgtagtcatgttttattttagaagagaaagaatccaggaagcaggaccaatgaaagggtcagaaatgagatctctaagcaaacttaggatggaaaattataaaggtctgaggattcataaagaacctgacccactgaaaacacagtccaagaagctttagagtgagacagatggaaaatgaatgagtgaatgaatggatgaatgaaaaaatgaattagaaaaagggaaaatgaaggcaggaaaaaattgagcttccttacagaatgttctctaatatttttattatatgcakstayrtyttaggatatatacatttagtgaaccaacataaacccyrgttcatatcctctgaagatgagaacagacactggggaacacactatactaayagtcatttattttttctgggatttttttgtttgctttttataacattatggaaaattttaaatactcacaaaagagaatagtccagtgaagctccatttcacagacaattcttagtcactcatgatactaggatcttgagaaaccgaagttccctgttaatttaaaataattattttatttaggttcagcatctctttattgaacttattacgagtccttaatgaccttctaagtcaggatcatggagcacagaaaggagaagctgtgggctggcctaaaaaataatccacaaacatgctgtttataccctggataaccagaggttgaaagtgtgacttttgtggtttgttttgcgttcttaagccaaaactattagactattgcatgtgaaagaaaacgaaattctgaacctcttcagctaagaaggcaaaatcatcaaaattctgaggctaagacagtttctgtggcttttcaaaacttgtgtggcccaaaggggccataaataacttttatggtataaatcccttaaagaacattcttggtttctcaggaattcctgccattcttacagtcacaaagcttcattttggctgggaagatgtttgagcttgagttttctgttcagtactgcctccaggaagtactaaactgtggagacgtggactatgctgtgggcttcttataacaggtgaaatgaacagatttgaggtgaatgattcttttgtctccacctcataattcaacttttcaccaaaatctgccgtattccttctgatctctggcctacgttttataaacaccttttccttctggtattacatgcagagcacaaaaaagttaaaatatatttccatgattattttaagcttgagaatagcaaaattgtagcccccataggatgcactggcagtgcattcatataatatcacactgcccctcctagagaaaactcacaatggtgatctctccattttctgtgtggctaagtagcgggtagggatgcgggcccatccataaacccgacctcctgcttattttaagagtttcatcagcatctcaagatgagtcaatattagaaggatagatagtcccattgactgtatgcttcagaatataatcagcgcagccccttataggccgaggctgctgccatgtatgtgctggtctgaatgcagcaagcagcatagcactgcagcccaggtggctggtgcatgcctggttaaccaaggcagcacttgcagcactcacagcagtcagccagtggcagagatccagccatgtggctccttctgggctgtagagatgagaatcacagacaaccaagatgcaaaatcccgaagtcattattcctctgagtggagcccgcatctggaatgcaccttttccagcagggagtagtttataggtcatataatgtcatttcagtcatgcagatatctagcaagaaaaagtatcaacaatgatatatctttatctatatgawcacttaagtactttttgttcaaaatttaatggtacttgtattctggactttactggtgaaatttttatgatgttgtttattgaaaaacagtagtatcatctgaaatctttcattagacacccagacttccatggtgatttgctaggcatagcataattcaaataaaaatttcattatcttcaaagaccacttttagaaactataatagaacacctatctggcactgggtggataccgtaatacagagaagcaaatcttctaggttagaatataattctgatacagaatatgtagaacaaagattataactttttatattcatggcatacttcaaatattggaacttttggcaacatgcaacactaataatagactcaaagcaacaccattaagacaaastcactgctatgatgtaacagtgtctcacagggtctgtaagaagaaccctcaggaataatgctgtttgatgtctgacttaaactgtgcattgtcctttaccctctgacatatagagcaaaaatgattacgtttctctaaacatgtgaccttgctttggcacagacttgacatcttactcaacttctttcctctaactttgcaagtttcactccttacatcccaggttatccatgcctctacactcagcatttcctctgatagaccttcctgtagcaaagaagcatgaatagcccatacagggctcccaatcaagatggtatactgagttcacactctcttgaccccaaatatattgtaatgattgatagaatataaaaagaggaaatccaaaggatttaccagctttattataaaataagaacatcctcatgcatggaggaattcctgagtggtgagcaatgatgaatccacaggccagctgggctctggtccagaatccagtagtggcagccagaaataggacaaggtcaaggagactagaagtgtcctggccaacaagagggccagaccaggctcagtgctttaaaccaaggcatggggtgagaagccacacttcccctcactttccaagtaaaggaagttaaacgtagcaactgctcatcttctgcctggaactatgcccttataagaggctagagatatacagaggtggaaaaacaaaaccacaaactcacaagtaagaagtgaaccaaactatttgctcctttgtaagcaaatgtgtaatattctcattgctctcataagatgggaagtaaaactaagacctgattctggactcaggacccgggagtccggatggtagaagccacaaaaccactagaataagacagagggtgagaaggaggaagaaagagagacagggagaggagagaggcagcagagagaggaagaagacggagacagattatgaatctcctacccaaaatgagcctacagaccatacattctaaggaacatggaaaaaaaatccaataccaagaaaggcaggcagcaaaatctagtaytggaatatgaatacactccagatggctttaaggaacaacctgacaaagtctttaaaataagtgtgcctaggatgtttgaaaagacaaaagaatgaatagcttccatttaaaaagagcagaaaattgtaagagagacatgaaacaaggacatgaggatatctttaaaataattaagtaaaatgaaaaatatggttattgaagtaaaaatttaatagataagttctaagctaaataaagttaaagagaatattaattratttagaaaatagtcaagaggaattcaccaagaatggaattcagaaacagatagacagatagagcagttaagagacatggaaaaaatattgtaaagtttcaacaggcatctgataggagatccagaaaaaagagaatagaaaaatgttagggaagaaatatttgaagcaattaaaggacaaaatattcyaaaattggagatgattctttttttttttttttttgagacagagtcttgctctgtcacccaggctggggtgcagtggcatgatctcgactcactgcaagctctacctcccaggttcatgccattctcctgcgtcagcctcctgagtagctgggactgcaggcacctaccaccacgcctggctaatttttttgtatttttagtagagtcagggttttaccatgttagccaggatggtcctgatctcctgaccttggatctgcccaccttggcctcccaaagtgctgggattataggcgtaagccaccgcgcctggcctggagatgtgatccttcatactaaaagtacactgggagtactgaacagattaaacaaatttaaatattyrcacaagtattttagagtgaaactgaagatatcaaggaaaaggaagcaaagcagatgaccaatgaaggaatcatagttaggctcatagcagacttcttgtcagcaacaatagatatcagatgacagtacagtaatatcttcaaagtgttgagataaaaaaattgtgaacctggaattttatacccagctaaacaatcattccactggcctttttcagacacagagagtttcctacttactgagttcattaaaagcattattaaaagatgaattatgggggaaattaaggtacaagggcataaaaagcaacagtgaacagagctgttgagtaaaacaatgttagtaaaatgagttgaatattaagtgttaaaagttgtttgtatgttaaaaaaagattacaattaggcaactttaaaaaggtgagtggtgtttaatggataaagttgctaaaattcatctccgatttggaggaatataagaaaaccaaattacttcatgctttattagaaaaaatttaatcaagtttgaatgttaaaaaaaatttaatgacttttccatttacttatctttctcatcatctatttacaaatgaatttttaaaattctttgcccttcctcagactctctcagtaatgaaagtatcttaagctcctttgttatttttattttcttaaattgtaagagtcatccatgtgtttgaaaaaaaatcttacaatgttaaaaaaaaaatgtaagggtaaaatgtaatccttagattctaaagcagtagaggacagggaagggatattattaaaaactctattaaaccaacagaagacatgaaaagaaaaaagatgcaggaaaaaaagaatagcaaattttaaaaaacgcaatgtaaggtgcagaaattaagtattttaatctcactaaaagtaaatgattaaattaatttattaaaaatagaaaggttcatttactaaaagtagaggctgaaaataatgagactggagagagttaccagttaaaaactaaataaatttagtgtaggaataataacatgatacatttttatttttactttttatgtatttatttatttattttttgagatggtgtctcactctgtcacccaggctggagtgcagtggcgcaatctcagctcactgcaacctccgcctcccgggttcaagcaattctcctgtctcagcctctcgagtagctgggactacaggcacagaccaccacgcccagctaatttttgtatttttactagaggtggggtttcaccatattagtcaggctggtctcgaactcctgacctcaggtaatccacctgcctcagcatcccaaagtgctgggattacaggcgtgagccactgcgcctggccgtatgacacattttaatataaggcaaaggcattaattttaaaaaatcataaaaataatgagaactaccaagaagatattctatataagtattagcatagttacatattataaactacaaataaaggaaaatcaatccagttattcattggtcgcttaaagccagagtgcttactgtgatgccttatgtacagtagatgccttaattcataatgtaattaaagaatcttggcattcattggttggagattccagyttgaattgttkaaacacaatgagtgaatcattttgaactaccctaaattaagaatctctgaaataaaattgcagtagaccatatcgtggcatgatagaactatggccaatggaactatgcctttatacaaggcctttaaactgtattagaatagtatggttgaaaacttaaagttagaatcccaaatgaagtttaccttgcatttcatttctaatcaatggcattaaagataataatagctctctcccacccctttttcctcagtattcaactaaccactggattcagtccttataatttatgattatgtaaaatttatgccccaaaatttttgccaaaatattttaacgtcattttgatgtccaatttggtaaaaaacaaaacaaaaaaaaaaaacattaaggcacctagtagttttataaataattcccaatggggctaacctctgctgaaagacattctttgtgctaaggtttctgacatcatagacagaaggaaaatgattgttagccaaaaacactataatggtgagaattagtgactgataatgtattccacttttaccttcgaaaatgtttgtacaaaactgggttgggcccagtggttttgcactaaaatctgtagacttttattcgcctaataaaatgaccacataacctggcaaaattctgcgtatttggcagctcttcctgccccggaggctggaagagcattgaatctgcaggtgtggcttttagaaggttcagagagtggaattagggaagccagcccagcaccccacctgtgtgccttcctgagggccaggctggygtccccagcatttaatagacgygcagggcctctattcattcccaatagataatgacaaccaaaataatcaaggaattgacaygctttgctggaaatgcctgataatgacattatagaccgaattacagcaacttaaatttctttctagcaaatgatgccatgttttttaaaagatacttttggcacttagaaaayagatcatagtatttaatgctattgaatatagtatttaatgtatttaatataatattgaatatagtatttaatagaacatagtatttaatgctattgtacacacgaaaaacctactcttccccttgttaacttggatgaggtagctccctcttttctttgaaggtaaagtgggcagaggaatagaattgtcaacagctggactgcagaagggagaggaagaagaaaaaggttttctcacatttttgttttttccacaaggtgctctttaatcttgggagccagcagtcatgacccagttattgagatcagacttcctggacctgcttatatagagaagtggggagcagtgtaagagccggatgtccacactgaggcagacagaacagagagtggtagtgggcaagttgaagcagcaatgacatgatgaagggcccatggtgccccaggaaggggccccaaatccaggagtaggtaacataaaagttcacgctaataaccggacctggtgactggcttgatattcacaagcaagactctattccactggaggtagtacctagtgaaagcaaatcagaccacactcttatagaatctagatgaaccaggagtactgagcaagcttgtaagacagaggctcagatacaggcagcaaaacatggcttcagttaagaaatggagaaccaggtgggcccgaatctcagaaacaaggaagaagtacaatgggcagaactagggcacaggaatagggtcatgctagctgatcacgtgccttttgtgtgtgtgagagagacagagtrtcactctgttgcccaggccggaatgcagtggtgcgatcacagctcactgcagccttgacctccagggtcaagtgatcctcccatttcaacctcctgagtagctgggactacagtaggcatgaaccactatacctccagctgatttttttttttttaacttttttgtagagacaactttttgttgcccaggctggtgatcagatgtcttgagtctcagcatgctggcctagagcaatgattctcagatctagaacctttgtatcaaatgaagccttacagagaacccaatatgtaaacccaggcgaagcagagctcttctggcttgggtagggcaggaggtcttggagccctgcccatccagcacctccccaacagaccctctgtgtatgttgacgtttccttttactgggaactccttacatccctctcttctgggtccaggatcagccatagaattggagagggttgagcggccctggctstagaggaaagaagactccagaagctggagaagaattcgggatctgacaggaagttcaaggtgacctctgggagccttctgagaagaaaaagggcatgcaacctcagcagtgtctctctgcctctcaccaaattgacagtgggcccgaactttgctcatttaatgagatagaattagtaaagtctccagtgtacttttcattccttccacaagcttttaccgaataaaatgattggtactcagtaaaggttagtcccttccttcttctctccctccctctctccaccaccattagacctcatttcttaaaggactgatttccactaaaatgcaagtatttcttggaagcacattgagcttgataacttatttatttattcttctgtgtgcattaatttatgaactcatttccaccagacacctagctgagagccatgtttgatggatgggaatcagagaagaaagccagagagagccccagatgactgagggatgaaaggccctcaagagactggggaaaggcagtaatgacaaggttcacactaacacaatcacacccaggacagcggcagatttgaagagggagcagtgcagacctgagggtggctgaagagggttgcctcaaggagggtccccactgtggccaaagaggtccttgtaactaactgaaaacaattggacaggaccaccacctgcagtccactcacagtgggcgtttcttgcactcatcctataccatattttatgaattttattttaagttccaggatacctgtgcaggacrtgcagttttgttacatagggaaacatgtgccatggtggtttgctgcacccatcaacccatcacctaggtattaagcccaacatgcattagctatttatcttgatgctctccctcccccaaycccactgacacgccccagtatgtgttcccctccctatgtccatgtgttctcattgttcagctcccacttataagtgagaacatgtagtgtttggttttctgttcctgtgttaatttgttagtttgctgttaggatagtggcttccagctttatccatgtccctgcaaaggacatgatcttgttcctttttatggctgtatagtattccatggtatatatgtaccatattttctttatccagtctatcaccaatgggcatttgggctgattctgtgtccttgctattatgaatagtgctgcagtgaacatttgcatgcatatatctttatagtaaaatgatttatcttcctttgagtatatacccagtaatgggattgctgggtcaaatggtatttctggttgtagatctttgaggaatcaccacactgtcttccacaatggttgaactaatttacattcccaccaacagtgcaaaatgttcctatttctccacagcctcgccagcaactgttgtttcttgactttttaataatcgccattctgactggtgtgagatggtatatcattgtggtttttatttctatgccataaatattgaactgatcttccattttgcatttttcccactttccataaccacagagtcaacatcgtctctgtcttggtatgttatgctcatttattatcttctgtctgtagttgacaggtttttctgaatgattttaggaacttcaagttccagtagagagaatgaatgaatgacttctcttaactggacttctatcacaaaatcatggctaacttcatgcattyaactactgttttttaaacattccaaaaagtgatcaagacgtcattccaggcaagctttttttttttttttttttttgagatggagtctcactctgttgcccaggctggagtgcagtggtgtggtcttggctcactgtaacctccacctcccaggttcaagcgattctcctgcctcagcctcctgagtagctgggattacaggtgcacaccaccacacccgaccaatttttttttttttttttttgagatggagtctcattcttttgcccaggctggagtgcagtggtgcaatctcggctcactgcaagctctgccttctgggttcacaccattctcctgcctcagcctcctgagtagctgggactacaggygccygctaccacacccagctaattttttgtattttttttttttttttttagtagagacrgggtttcaccatggtctcgatctcctgacctcatgatccgcccrtctcggcctcccaaagtgctgggattacaggcgtgagccaccgcgcctggccttttttttgtatttttagtagagacggggtttcaccatgttggccagactagtcttgaactcctgacctcaggtgatccacctgcctcggcctcccaaaatgctgggattacaggcrtgagccaccgcgcccgacctccaggcaaacatttaagacagggggtttttttttggctgtaagaaagagatgccaatctgtccctactcctaaggagcaaaggagcctgaaaaaccaagaggccagttgcttcctcttgctgtcttacatttttgtatttcatttttctttctaaggtgcagtgagagcccagatctatttgtttagtctgtttcttcccatgttgctcatactcacaaatttctatttaaacttgcctcctggcttctttaagagataaactgttgctgcagtacggttagggtaaggaaattaccttacttaacagctggtaagtcaccagctgttgctgctggttatggtgccttgctgtgcagtcygtgagctaacttatttagtgagagattttcctgccaatttgctatarccttgagggagaaaaactgaaatctcccacagaggcaggaatttattttgcaaaaaatgaggcatttttaatatttgtagacattttaacatgtgaaaatgttgcattaatgtttgagtcaaaagataagattccattttgaagttacagggatttgcaatcagtatttctaaggtcttagatgtttgccattaagttttcctttgcattgattttatttcmgtttctccatctgtacatgattcatggtgtatgtgcttgaggtgggtggaactcgcccttgttggacaattttcagcataagaaggcaagtgggcagcacttaattctctcctaacccttaagatgataataaggacatgttaaagggtgagacacgcaacagtgagcagaaaaacaaggttgaaacccttgtacctgggagaaggcatacaatgttggtaactgataaagttgggccaggaagccacagtctagagtgcatttggaggagaaaatacagckgaataagactccaggtttatttggaaatgccagggacgatggataaagcaagaggctgacagcagaaggatgaactggagatgtctatatggaagagaagmcctttatttcatccctacctgggaaagcccagcacccagcagccgtctattgggtgaaaaattgattcattcccaaagtatttgaatgtttcctgagaaaagacctcccaacctggccattaaataatcaccagcaggatggtgcagcccactggttataaacgctaccaatgtcagcacagctctccatcagtttttcctgactcatcattaaatatgaatggacaagaaaacatccatagctatttgaagaaagactgcaccttaaaagacaggggctaaaataagcaaatggaaacaataatcctaagggagacaaatttcaggaaaaagaataaagctttaagagggagctttacttagtttcctcagagagattggagaaaatgttgcatccatacatagagcaggatgctgtaagaagaaaatcagcatgcatcaagaaagaacgcttagacattaaaatatgattgtcatgatcaaaaattcagtggaaggacatggaagatcaaaaaatctcttagaagagcaaaaagrcagagtaagaaaagatgaaagagtaacgattataaaagatcattcaagtttcaaaagccaattggaaaactagaattaaagaatgcagaaaatgaaggagagaagattatttaaacacatacacacacacacagaaaccaatatcttaagcctgaaagacatgagtccccagattaaaagggcctgctaagtgttcagcacaatgctaggtctaccatgtgagatttcagaaaatcagggttagagagagaaatgttaaagagcacacaatcttctctgatgttaaaacacacacacacacacacayacatasacagacacacatcacctgcaagttattgagaacattattagcaacaaattccttgtaagctagaaaacagcaaagcaaaaagtwacttgaggaattacttcagcaaaacgagggagtaaaacaagcaagtcagacatagaatccagctaaatgggattcttaacctctgagggacacaactgagaggcagagaggcatagaacaagagacagttgctttcattataccttttktcttttttttttttgacatgtacatattactttgacaaacatttttgaatttttttcaatagcacatatacatcaaataagattttaagaccaaaatagaaaaaggggaaaatcctttattctaccatcttagatccaatcatttaaatttttttaaatttattttcttcccatctatctttaaaatataagtttttttwaaaaaaaaactagggttgtagtcatattatatatatataattttatccygactttctcagataagcatttttcctatagttacatattctttgtaaacattttaaatgactgcagttatttacaatgacatgtactacaagttccctaatctctataactgaattggaatgtaactatgataaatattttgttatagaaatagaagcaaccagtttgtctgttagccagtttgactccatcaggatgtgttatttttatttggttaggctccacgtgttttccagactctctgtgagaccattgtagttgtgggctccacatctctgaaaagcatcaaaaccccttgaacctcaaagaccgcggttccttgtttgagtgacactgtgttaaccagaagaagtgcagggatatttctgggggagaggcactacagcttccacagggtcctgcccacaggcatctcaaatgcttagtaaactttgctgtagttcattgaaaagagcctaccaaaaatctaatgaaaactgagctggatactagattggtcttcatcttataatggaacatttcagcataaaactgtgactatttcggccgggtccagtggctcatgcctgtagtctcagcactttgggaggctgaggcgggcagatcacgaggtcaggagttcaagaccagcctgaccaacatggtgaaaacctatctctactaaaaatacaaaaattagccgggtgtggtgacacgtgcctgtaatcccaactactcaggaggctgaggcaggagaatcgcttaatctgggaggcagaggttgcagtgagccgagatcgcgcctctgcactgcagcctgggagacagagcaagactccgtctcaaccaaaaaaaaaaaaaaaaaaaaaaaactgtgactatttatttgtctttagttcaatgcaatagaaactggaaactcacactcttggaatccaaatgaatgacttcaaaaaatgtttggtctcttgtgtccgtaagtgtttcagtttcagaatttaagagctccactggactagcgctcccaatgagttaaggatattcgctaaaataaatgtagatatgccgccataaaaatgaatgagatcctgtcatttgcaatgacgtggaggtcatgttgaatggaactggaggtcattatgttaaatgaaataagtcaggtacagaaagacaaattttgcaagttctcatttatttgtgggagctaaaaattaagataattgaactcatggagatagagtagaagattggttgccagagactggaaagggtaatggcrgtggcggggagaagtggggaggattaaggggtacaaaaacatagttggacagaattaataagacctagtatttgctagcacaacagtgtgactctggtcaaaaataatttaattgtccattttaaaataattaaaagtatataattggattgtttgtaatacaaagaataaatgtttgaggtgatagataacccccaaaaaagcatgtatgctgacaattccaaagacatttctatttttgggggaggccaaggagggtggatcccctgaggtcaggagttcgagaccagcctggctaacatggcaaaacgctgtctctactaaaaatacaaaaactagccgggtgtgggtggcatgtgcctgtagttccagctactcaggaggctgaggcaggagaattgcttgaacctgggaggcagaggttacagcgagccgagatcgtgccactgcactccagcctgggcgacagagcgagacttcatctcaaaaaacaaacaaacaaaaaggcatttccayttttattttcccaataattttaaagccagtttgtttattaaggatttacttaactcatatgaaaaagaaacgaaataattaaagtaaagttggcattatgtctcacttatccagaaattctttatctgccatcctgccatcagacacatagccatraactcagaagtagtgtaaaggaccagaaagccactacggtagrtgccacagatattaaatatccaacatcgcaagctgtgcttacaacagggagagcaacgtgcttctctgcctgatgctgatgcttcctggatggctgtattgagaattccgaaggacacttcccatctcaactagagtgtgtcatcagtgattcatgctagacatgagcatggaatgggagaatgatggtatctggccatctgccactttcmaatccattaagcctcactaaaaagtcttgtttgactcctctggttctggctcagatttttttacaaggttggaaaaaagccttttacaaggaagagtgtatgaggcaataaaagttaacttagaccacatccattccatttaacccattaaacttgtactctgattaccgtggtccacttatgggtcaaggatttgggtactgcctcaatggtgaatgacagtcatttttctctctcccacttctaacacagccagcgtaagaaaccgtccttttccataatatccatatttttagcgtgtgaagactggctccaaaaatcaattttaagtccacattgaaaaagagctttttatatcatcgtgttacattgcgtcatgtgcagagtaagatgagctataagaagtccaaagttccacagtggtatattttgcataataccgtttgtgtttccattaaattgtattgttgttttgactgacatagcacattacatgtttctgtatttttcttcctctctgttttctctgtgagttagccagagtcactatttwaaaaaaaaaaaaaaaaaactatcagaatcaccaggaatggtgtttttgaatataagattaagtaaaaaggaatgaaatgctgaaggtataataaagatggcataatcttaacaggtgagtggcaggtaaagtaactggtataaatgatttctaatcttagcaaagggtctatgaggcaagtattattgtcctcattttaccagatgaagaagttgagcttttgagaagtgaacatttgccaaagactccacaactcacaagaggtacagccaagatttgaactgaggtttgtctgataccaaccttggtggttttctctctctgccgttcatgaaaggtgaaaaagtttaaatgataaatgcagagtaaaagccttgtattaactcgtaagttttggtatctaagaaattacagccttttctagatcttgagattataaaactattcttaaaagttggttattgtcaggcgcagtggctcacgcctgtaatcccagcactttgggaggtcaaggaaggtggatcacctgaggtcaggagttcgagtttgccgctactaaaaatacaaaaaattagccgggcatggtggtggctgcctgtaatcccaactactcgggaggctgaggcagaaaaatcatttgaacccaggaggcagaggctgcagtgagccaaaattgcgtcattgcactccagcctgggcaacaagagcgaaactctgtctcaaaaaaaaaagagaaaaaaaaagttggtaccaggtacgtccatctgcagtttcatcgactgagattatgtagctgagagaaactgaggctcagagatggcacgatttagctgaggacacccagctaattaatcttggagctaattaatcttggagctgagaccagcacccaaatctccttttcctcattcagggaactttgcatatggcctcttaaggattctgctattgaaagcagccagaaatcctgtctttgaaagccatgggccatatggacaaaactgatccatgtttcaagcatggagctgtgtaaaaacaccaataagtcttttttcagttcagtggctttcagacaaggtgctgtcttataaaaggataagtaaaatatgaatcgtctctaaattcaccttttgtgataaaattaactccacctgggaatttcttccttccaccctttctaaaattaaaactgaaatccaagagaggaagcagttgtctagttcttgatgtacagagaaataaaagagcagttttatgtctcaggcagaagcagacgagaggcctgtgggcctggcagtgcagagtgaggagaaggaggcagggctgtgaaaattcgctgacagggagggagtaggaggtgtccaggcctccagcgcagtgtctcatctctagagcaagccctcatgtgggtgaagcaagtgccgatacacagaggagcccctgcaaggtgggtgggaaggttatttcaggatgccaggagcactcaggccagcttggaagtcctttcatgggcaccatgaggaagtctgtccacttctaaaagaattctggccactcccaatgttgggagcagatctagcctaagaactagaactaggttagagtgccaggtcccagctgatggatgaggttccagacagaccccactcctggagacatttgggttccagccaacagggaagagagtatgcgatgtggcacctgagccctgtcccagggaccccatctgccagatgtggctggcagtgaatggccagcatggaaggaagcccatggtcctatctgtctccttttcctggacccaagtgagcgctagcccaggtggactggagtatgttaactctccccgccagaaacctgggcctgctattgagactaggtgaggagggaggtggcaagggagaggaagagcaaaggcatgagatgaattacctaatacacagacagctcatgaagagtgaccatcctctcagagtcaccagagtttctttcaaatgcagattcctggccctgcatatcaaatgccctggaagtctggccagggaaatcacagtttgtatcaggtgcyccattgttatccctgttgcactgtcaataggagtcctccaaggagagcaaggaagtgcagactggggcacctcyggaggctgcacacagggaggagaggtggaaggaagagctgctggctgagaagctgctgtcatcatcctgtgggggtgaagagggggtgtgggartaagggtgagagaggcctcaggaaggactctctggaactggaggcagtgactggagtttcctctgagaccagccggccctttagactcaaaagatgagagtcacccatcaccatccatctggtggaarcattacaggagcaagtggataaaagacgattttgctgtaagatcagaayggaaaaagacgagcccacaaagaaaatctagagggaggaaagcatatggtttttaaaatagtacagtttagaatacattgcaacacaaatggattaatttttgtacagtgttggcaatgaaaaggattctcatagttatctggaatgcttactcagagagatgatctcatttccctaataatgcaaaatcttgagcagcgtggggtcttatgttaagacccaatgataaaaagggctagacttggcagggaagggcactgcaggggtgcccatggtgtgtgccaagactcaggaaccagaggagcaagtcgtagatcaggtgctggcaagcaggctggcttggctaaagtcatcaatgcagtgacaatcttaaacaaaagtttgaaatccatattaaatgtttttttttcttttttaaaaaagcaatcttaccctagaagcactacatggaaggaaaaaatgaagttgcgtaatcatttagaaaatatatgtgctgagagaactttagtattaaaaggtgattgtaaaacaatgcaggataataaatcttagaccaaagataaatcatgaacaccagggcaaccaaatggtcctaggagactgaaaggcatccgtcagaacaggccactgtaagtgcagctcattggtctcatttagtttcccaggaggctgaaatgttgctcactgaaggtctcggttctgctaagagtggactgggtaggaggtgccaggagcagtttcctgcaggcccctggtcctcaggctgccaggcagcagcatccccatttattgtggttgtggccaagcagttggcagctccatgcctggggcttctcagctcatttctgcttcctctggatcttccggtccagtcatctttatttatatcctcctatagcatcaccatagatgggttgtgatgaatgccgttcatcaacctaatgggctcaaatggaactctttgaaatcccccaggatgcgtcttggtctaagaaaagaattgttaactgcacttttaaaactaggaatttatgtcttcctataaattgacctcgtgaggttatttgtggattccaatagggaagtggccttcttaggccccagtgcctcctccgccctcccctcaccagccagctgatgccctctgtctactcctatgagcccggggttgctgaggacaaaaccctggcagggtcagcaaatggaagaggtgtctgcttcctttcttgctctggagcagtgtgccttgtctctctccttctgccatttattcactcactcattcagtatctattgcactcctgctttagtccaggcagggtgctgagcactggagatgcagtgaacagtctgtgctctgagggacctacaacctaaacaaataagcacacaagtacttgctcaagggcagctctggagaagcagcaggtgccatgagagcctctgtaggaggctctggcggtctctgatgccctgctcctcctgttaatgcaggactctggggggctgactgcgtatgtgacagttctttggatgttccccatcactttactccgtccttctttgtgaaatctcgacctcagcagatgaacactgtcctggccagaatcaccctaggctctgcttctcacccagctcctggccccstccctgttgccactgctgcagagggaggccaccagggttattgggtccctcggactaaaggctcaggttccaaggggaggccaactaccagaggacaccctcaaatgtgagcagggcagggggctcagagcatcctcaaggcaaagcacaggcacccgcccgcacaagctttggtttgtttcacagtgtgtaaatctctgtacagttttctcacaataaatgtaagatgcagccgggcacagtggctcacgcctgtaatcccagctctttgggaggccgaggcgggcggatcatgaggtcaggagatggagactatcgtggctaacacggtgaaaccccatctctactaaaaatacaaaaaattagccgggtgtggtggygggcacctgtagtcccagctactcgggaggctgaggcaggagaatggcgtgaacccgggaggtggagcttccagtgagccgagatcacgccactgcagtccagcctgggggacagcaagactctgtctcaaaaaaaaaaacaaaaaaagtaagatgcrtacattgtaataaaagctaacacttcaaaaaaggaataaggaaaaattcagtatattctcatcttcctttatgccaaccaccagaaaaaactgctttsaatcgtgtgctgtgtctccttccagatccttttgtgtttatgtaaacatgttgatttttatattgtcctacatgtttatattgtcctgtagtctatactttcattcacttgaaaatttatccaagacttttcaggatagcacacacagatccttctcattytttccaggtatccagtatttcagtgtgtgaatgtaccataatttctcttaaaaccaatcccccgttcgtgaacatgtaaattctgccatattttgttgtaataaataaactcattgcagcaatgaatatccatatatacacacacacacacacacacacacacacacacacacacatctgtcagtgtcaaactcttcttagaaaggtatttcaggtctagtgtcttgcattttaatgggttttcatacacaatgagatgctcttaatcaccctcaccacatggctggacagacatatgcacccccctattcacttctcatatgttcctccctggaaactgcacctccgcctctcatggtaaactcaagtgcttgagtactctcaattgtgttttttgcagattctgtttatttccgttgaatttgttattgtaattgtgtaatttacttaattggyatataaactgaagaagtatgaggggattattgtttttaagaaaaagcataaattatatttctctcattcccaatttgaactaaaaaaattgttactagctaaacacccacacctaaacacctacacccacacatgtatatcagatacagtagcttctaccgactcataaatttcatcaaccatatttgggagttgtgtccagtcttaatctgccttgccagtatagtctctggaaaaacatcctacagctgtttggtttatttgtagattgagttatcttttctccttagaaatacctgagaatgaggcatgtcttatttagaatctctaatatgatctaccttgataaaagttggttttgagcccttctgcttacccccaccaagccatttcaagctctggtaacgccctcagaaacaccatgtccaacctcatataagagaaatggaaaacctggacgtcacaactgttgcctttgaaagtgagagggtgtctgtatataaacatcctgctactttttaagctaatatagtgttagaagtgattttacagctcctctaaaatttgcaaactcttatgagactattgtaggtacttagttgttggatgcatggatacacagagaagccctaaattcatgcaacaaacatttattaattgccaactgtatacctactaattggctggcaactggtggcgccaccacraagcacagtgggtaccactgttctcccaaggcctgtgaccaaacttaagactcggagccaccaggaagtgcagagatgcagtttactcaacagagcatgcactctctaaaatggcccagccctgtgtgtgcctggccagtggagcaggatgctgggaggcaaaaaataagttttctcatgaaatctrtgaattctcttcatcttctcaaggcgtgcctgtgtaattmaatcatgaattttacttaaactgtgtggcatttgatagagccttgcagagactacaagacatctgactgctgtattttctcttctaggatatcaatgagtgtattcttgaaaactatcccgagtgctccaaccccaggttattttacatcattccgtacttttgtggacagcatcccagatgcaggtaagggctaaagcaggstcatggcatgcacgtacgcacaacaagggcaagaaccccaccagcctggtactcggtgggaatcttttgtatccctagtctctcaaccttctggaattcagttcctgtttactattaatctttcaagataatatttgagactccaaatgtcctataaataatgaaatttaaaaatcagggtctgtagaggcctcaggagaccaccatataaagctttgtaactggaaccaaacccttgtttatacctaaaacatacttgtcactactcatcccatgttgtttgtctttctctttggataaaatgacaaaatgtcacataaaatgtgatcgtgaagaccaggagcgaacacccagcctgctcctgtacagtgactgacttaaccaacaacctgccctcgtagcatgtgtcactgggtctgagacactggaagcccacacctcaatcccatagtggatatacttagtaggcagagaagaaagtgttttataatgatcacctgtcaaccttacttgaaggcacaaccttctttagagagtgacttactcagatagtcaggacccccagggtgtgatctgcccaggtcctgcatcagcacccctgtatacttgttaagaacccccacccaatcatagtctcgtgtgtagcagcctccccagatgcttctggcgtagctatagttgaaatctactgtgctagacaaatgtcatagcctggagaagaaatggcagcaacaatgaagcattatatttgcttggtaggaaatcaacccctgctatcagaagtgacattattccccaaaggaaacattaactagagggtccttgtgtttctgaaaaggccaaaggagaactgctacttctacrccggcaacgcattcattgtacctttttgcttatgctatgatttctgcttcgtttttaggcgtattgttgttattcctgtcttgtttcatttgccataacaaaagagtttgcttatagtccaaattatagaactaggagtgttggtttttgacttcaccataagccccctgagtccaggtggcctctcccctgcccccgacccttgcctcaataacaaatacctcctggttaacatttagtgcttcaggtattgggaagatttggggctggatgactcacttgctgatcacagtgaatatctttataacaggaaacatgatttgaactccctaaagtattttttaaatcgtgtagtatttttcagatttttgaattttctaatcttggagaggtgactcatgacaccacaccttgatacacacacaatgatttttataactctttcatcatatcaccttgcacagtctttacaacaatgctttgaactaggtaagggtgatttttaccatttttcaaaagagaaccctggcttgcccaattcccccaaatgataaatgacagccaggcctggagccccactcccgggcttttctcactcgccttagtgtcagttcagagagctggcctacaaatcagctctctgatttttacaaattaggctgttttccttctgcaatctagacaaacaaaataaaacaaaacaaaaatccaaagattcctctttaactcttccaaagaataagatgattaataggcatgacctgacagctcttttgagttctacataaatactatgtcggtaagtttcatatttcaaaactcctaaattcatttaattggttcagtttggtcctcctattaaaaaaccattctactcaccccttgattagtatttgttagaacctaactgcttgtgcctgcattcattcgtccacaatacttaggcagggcctctgaattcaaggccctgggcttggcatgaagcatggatgaaagtgacagagaaggaatggtgagcagggcaggacaccagttggaaggactgggaaggccctggatggggctacatctgggctggtccttgagggaaacaggatttggacttatgcaagtgaaggtgggaggtagarggggtaaactctcagcatcttgctgcatttcaaatatgaatgtctgattttaaataaatttttatatccataaagggagcctggtgaatgggcccttgagagagcaaagctgaacgtgaatgaaaacttcctgctcgtggggattcttgaagagttggaagatgtgctgctgttactggaaagatttttacctcattacttcaagggcgtgctcagtatctacaaagacccaggtaacttcatttgtaagcaagctcttctccatgagaggtctgtgtccagggctactcaccttgaaaaggcctcaggaaataaaggagtgaaatgatctcttctgatgacaaagggcagttagttccctgggcttgcaaaggaaagttagaaccaggagctgcagatgccaaaatcttgagcttcatgttcagacataaaagcaccatgttccaaaggcttaatggctccatttctccctatggaaactgaaattggcaacattctccatcagccttgtcttgagcatgttgctggaaactgaaactggcaacattttccatcagccttgtcttgagcatgttgttggggtgggtacaaatgaatccgtgtgtgtgcacctggactccattgatggaaacatgcgtgagtatgaaagagccatccttgtgatgaattctctctggcccaacttccatttgataaaagcactctagtgtatcaaatcctgacagtggaatagatagagcagcaaattgaaaatacaattatgattttatcctaacaaaccgagtggtccccaaatagcagcaagaaatagaatgtggcaaagcaattacaagggctgcctgtggtatcatcgtaagtataattactttcagaaatccatcatttattttttcattgtcattttatccaaagagaaagacaaacaacgttgtttgttttttcctattctccttaatctactgctgtgacaacaagccttgaatacacattcagtgatctgtttattgttctgttttgttgtcctgagatggaagaaggcattctgccctgtagaaataagcagcagataggcccggtgcggtggctcatgcctataatcccagcattttgggaggccgaggcaggtggatcacctgacgtcaggagttcgagaccagcctggccaacacggagaaaccctgtctctactaaaaatacaacaattagccaggtgtgttggtgggagcctgtaattccagctactcgggaggctgaggcaggagaatcgcttgaacctgggaggtggaggttgcagtgagccaagatcgcgccactgcactccagcctaggcgacaagagcgaaacttcatctcaaaaaaaagaaagaaagaaagaaggaagcagcagatgaaagctccccaaatgcagtctgctgcctcacattccacagggttcccgaaccccacctgcatcactggtaggtcccaaggcccagggaaactggtctttgcccagagagccctggatcccgttgcacaaggtcaaggtggccctaccaccatcagggacttgctgaaggaaggtggatagttggtggaggctgccttagcctcccagctctcattagagttcaaatcccatttacctgagtggggttgtgaaactaggatttcctttgtcttttcaacaacaagccatttaaagagtttatagaattttaatgtaaagagtttgatgtgactgatttttatttctagaagacaacataaactccgttctttgtgcaaggagaggtcttatcctaaattagactcctttgaagaagaaaggtttatgttaatcattttctccttttggctttatcttgttstatggtgtgtgtgtgtgtgtgtgtgtgtgtgtgtgtgtgtgtgtgtgtgtgtggtgtggtgtggtgtgtggtgtgtgtgtgtctaatacacagtctgagataaaggrcaaactaaatcctggtgacacataagatgaacactctccataaaagatattatggcttccaactttgttactgtctgctcagtcatttgctctgagagagatcagctgctatggatgaagagaggttcacatagtgaggaactgagacctcagaccaagagccacgtgtgtgagccatcttgggagcagctactatgaccccagtcaagccttcagataactgcagccccaaccaacatgttaatggctgtctcatgagagatcccaagccaggaccacccaactaagctacccctgaatttctgaccctcagagccagtgtacgaaataaatgtatgtgtttttattttattaatattgtttattttaatgagcactctcttgtcccagcatttgggaggaggagccaacgtgagagtcctcttccagttacatcaccatccatcctgaggtctggaacacacaccattcacaggatgcaaaacccagcayaggggttgtggacctgagaacctagatgagggtatttttatcttcatgcttttgaatacagataaaccacctataaaaagcttagcccagaggacccacttagtggctcttgtcgtggtatatcatattgacttcctattttctccatttaaatatgtgtcttctcagaaattatgggcctttattccgtgatctgaaagttcgttaattcaaggagaaaagatttctgaaaaccaagttactattaactcttttaccttcagccatgatctttccacctataaattaaagattatttttccctcagagtttggcatagtaaatatctcaaagagaataaaggacatctggttttcctgtgtagtgggatgaaaggtttccataagccaggccacttggccagtccacgtggtccagctggactagcggttaaaacagtgaaacacttctatacggccttcagggtgcacctgccagcctggctgcccgtccttgttacccccgccttttccaacagtgatgtaacggaaggactaattcatggcacaagagggatcttcaggacsccgggccagtgtcacactcagtgactgttctgagttcagttcttgagtggagctggttgtcaaatactttaaatatcaccctagcataactctctcagctgccacacattatatgcccaataaaatgaacctttgagttgttgcttcagtaacttctactgtgttttgtgttctcttgggcatcttcttgtgatatgtttctatggtaacattgaagaccaagctagtccacagttcctctatcccaacaagtttccgtgtcccctgaggcagaggacaagagatcaacacacactcctggccagtttctcaatatattttagcctcagggaagacttagcacccatattgttttctcatcaccacaactgagttggtgtcaagtaggttaaagaaagaatagctgcaagtttctagttacttcaccatctcatctttgtatttttagtctaagttcatgtcttagggcatactaaaatcattactctttccctttattgaagagtttgataactgagtagattagagaacagagagaagaaaagctaaaatctaagatactgatttaagggatctagtgacccttaactcattgtagattaactaaccatctgaagagctgaattaagatgcaaaaacaccactggccatttttctttggtgtttgtcctgttattgaaaaacaaaaacaaaaaaaaaaataggagtttgctgacttctggtaactcctctctagcaatactaaaaatatgtataccagtctcattacagaagaaaaaacactaatagcaatgactctttggagagctagtaaaaatcgtaatgtctgttagtcatatgggttgtcacttatttcagattgaaatgatattcattgattctttcaaatcaatactacctgtcccaataactcaccatttagacaggttaataacctttctcaataacagcgtaactgtcttttcttctgttcctttcttgtagaaatatatgctgacatcaagtaaatttgtctcctaccaaaaatattggagaaacttagcctttagaactttttttaaacagtcattttatgttaatatttgcattttatggagacagaatagagtatctcagaagcttaggatagtaagtacttgagatgaaataaaaattagagttttagcaagatggataaccaagagaatatgcttggtatttcttccagccggtgcgcagctgctgatattaggacaagtactgtggagtgggcattcagaaaacactgctcaatcctgaccatgagtttgaattagggagcaccaaggccccagcaggtttactcggtagaagcaacctcactggttgaacatatacataattattacatatgatcacatatgtcatcttatacataattattttttattgattaatccttattatgtttgtttattacttatcaccttttaaaaatgagaaactgaggccaggtatagtgacttgcacctgtaatcctaccattttgggaagccaaggcagacagatcacttgaggctaggagtttgagactagcctgagcaacatagcaaaagctcgtctctactaaaaatacaaaaaaaaaagtccaggcgtggtggctcacacctgtaatcccagcactttgggaggccaaggtgggtggatcacgaggtcaggagttcaagaccagcctggccaacatagtgaaaccccatctctactaaaaatacaaaaaatcaactgggcatggtggcaggtgcctgtaatcccagctactctggaggctgagacaggagaattgcttgaacctgggaggcagaggttgcagtgagcagagattgcaccactgcactccagcctaggtgacagtgtgagactccatctaaaaaaaaaaaaaaaaaaamcaggcctgatggcatgtgcctgtggtcccagctactgggcaggctgaagtgggaggatcacctgagccttggggaggtcgaggctgcagtgagctatgatgatcgcacccattgcactctagcctaggtgacagagcaagaccttgtttcaaaaataaaataaaagtaaaaatgagaaactgaagccagcccagagaagttgagagaatgatccatagtcatccacaaaaatgtgtaagtaaggggcaagactcacatatttctgagcagtgaatattaatgtatttctgaacactttttctccttaactcttaaagacatgctgtgagccatcagtatttttctagtcataatttttaggagctaaaatctcagtggtggtaagggccaaaataaataagcacatgaaagacaaggaacatgtgaatatgtgtaataggaacagtcatatgagcatccctctataaacccttgacttggcaaataaccgagctgttctggttcaatagcgccacctagcatccagacatagaactctatgacctaatattaacccattaccttctcccttcctagcgacttgaaaactcatgtgtccaatccttttacyttgtgttttaaatactttccatgactagcactacattagtattcattttcaacacgtttccattacaaatgtaaacactggagccacagtagggaatttactagacttttgtgggctgccttaagaatatggtcaccaactattacaaaggaaaaatatgtaacaaattccaaacgagtgacttaaatcctaactttgaggatttaagttcatttataagctaagtgctttgtttggaatatttatacttaaatagttttataaacaatcacagagtacacatttaaatattatgctttttttttttactatgcatgaatgataaattagacctcccattagaaggatggtagtgtgctcactgatttcattgacgttgcagttttcaattttgaggatatttgctagaaaatgataacaaatatgtagaagaaaacttttaaatastatgctacagaaataattcaaattttaatccatcaataaaaatatcagcctgagttctatactaaataataaaagcttggcctatttataataaagaacagttattctttaaggaaaggacattgagttgggagttaggaggaayttctagttctttgtctgccatgggtctgcccatatgaccaggggcaaatccagttttcaagtggatggtctttaagatcttattattctaataccagtgtatcatgtagaatgttttaaggctgcttgttctgtcttttgttacttagcacaattatggggtgcttttaccccctcaaaaatattcctaggcagtccccattgccttagtaatcctcaagtttagttgtgggggtggtctccacctcttcgtgtcctctaggacaggatgaaatcctagctggagagttcctccttcagaatgtgttcttccctggagctgctgatgctcaagtgatcaagacaggggtcccaactccaactctctggtcacaatttccatccctctctcttcataacacacacacacacacctgtggagaagacagtatgtcataatgcagtcaaatgctctaccactgagttatccccccatctttttttttttttttttgagacagagtttcacttttgttgtccaggctggaatgcaatggcacgatctcggctcactgcaacctctgcctcctgggttcaggccattctcctgcctcagcttcccaagcagctgggattacaggctcccactaccatgcccagctaatttttgtatttttggtagagacgggatttcaccatgttsatcaggctggtcttgaactcctgacctcaggtgagccacctgcctcggcctccgaaagtgctgggattactggcgtgatccaccgcgcccggcctagtatgtcataatgattagagcacaggctctgagatagatagcccgcatgctagaccccctcctccacttaactgcataaccagaggcaaggtatagcccctctaagcctcagtttccccatctggataagatgcataaataatcttatgtacttcataggttcttgtgagtcttgcatgatcaatccatgtagagtccttagcccagccttactatatggtgagtgttcagtaattagcctgcccaccaagcccatcacaggagagacagggctgtccctgagagaaactggactggaggttctctttgtaacttctaggtgaaagaaagaggaaaaaattggaaggaacaaatgaaggaaatgattatccttgacctgtttcaccagttacagctgatacattacaaggaaatctcatgcctttaagaaacaatatttctgtattactgacttgggcagagaggaacgaacaattatattccagtcaatagcctgttccagaaacaattgcaaggaataagttaagtggaaatattactacagtgacatgctaaggggctggaagacacacataatccaagttaatgaggtttttatgcctgaactcttaccagaaatattagggagctaagacttttcactaaatgaaacccactgttgagacgttattggggccaactacccttaacttatgctgaatattgaattttgctgactgttatattccatgttatttaatagacatagaatgataatagagtttttttaagtaagattcctaagattcagctcttgaaaaactgttttccatgtgcagaattacgtacttcagaacactaaattaatgaattaataacctttgtccagcaggtggcgatgtctctccattttctcaagaaagtgcactaggttccctaatagactttgctctgcagacgggagtttacataacgcttgaacacagatgtacaattatgtccaatttgaggcctaaaaatgagatttttggatatgaaaaggattccaagtccaattgattgcagtagttcaaactgcactttatgaaagccagtggagactaggggaagagggtggagttttgcaatcaaataagtttatgtgagttaaaagtatatacatgtatatctaaattatatataaagtatatgtaatatataatgtatatattgtacgttatatattatatataaattatatgtaatatataatgtatatattgtatgttatatattatatataaaatatatacattatattgyatacattatattatattatwttatatatacattatatattatatatataatgtatatataatatataatgtatatattatatagatacaccactaactctggctttagttttaaaaactaacattttagaaagcctgaattaaacaaattctctctttcatttttaatttccatttttattttccacttctattgcttctgtgctgcagcaaaactcaaaaatattctggaaactcccaagtatacaatgatggttaggaggaattcagattagctatttttagaaggcaattaagttgtttttaaaaactcagttttcattgatgaaaacaggactccaatttgctattggttcatttaccatcgatattctctataaagatttttttttcaccagccatgtcccaggctcagatcctaataatgtcagcactggatcttgtgtgtgtgtgtgtgtgtgtgtgtgtgtgtgtgtgtgtgtgtgtgtgtgtgcacctacccatgttcaaacaactagactccttattatatagcactcatacatgatgcaatcatcttaagatcacaaaatcagtaagtttctaagtcataattacttgtataacaatatgcagttataaaacactttcatatagatgatctcatttgattcttacacaaatcccctgaagttgaggaagacaatttttttttctcattttctaaacaaggaaaccaaggctcaaagaggctgaacaacttgctcacagtctcgccaagtcctaagggacagcactgacattcacgcttctgtccccaggcccatcacaaaacataaatttgtgattcctctaaaactcttctttatatttaatcattaattcagaagttagtgagtactaagcattcatagtatgtattgccattaaaggcaagagcttaaaaataaaatctaggctgggcactgtggcttatacctgtaaccccagcaccttgggaggccaaggcaggaggatcacttgagcctaggaattcaagaccagcctgagcaacagcaagatcctgtttctaccaaaaaaaaaaaattaaaattaaatatatagtttatctctgtccaacgtatctgtctgttcactaagaaacatgagtttaggaatcatcatagatgattgtttttaaaaactcaattatcattgatgaaaacaggacttcaatttgctattggttcatttaccatcgatattctctataaagattttttttttcagcagccatgtcccaggctcagatcctaataatgtcagcactggatcttgtgtgtgtgttaccttaacacacacacaagatgtgttatcttaagccagtgtgttatcttaagccagtacgaggcaatacacacagaaaaaaataattttgagaatagatctgtttgacaacacctgacgtctttccagtgggggttgcggggacgtagggaatagcagtgcaaggtctttaagatagtgtctaaaaatctaagctgggctgggcatgctggctcatgcctgtaatctcaacattttgttaagccaaggcaggtggatcacaaggtcaggagttcgagaccagcctggccaacatggtgaaaccccatctctactaaaaatacaaaaattagccaggcatggcaacacatgcctgtaatcccagctactcaggaggctgaggcaggagaattgcctgaacccggaaggtggaggttgcagtgagctgagatcgagccattgcactctagcctgggccacagagcaagactcatctcaaaaaaaaaaaaaaaaaagtctaagctgaaggcatataactggttcagctgtagctactgggcaaatagttcattaaaaatgaacacataatgtaaacccctttaacttctaaacacttgtgattttttttagtgaacatttttctgaggggaactgtataaccacaggctgataacatcattcagtttacagaaacatcaccaattcacaagaattcagcctctaggcttgtttaatttactttatgaaagcttaaattgcagcataatatatgtgcgtttggcctatttcaactattactctttgttttattggaaaacatgttttactcttgcttactgatttgttcttgcgttgggatcatctctcctccaggagaaagcatttccaattttattatgaaagattaacaggaaaatagaacttccttcacagacattgatgttctaggaataactttacaaaaatatttctcttctctgaaaactaatatttaaataggtgtaatctgaaactaccagaaaaattcaacaaacacctccagcaaataaatagctgagtgtctgtgatgtccctttcctggggaagggcagtataaagatgaaaatcttgtctagctggaaggccgtcactaacagggctggggcgcataaccctgtggagacatttgtgcccggccttaaagggtgcgtaggagtttgccaagtggacgtggaaggaggcattttaataagaggaaaataacatgattggaagcgtggaggtgagaaagcatagaagcactcagagtgaggagagctggggcttgggccagcccacgtcagcccckgcctgcggacccagcctcttggagccaggctcactcaccctgcctttmagacggccctaccagaggcaggagaaggatccgcagcctcagctttctgtggcgcawcctggcactgagtcactcataccaatctcagcgccagtggccaagccgctgctgccggagggcctgtgtcaccctccccccgtttccctgccctcttcccatcctaccaccacccaagctccctggcttcctaacagtgtggcagggatcctcccaggcccccatcctcctccagcctgagttcttcctccctgctgtcttcccagtcttccccactaagatcccaccacccttcagacccgggctcacaccagctcctgctggccccatgtgcctcgcaccgaatacaggaggtcgcacactgcatccccagacaccaagtactgccctgcttgaccacctatgttcccctgggcccaccagcatggactctccttctgttaccagtcactgcctgatccaggcmtgagctgcctgtgtcccccgacatcatcctcctggcaccatcctctgctcttcctggccttcttcactgggagccwtcgggatcatccctccagatcaagttcttccagccccacctccctcccaccctgtgcacccagggaaattcatctcttctgggtcccaaccttggcctcgggagagccccagatgcccccctctgtgtctaccccagttactcagtgtggtcagacttgggggttgtacagttttctgtctcatgattcatttccccaggcaaaaagctggctaataatatctgggtgtgcgggggaggtaccagtgtgtttctgtgtttggaggtgaatttttttctactttagaatttaatcacttctactttgagcagtttttagctgagctgacagtaatatgctctgcattgagtatttgtagggggtggaattagtcaccacaaatttcaatttttggactttcctgataacgccacaaagctgaaaggcttctaaagcttgagcaaagattggaaacttgaccccaggggttgatggttgatctttataaaaacgaccttgtggtcagtttgttcttttatgcttaaattgtcaaggtccctgtccaccccrggaattaatgtggtgatgtggaaagagcactagacaaaggatttcaaaactgtctttgggcccttggctcgtggccttagctctctgacattctttgcttataaaatgtaccccctgccggggcgaagtacaatccttacccattttgcatgactcaacattttataatggaagcttctatttttgtctggctaaatctttttcaaataaaaatatttcttggtctgtatatttttcatgtctcagacatttttatcaatacataatgtcctagcttttcacatcttgcaaatggcacagaattgtgaaagaatacagcaaaaagctagaaatatacctgtgtatataacattgctggggatttttatgtgtggtttcttgtgggttctagtaagcacgttcatttcattacctacaaacgcatagaaaaatccaacataatcccacactgatgagaagaagagagggttgtttgtcaggtgggrtagtttcasttgacttgaaggtctcaccccgcccctcgtctttaccatagcatrygcttctagatgcttctgctgcattgtcaaccagactctaccagaactgtttttcaaaacatgtgttcctaggattttacctccctgcattttttgctatatctattaagtaatgcatgtatataattaaaaatcaaatagtcctataagatgtataatgaaaaccagcagtttcctattccaaccctcccaaagatgaagtctgatgttgcagagccaatcactttcagcgcagctagatgtttcttcggataatcaccgcgctatctgtaactagtatgcacaggctgctgtttcttgatttactggggtcatgatctcattctcttattccattacctttacttctacttccttgctcctctccatcttcctaagatggtcatacccacatttgagatgcatggtcctgctgacgttgctgtgactatatacattttgttggctgctgatcwgagtagtacatcatgattttgtttcatttcttgcacaacttaattgtttttcctggaattatttattgccttcatttatttgcctagatttatttgtacctatcaaaaatttcgtatgtgccaaaattttcgtatgtgccattagatctgcygcattcagtattacttttggtaytatttaaatattaattaccagataagtatgtcagttccatcccaacctgccctcccttcccgcagaggccctctcctctttccacccagagctctttaagctccatcgcagcctgccctcccttcccscagaggccctctcctctttccacccagagctctttaagctctatcccagcctgccctcccttcccccagaggccctctcctctttccaccaagaaagctcctgctcctagtatatctgggttcattactctaaacacagctttactgcagcttccctttactatgtttctcagttgggtccagttttcttaatctcggggatgctatttcttgatttaataactcattttacttcaagatgttcctaagttgcctcctcatgaaaggtgcatgggagggaaattttttttgagtcattgaaggtctgaaaagctcagtattctactctaacttgatggctagtttggttctcatattcatgctcattctctctctctctctctctctctctctctctctctctctctctctccttggattgtctctttattccttttatgaaattttacaatatgactcggtatgtgtgctaaatatttagtggatactttcaggcttaaaactcctgtcttctatttctgggaattcttaacattttgtttctttgatgattttaccaccatgttctgcttcttttctggaatgcttttagtggtcagatacttgaacctctagattcatcctttctatgcgcttcgctgttttttcctccctcaattgccatcttttgaacattttttctctggaagagttcctcaatttgtattccagccactctgttgaatcttctctttttcagcctttctttcttctttttatataacatcttgttcttgttagtgaatggatgcaatattaccttaaaagtctaaaaattatagacattggtttaagcgttttcatttattccccgctttatctctatttgctccagattcctttgtactgttttggttggtttgggctctctttttcagtctgaaggctttcctctggtgacacttgtctgtctttcgttttaagagtgaggcactaaagagctaattgcagccggacatggtggctcacacctggaatcccagcactttgggaagccaaggtgggtggatctcttgagctcaggagttcaagaccagcctggacaacatggtgaaacctgtctctacaaaaaaaaaatacaaaaattagctgggtgtgggggtgtacagtcatagtcccagctatttgagaggctgaggtgggaggatcgcttgagccccagaggcagaggttgcagggttgctgtgagccaagattgtgccactgcgcttcagcctgggtgacagagtaagaccccatctttaaaaaaaaaaagcgaagaaaagctaattgtaagtgctgtgcaatgaaggaggctcattgaccagtggacctcgcttgaggataatcaaatagcaatagaggttttgctggaaaaatatttgttagtgattgtagtttttttctctctggagtttgtccagttttcccacggaaaaattatccaaacatctgctttggggatgggagatgaagtgtggtaggagagtggagcatgcatgcaactggttgctggtgtgggaacaggcgctgaaggttctcactgaatgcaccagtttccccagtgctgggattttagcccatacctctccttcccactcctctgggttagcaaatcggtatggagcctctgcccaaactatctggagactgatcctaagattgcctgcccctggctgtggagggaactggggtcccagctgcttcatacctagactgccagcctcagacccagctctcccgtcggggacacccagtggtactccatctctgactctcagctgggtgagctgacactcccgagccatgtcccttttcgtcagcacttcagactctcttcgtctgctttgcctaatcggatgcgtgcctccaaccgcatttcatcttccagaaattggtggaggcctgccttccactgataatccttctccagcattttatccatcttttaataaaatgccatctttaataaaattatcattccttcactgtcattttagagaagtttttcaaaggacaggcattgaaggcatgtaatcagcccactacatttaactgggaatgttctaactacctgaactttaagattctgctgccagctttgtgtttaccgttcttagctagatctgtcacacacatatcttttatgcagtatctgtgtagccatgatgtgaatcaaactaccgtagcactgccttcagcatctgtatcttgggattatagtactggtaaaatttcaaaagcaaaactaacaaaaacaagatcctttaacggtaattgattaattaatcccttttgggtttttactggatgacattaccatgatgaagctccacacttaatactatgattttaaaattacctagaagacaaatcagggctgtactggaggtttcttgtgggaggaaatgtaaattataagaactgataaaaacagactcctgtgatcagaggcagagcgtatgaccatttaaagstatcattccacataacctggtggaaaaggacatcttcgtttcctgtgctgttaggtgtcagtttgggggaaacgtgttccccaggttatgcacagatggcggcacaggcatggagtgggggagtgaaggcctcggggggtgagcacagccagtctgctcatagacagaaggaaaagcagccatcgtgaaggctcgtctgccgcagctgctccggtagcaggagcagcagctcatataacaaatgtttcatgacgaatgcaaacaaaagccagctccgaaattccagccatgttatgtccaagccagttcaaaatcgtataaccactccatttgagttttttcccctctctaaatacattccatatgagccgtggtgtcagggttgctgggatcgcctgcgttcactcagaaaactgttgttaaagcccagactgaagggaaagtcaatcagtgggaaaacaaactcaaagaaaacacggaggcccaggtgtgggggagggggttttccccagccaggcaggacccctggaatgaggctggaggctggcgaacactcttccagcacagaaggaagagtgttcttgcctgggagcaggaatgtgttcagtggggcccctgtgcctgcggcggcctggccacagccaagcaccgcgactcaaagtgtggtccacggaccggtgccagtccgcaagctgcttgctaccagcccgtgacgagataagggcagaaattaagaagcagcatttggaagctttgatgggaattttacgtggctgtggtcatttttctgacaatttatttttatcgtcatttacaaaagtgtcaatctgaaatggattaggtagggaaaacaatccgaggttattggagaagcactgccgtagattttcctcccagcgtgggctgcctgggtcagcaaggtagaaggccagccagtgggcaagaccactcctaaggcatctggggcctccgaggcgccatgattcttccatagggtttggccttcttggcttcaaagctcaaacatgtgctgccccatagcaatggccagacgcccaaacctaaagagagagaaactctgtcttcctaaaactggttcctttttgacccaaaacctttaaaagtggcaatttgcatttggatagcgcttttacagttagcaaagtaccttagacttacattggttcacttgttcacatctctgttaggtagtgttgtgaatcccctaacgttacccaagaattgagaccccttcccctgcaaaatatgttgaagtcctaatcccctatatctgtgaatgagaccttatttggaagtagagactttgcagatgtaatcaagttaagatgaggtcatactagattagggtggaccctaaatccaatgacttgtgcccttaaaaggagagagagactgaggctcaaggatgaaggccagtgaagatggaggcagagactggagtgatgctgtcacaagccagggagcaccaagaatttgcagccacccctggaaactagaagaggaggaaggattctcccctcgagggaaacacaactcttccaacccatcaattctagttttcaaaactatgagagaataaacttctgttgtcttaagctacctggtttgtggcaacttgttatcataggaaactaatgcagttagaagtcctcttcctccccatttccaggggaagacctggagggtccgttcrcattcaaaatctgcccacgttcaaagcagctrtgaggagcaaaccttggattaggacaaagagccttcaaagatgaacactgtcctctggattgcctttctttgttgtagaaaggaattggggggaaaaagatgtctaatatttggggaaagctttataagtgattttacagtgatgcaatgaaatatagtgaggcggttggagttttagtttgaagaatgttaatatattggaaaacagaaaaacaatgaaaaatctgacacaatatttatatttatattatacaatatttttatgtatttgttgtatacacacacacacaatatgcttagcagaacaaactagaagggaaaataccaagagaactgcagttgttagttgtggtggtttctgcatggttttagtttctcctgtagactttcctgtgttctctgcctttcctgtaacacacgtgcattacagagagccacatgtattagggaccatccctgtccagacactatgcgctgtgatgtatatacatatttctttttcttttcatttgttttttgagatggagtttcactcttgttgcccagggtggagtacagtgacacgatcttgactcaccgcaaccttcgcctctcaggttcaagagattctcctgcctcagcctcctgagtagctgggtttacaggcatgcaccaccacgcccagctaattttgtgtttttaggagagacggggtttctccatgttggtcaggctggtctcaaactcccgaccttaggtgatccacccgcctcagcctcccaaagtgctgggattatacatgtgtatttctaatagtcacagcggcacggcaagttagatattagcattgctattctacaaaggacaaaacacagccagacagtctaaggaccatactcagggtctcatagctggtgcaaggcagagtctgtctggctccaaaccctgtgggcttcccaccacgctttgtagctttttctatttttgtgatcaaacaaaaaaaaggacgacagtgagaagggccacaactgagcagcgaggaaactgtcgctgtggccccttaagggagggcttgcttgtgctctgtcctctgtcatttgcacgaagtggaggagtcctcttttttttggcagttaactctacaggggcttcttgaagacaggggccatgacccgtcacttccatcaaaagtcgtgactggctctccttctcccatccttctctcctttctgacctcctgcctggcagagttttcagaacagcatgtaaarcatggttactcaccgagcgtgtctgggacaaatacctggacatgcctacctgggtcactgggtggcctgttcctccaccacccccagatctgaaggctggttaggcataaagataaaaattgccactgttctctttttcatacagtcctgagctcttccaactcaaacaactcaaaccttggcggtaacaaagttaagtatttaatagctttttaaataaagtactgaaactagtttgattccatttgtatatcacagtgtcaccctagcattttaattttcacttgtctcattctttctttctagtattttgatctgatttttacctgtattatttgtattttttcctgcaaaatgcctgtagatactagcaggtaagcattgtaaaaataaaattgtaggccgggcgcagtgactcacccctgtaatctcaacagtttgggaggccgggcgggcggatcacgagggcaggagttcaagaccagcctggccaacatggtaaaacaccgtctctactaaaaatacaaaaatgagccaggcatggtggtgcatgcctgtaatcccagctactcgggaggctgaggcaggattatcacttgaacccaggaggcggaggttgcagtgagtcgagaccatgccattgtactccagcctgggcaacaaaagtgaaactccttctcaattaattagttaattaattaaaataaaattgtattttgtatgtagtcagtcagtgaaagacctgcgattcagtgcattctccagcatgtggtccccctaagcacaggtgccaacaaactgaactccacggcgtggctttgtaagggctcagaaacatccaggtaaagactcccaaggcctctccttactggtttctgtttccatgatctgaatgcattttctcagccatcttactaagttgtcatagtagagacaggcactctttgccccagtgaatggattgcgtgacatcctcctccttgctgtgagatacagcctgtgcatccccgtaagaccctgggtggacctctgttatacagaaacattgcccttttaaataaaacctaaagaaagtccatgtttcccaggtcggccttgaaaaagaaatttcctgagggagaggcagctgggccatttatttaacaaacactagtgatggtgcacttactgtgggccagacagcatcatgagggctttatggatattgatgcatttaatagtcctgatctctgtgctgacttcctccttgcctgggacctcttgctagccactgctggctgcctgtgatccactccaggaggagttggaacctgctggctcactagtgggcaaagaacacctcctcttggacctccagcccagcgagctatcgctgcaacatcctgcaggagagcagagggcaaaggcatgagataggagcacaaatgcagtgaggccagtaagtgtgactggcctgttgaggttcatagccaaggaagagacctggagctgggatgttctaccttttgtccccttgtccatgccccttgctcttctggagggaasccctctcctccagggtagcccctgcacaccaggccttcagtttagtcatggagatcctttccacagtgacacagagtgttggtgacaatytctggtcatggtgaaatgcgccgctgttcagatgcctcttcatcgcttgttctctcccacaactggagaccatgaccagaacaaagagagtttctcttctgcatcctgctactccatcttcctggacagattcccccgctacatgcctgcctccaggcctccattcccacaccctagaccaccctctccatgctgaccacccttggcaccagaaccgtcctctcctaaaactcgactgtcctgtggcccactccccgaggaccctaatagatcattctagaacaaagatctagaatgatctagaatacaatatattgacagctgacaataacacaatttgtccttcccaggggaatttctaataatgagaatagtgatcacagaaatactagaacagtactttccacgtagtgggtgtacagtaaaaatgtattgaattaatactgaatgcatgtactgtgataaacattttatgtgggctacctaatgtaattatcagaataatccagtgacttaggcacttttattattcccattttacagatgaggaaactgaagtttgtatatgacgtcactattttatggggaggctccttagaaaaaaaaatcattttaggcactttttactatacatgtactgataattattttaaagagctttttttgtaggaagtatgttmttttattcatctaaatttggtgcactaaaaatacaggtgatgtgatgtgaactgttggccatttaagcaggttcattatctcacatctttggcccttcctgccattcctctcattagcagtgtgggcagagggttaaatcttggctgccgtgggatatggtgagaaaccctatttgtgggtagcttgccctggtccacactgcaccaggacctggacccaggcatagcactgcgccaccctgccacccgtggtccagcrgggccctgaggcaggtcactccacttcaaaggaaggagtcattcatggtggatgtccaggcgtggcctgtgctactaagagtgagggctttttgcaaaagagcagattttcagtagtacttttcctcctccccacaaactatgccgttcctacaacactaagtgtggcccacagcagaagttcttaacctgaagtccaccacatggttttcagggaatttttatttgatttgatatatattttttcctaaatgtgagatggggtctcaytgtgttgcccaggcttgtctcaaactcctggactcacgtgctcctctttccttggtctcccaaagtgctaggattatagacatgagccaccacacctggcctttcagggaatctttcagctgctccatcaccatccttttctttctttctttctttctttctttctttctttctttctttctttctttctttctttctttctttctttttctttctttctttctttcttyccttctttccttctttccttctttctttctttctttctttttctttctcttgtttcttttcattctttctttcttttttctggagacagggtctcactctgttacccaggctagagtgtggtggcatgatctcggctcactgcagcctcaacctcttgggaccaaattctgtcctcctgcctcagcctcccaagtagctaggaccacaggtttgtgccgccatacccacttattttgtttattttttatagaggtgaggtctcactgtgctgcccaggctgatctcaaactcttgggttcaagcattccacccaccttgacctcccaaagtgttagcataacaggtgtgaaccacgacacctggctgccatccagtttatcagaaaaaaatttcatattcctgctttttttctgggaagcaaagaattttcagattttcacaggcatccgcatcccctagracagtgagcattccagtctgtgtggaaggccagtgctgtggcctccttttctgagggctggccctaccacgggagaggaagcactctggtgggagccttgatgtggacaggcgtcatctgacggagagccaccaggaggagccactggctgctgtcagtcgggagaactggcccgaggccctgaggccggccatcttgttcagagccaggatgtggcgctggcactccaaatggtgaccaagccttttgtttatgcgggttgacttctggctctgccatgcttctatatttccacattataacataggatattgtttgcctaagtataatagggcatgtgcgttggttcctggcatcagccatggaagattagcttactttcaccaactcagaatcagtcccagtggcyatcacaaaagaccacacaactcccagagtgtctataagtagatacaaaaccacatgtgttattagtcttgatcttagaccatattattattagctttgctttggttgaaagtgggccccatcatattgttaaaatagagtttcacagcctttaagtgactagggtacatcacttttaagatgtttttccaaaagaaaatgttaaatcccaaatacatttttggctgaatagttggttttaatggttcagagtcaaaaactgtaacttaattcctagtaaaacttgaatcaatttcatgagggttttgctaaacatttccctctgttcagcctgagacttctaccagttcttaaatctcaagcaatattagcatattmttttaaaatgtcaatgttttttcatttcaaaaaaaaactcttgtcagtgtctgacttctgttgacatacagtagcttatttgtggcctccattatggtattgtggttaaagtctcccatttcccctcactctctttttccctagtatcagtgaggaaacacaatgtcaaatgacagtctgaacaactggatctgtactgctggcttcaacctcaaatgtagttcgctgcctttctacattttgcttttgagggggatgacggtcggtgggaatgttattcagatatcagcatccgtaggctgaacttaatatgaagtgtgagtggtgcccgctctgcctcattcggccatggggtttattggggaaatggcgtctgctgcatgcctgtggctccagcttaataccaccagagacaagaatgctgggcgcagctgaaaggcagtaacccatctggagagctcctaaaaaggatccaagtttgcttaataatgtgctcagtagtctaatgttttgggcacaaatagcaaaaagctcttccaataacacgtgctttggatatcagattaatctggggcaggaaacacttgcaaagtggaatccacccaagagaaaaaggccaatatgccagcatcaaagkcttagtgttttgttttgctttacaaagtgagcacatagtgagcacacattgctgaaacaatcaatgtctcaactgtatgccaaattctgtaagttgataagtaccattttttttattaggggtgtaactaatagagcactgcttttataatctagtcctactttcagattcagagagatttaggcattctgaagttaagtcccagggcagggtctttactcaaagtgtggatgtgtggacaggctttctggctataagcagtagcattagctatttggggctcagaaacccgtgcatttgaaatttgtcattttttgtgaaactgggttkttattttgagagttgctcctgtgttccttatttttccatgagttcaccttcatggtatactaaacttcatttttacttaagatgcaatgctacatagaaataaggaaaagggatttatttggtccacaaactcaatttattgtattaggttggtgcaaaagtaattgtggtttttgtcatgaaaagtaagggcaaacatatttttgagcccagatgatgtgcccaaccctgctagtcacacaaagaacagagaggacatggatggcgctcaccaggaagtgtgtgtgggtaccctgcggatctctaggcacaggcttagtaacaattctcttgtccaccacagggaggtgactggaaggtgccaggaagccccaaatgattctagttcactattgccctctcatatacagaacatctctctcctgcagttgaaagactgagcttaaagccagcaaaaatctctgagaaggagaggtggggttttaagagcaaggcaacccccttctagttctccattttctttaatcatctatgtaggattttgtgttttatttatttaaagggatgcagattactccacagtgccacaattttgccagtcacccaagtctggaagcttgaagtcctttcaattataccttaaaaaaagccatctcccagaatatctgcttagaaatgttctagatattttcccagctcaccatagagctgggaaaccatcacagaagccagattgctgaatgccaggcatgtgactgtcaacaactattgttttctggaggccacagtcaagaagtattcaatagaaaattggaaagagattttcccttcaaatccatacacagctttaatgcacttagaacatacctgtgcctggagtatatcgtgcatccctgtttatggagcctagagtcttatttggtgaacaaaatgtaagcaagaatggcttcagtcctatcctggaagtttaacaaaagcaagctcagaggcttctttctgttgggaatatgcaggtcacacacaattagtgttataagttggtcccaaaaccagtctactggccaggggtagggccaccactgcctgttagcaggccaaggagttggctgatctttgggttcctgtttcacttcagcttgttctggatcatctgctaggaagctaaaagctgctctttaacaagaaggcatcttctatctgtgaagttttcttctcctttcctgagatgtgaaaatggtatagtacataggtcaatcatggtctttgcagtcagtagacatgggtttgaatcccagctctaattcttaccagctgtttaactgtcggcaatctccttaacctctctgaatgtctgtttcttcatccgaaagcagagaatggtgacctcacaaagctgttttgaggattaatggagataatgtgcccgtgcaccgatgtacagtttccaaggcacttttctaatcatctcatttgattcttccgtttccgtctgcaatagggcagggttttcaagtgctcaacttagtcaagtttttgagtttgaaaggagagaccaacacaattgttccaaagtctctcatgatgcagattccagcattccctggtgtgatcccttgtgaagtgtggcatgaggactctactggcttcagcttttctggtggcagtagaattgcccatctagtgcctactgatctgagtggacttgacttcttggccrtgtctctgtttggagttaaagaggaacgattttccttgtgcattattttgaaaatcacctttgaagtcactagttagagttgttttcaaatgcaaatgtcgaggtcacatgaagttgagtgaccacatcctgtggcacattcccacttgctcttctagtttatttttaatacagaccaagagtaaaaatatatacacaycccatttcagatgcaaattgaagccagactttgtttctacatatctgtgaaatggagtaagctaactaatgggaaaaaagattatgcctaatacttagacatagtttgctagtagttgctaatgtcaaaataacattgagtttttaggaaaaattaaggaatgtgtacagaatgatgctgcaattatagtctttatgtctttaatgaaatagatttaggatttcattagaaatccaatagaagtaggattttccacactaaggctcattagtcagagtcaaggaaacacattttcataatcatttatggagcatttcaaaatttaaaagtccttttggctctctgaaatctaatcttatgtgttctcccaccccttggccattttgggatacttaaatgaggtcagagtttttcattaacagttcaagcccttgtgagaaattctagcccagaatttctacttgaaatgtgagcaccaaactttactttgggaacaacaacaaccaaagaaatgcaaaccaagaggacagaccatgttcatgcatgaaaatatggaatatcacaaaaatgccattttcctcacatgagcatataatttaaagtatttttttttagcttaaagtgattctcaagctcatctggaaaaaataaacaagtgacatggccagtgatctttttttaaagtaatgagaggagatttgcccaacaagattcaaaaatactagaaagctcttgggtttaaaataatggtgtaaaagcacaagctcagatagacaagtcagtgaaacagtaacagaaacagttgctaatgcaaaaggtaatgtgctctctggtaaagatcattaaaaagaaagaataaataaaggtgtaaattagttagctaaatgtttagggaaaaaatagtctccttatatcatgggccttaataaattccagatggtctaaagagttyattttttttttaatgaaaatatgaaaggaatagaggaaaatatagttgactgttttttggggggatggggttttgctaaggatttactaagcataaaagcagtaaaacacatatttatacaaggagaaagtaaagggctggcatggtggctcatgcatgtaatcctagcactttaggaggccgaggcaagtggatcacttgaggtcaggagttcgagaccagcctgaccaaaaccccatctatactaaaaaatacaaaaatcagctgggygtggtggcggatgcctgtaatcccagctactcaggacgctgaggcaggagaatcgcttgaacctggggggcagaggttgtagtgagccgagatggggccactgcattccagcctgggcaatagagtgagactgtctccaaaaaaaaaaaaaagagagagagagacacagtaaagaataaatatgtttaattgaaactttaagcatgtttaaaacatacttaagttggcaaaatatttgcaacaatgatatcatatgattatattttaccaaaacatgaagcattttttacaaatccataagaaaatcactaacagaaaacaatggagaaagagaaatacaagttaccaacaaatacactaagaaataagcccaaccacattcataatctaagaagtgcatattaaaatgagaccatattttctatgaaattattattgtctgttatgtgaacaaacactgagcagtcgtggagtccccgatgatgaggatgaagagaaatggcgcctcaggagactcctagagggagagcacattgttaacccctggggtaaagagcaagttagtgatacatcttaaaagccttcaaaatgcccatagctgcagaactgatagaaaaatcctgtaccttgattgtggtagtaggggcataggtatatatagctgtcaaaactcatcaaattgtatattaaaattgatgtgttaattaaatgtaagtgattctttgatttcttggtgaggaaataatgtttacaatctttgacccatttcaatgctagaaaaaaaaatcatacaggtacatraaaactattataaggatgttcctcacaggatagtttaccattgcacaataaaaagacaactgtaaaaatagaagaatagctaaatacattttgatataccaaaaacagttaaatgacatagctgattgcttgaaatatgatgtgacatgaagtaaaggagaaaagaatagtaaatcgtatttacaatatgataccagttttactagaaaaactacgtgagcacaggaaatgattaaattgaaatgctcagaatgttgatgttgttagtcatatctttgggtggtgggattattagtaatttattttcttcatttcccaactgttagatagtaagcatgtagcattttaaattatgggaaaagcatgaattttaggaaaataattgaatgttcagataaaaattatatggaagcagaaggagagcccactggcttactgtggaattgctgggagcacacagaatttttatccctctctcttccgtgttcttttcctgcacccgcagcaacactgatgaaaatggggcaagtaaagaacatcattctcgagggggcagcacagttgtgtgcacacaaaatcctgggttccactttttgtccctttaccagcccctctctctaagatatctaacctctttttggcaactgtcctttggatttcatcagttcacctggcaaattctagccagtagttttttaaaaactcaccttgtctctctctctctctcwcwcwcwcwcacacacacacacacacacacacacacacacacgtggccctttcttgtatacagaagctataaaatgtktgtagatttctagccctgaaatactaaagttctataattctgtacttaactctttaataatcttgacattttatctaccatatgaactacggtacaaacaccattaagggcaggacttggctttccaggcctgaatgcaggtatttaaaataattgaattacaagaaggtagctcatagatcttttccattgcagcataactgtcttgaatctgaaaacacattgtctgtcttaactctgcagtagctgacacaccctcctcctcacaagtcactgtagtagtaagattaaatattataatgatggtttagcaaatcggatggggactcatcagctattttcatatcaagaactgaggttgaaatatgcatcctttatttgtttttcattgagtgattacagatggcacctaataaagtcttcatgctgtgatatcttgaagccattgatttatgtttggtaagtgtggacacwccaactctagtcaacctccctcccattacataccacaaggaatgttaaaatgacatttgcctatttgctttttctagtgactgatgaggatcctttctgagaggtaaacaccagcattattgaggagtgaagtttaggcttgatatttttcaataaagtatattcctcattatactttatcctccaaaataaaatgacaaaaataaaactttggacttttctttggatacatattagccaaaaccatcatgcccctggtaaatataaattgattctgagtttttagaaaataaatcacgaattgtacaaaaacattgagagtcagaagatgttagaatactggatgtggaggtgaattggtgtgccttttcttccatttgatttggactatggtgtgactgactattttagcatctcttcctaattctttcctttgttgaaagtgttgtaaaggcccacatgccaaggctaattgtggggccagagccagggagactgctgggcaggtggttatctaggcagggatggcagttgggcagaaggcacaagcaatacaagctctgggaacatcaggtggcttcagtctagagacacagatcaggtaacccagggaaagatggtggagttgaggaataatgctaagagtgagggccacagaccagcatcgaccagaagcctccacggtgaaatatggattccatgagcttggactcagcagccaagaaaagtctcatttaatagtcattgcgatctcaatttcacagccatatcgatggagaaacatctgtgctcaagaggagagaattccacaacagcttacagccacacactggtcatccctgtgaaagatgcagctgaccagacatgatgtagaaagtcaggcaggccctctgaaccccatgggcgcctctgccaagtggtggcgagcattctggaaaaagtggaaaggccaatacagagaagtgacgggcctgcaaatggtcctgatttttctaacaccaattcaggggcatcattgggtcttttgacccaagatcttaagtggatcctctgtgcatttcattacttagttaaatagcatgtcattccgtaagaaagcaaacctgaattggttttgcctaaactacatagcccaggaaattgagcagaggattgaatggcacagttcctgatctcagcaggctatggtttcccctttgtatctccactttgtatctgactgcattttctctttgccctaaaccatccagctattgcagtggcgatgggggggtgtctgacaaaactttacttttcttccttttttattaaagtgtttcagatgctgcagtcatgaatgatttttgaatgtttattatttacctaatacaggcaagaagatatagtagaagataaaaaatgaatagaaaagagatagtactacccaaatggaactctattagggaggggaaaatatgtgaaacatccaaaatatatttttgacatttttacagaattaaataattatagattatacggtattcatgatcaagaagtgctttggaattttatgcacctaatgaatgtataggtggggaaagttgatctataaatgcacatgtatactgtaagggatatgaatctttactttcactgaaccaccagaccttaaaattttataggagcagagcatctcaaagtcttgatgtctgtaatttcataaagtatcattaacacattaagtttcaactaaattgaaattaattgtttcatttggggagattagcatttttctatttcagtggcagaatactgatgtttcaagggaatatattttgaggataacagtcataatattaatagttgttgttattatatttaacactcattgggagcttcttgtgtctcaggaatcttgttaagtcctttagatgtactatttcatttaatcctaagaacaaccctgtgaggaagatactattattatgtccattgtacagataaggaaaccaccaacttagagatgattcataacgcttctatgttactgagctggtcgctagcagcactcaagtgattgaacattcaacccaggcccaggtgacttgcaaccccgtgctcgtaagctcttaactggtctctctctctctctctctctctgaaaagggcaaaatctaaaacatgattatctgagggagatggggtagctagaaaagtaggattctatgaaatgttattctgctgaattctcaagaacacagtgtttctggaaagcttagtggttctgttgaggtgatgttcattgatattctaaatgtgttactttgttttatttttttgttggtgggggaagactttactagttggaattactaaaatcgctttaataaagtgcttgcaaagactcaatctggttaacagtaaagccatttgtttcagtcatgtcagcaactttggttttcataagggttttaatgaatcggagagtggaatttaagaaagcaaacaatccaaggaatactccttatttttctaaaatagcaaagcaaaaatgggaaccctttccagtttagttacagcaagtatctattggagttttagaaattcttagagtacatcatttatcatatagaacaaaacttgattaatgaacactttttaaaagtctttttagggtcctattattattttagttgtttagatataaaaatattttatgacatattcaytgttaaatttatagtgaattgacattcagtgacatttgtttttaaagttgtttattgaaatatgtagtctaccagaaataagtacggttaccaactactgaaatcaatttaatagtaatttggtcttgttagtctgttaaaaagaattattggccttcagatayttccacaaagccctttgttactcatgaatcccatcaagatgctatgaataaagactgtgaatatcaataagtttgaaaacattccatgctcatgttcagggtcatatttttccctgtcttmtatgttcctctttgtggctataaacccaaacttatgtgttgtgtgttttttctatgacaattatggatatgacttatttactatatgctctatgaggtataacctaatgtcaactgacttcaactatgtttgccatacttccaaaaaaatagccactcatgtatctgtctgatcaggaggtgaaccgatggtgctgtatgaaattgagaactaattatctcataaacattctaagtggatataaggaattatgtgctcagttgcaaccactaatttatcgaagcacckggtctaaatacctcagggaatgcacagaagcctgatggttgaaaagccttcaaagcattctctcagctaaaaagtacaagaattggggctcatatctagtgcctttttggacagttggtcacagaagcttagaaacattggcacaagtattgtcaggyggagcctggccgtgacctctgtgaaatggctgtcatgagcttggcagggtgggaataatggctctcctgccaccatctgtcacccctgtccaagacaccagcacaatttgagagcagctgtggttccctaccctattctcaccccatccccccatgcccagcagctccctccctgggactttggacctcgtgggaaaaaaatggagaaggagggaaagaaaagtacttgagggttttgtaaatgttcagaaagggaggggggtgcggtagaattaaatctacccaaagaagagccaaagagctttcacttgctttcccttctagccaaccagtaaccagtaggccttcattttattgtcacatgtaaaactcaagaagtgatgagtaagtagcattcaattagaatttaatcttttttggtagaaatggtgtaaaagttttcaatgaggatatgctgattcctggttgcatgttccacagcctttgatgttcaaccacatcatcttgcacttatagctaaaaggtgtcagacacctaacattgtcttagcaatcttctgtggttccagatactgtgtgcatcttacaggctggagytgggggacaccgatgcttaatgggaaaactaatgactttatacagatcttataaaactctgctattgtsggggggcaggcatttagtagattaagtttgtaatctaagagaggaaactgggcaggaaagacaagagtgaggtgaagcaccaccrtggaccagaaaaaggcttgaaattagaagcctttggcaaaagtgtgaaactttgccactttacattgttcagtgggtcagaaattgtcaaagattttcttttttctccaaagagaaatgacgaggaaggagagacattttttatttgttctgggtgtttgtttattgtttgttttggacaaggtctcactctgttgcccagactggagtacagtggtgcagtcacagctcactgcagcctagacctccccggctcaagcaatctgaaagagagacatttcaaaattgaacctaagactcatggtttatcgcatgagaacccacagctctcacagaaactcaagaaatgtcttagtgaggggactcaatcctttacacttcgagctgaaaggacggcagtcagcccagccaggaggttacctcagcatagaccaagtaaataaatcatttggtagaagccatttgagagtaaaggttactagaaagtcataaatcaaccagcaagtcgatgtatggttttgctagaatgtaggagcaattagaaatttttagaaatatttctttaactgtgcgtgacttgaggaagaggactatgacctaactaaccagttactattattatatcaaaatgagattttaaaaaatacagtatggatttaatgccggttcacttattcagttttatgcagttaagttgttgtttttagaacattatgaaatttcatttcatgccccaataaaactaaactaaaatggaatgggttacagcttttccatttgttgacttttctctttcaaacatctttgattttccattcattgaacacactttttaagaatgctttgaatgtcattcaagttacccgtttctcctgtcccctcccccacctgtctctaatgcagtttccaaagtgaaccaatcctaacggaacctaatgatacctttgagcacgtttcttagtaacactagcacctctttcttacctgcttctaattcacataatggcctttctagcattggctgattgtttctttttcatttcccctttatcactcccacccatgtcttatcaaaggggaaggctggtggttaatggtcagtgcattgcaccacaatttcatgcttgtgctgcatcaaaagtctaacctgacaatcagtcccttctcttccatctgacatcagaagcttctgcagtttctcacagccattggccatgaaagttcagctcaagaagtcatcgcaactaccttcatttatagcctgttgttgacctaaaacctaatgcatgtcagtgctcttctctgtttcttctctcatgtcagaaaaattaaaatgttttaatttttttcccaggctgcatttgcaagttttaatatgtctataacatttttatagtatatcagtatccatatcaaacatttaactctgttactctgcttttcttttcttttcytttttttttttttttttttttttttgaaatggggtctcgctatgtcgctgcagtgcggtggcgtgatcttagctcactgcaacctctgcctcccgggttcaagcgactctcagcctcctgagtggctgggattacaggcatgcaccaccatgcccagctaatttttgcatttttagtggacacgaggttttgccatgttggccaagctggtctcaaattcctgacctcaagtgatccaccaccttggcctctcaaagtgctgggattacaggcctaagccaccgcacccggcctacccctgcttttcaaagtcatagccatgatacccagggatttttccctcacatggtcctggtgtctrctgacattagcttatcaatttcaaactttccttaagcaaaacaaatgggcctcctatacaaatgggaaggttgcagtttcatctcattttttcttagagttttgcctggttaaagcaatttggatgtttttagatattcacactgtcttatttagtgtgcagttgcaaatctgatttttaacagggagagaaggaagaggtagggctgttaatttgcattcccctaagactgagtactaccagtgggctacaggttgcccagataaagtacatttaattttaaagtaacattgcaaactctcccagtagaattgacagcatccttggaacttcatttcacactttcctgacttgggaatggttattttgagtagcacctcctattaacctaacttcttaatgcctggacagaaggttaaatatctcacttatctacatgttcggcctccatgaacagctgcttcattcacagcccttcaagggtttatcaaaatttccccatgtttaacattccagagagaacatccaggttgttggctcttgagactcaccattggttcactcactgaggctgatgattgtgactaatataatcttaaaacaaaaaatgcaataggatacattctgttaaagaaaatgcattttgaattaactataaaaatacaaagttctgtgatagccctatctgagtacccagttcatagaatccaaaaatgagaaaagatttcgtctccgtgattgtagtcatcatgtggtgtaatttgctaagaatttcaagtgcactaaatgttttacgagcaaccatactcccatattaagggcactgctgtactcctttacattctcagagtcaggagatgcaggattttcaaaaggccctgtgcattttgaaactttagcaaggtaggtgatagattgatttcatgtaacaataaaataaatgtcttaaagtttcaggatctctgacaatagaagataagtggtatcttagagttggcagaattgaagaccttatcagctataagaagaaaagttactgctcaatatctgaagctgccattgaccttagggaaacaagcaaaaaggcacatgatcgcttatgaacaaggatgtgcatctgatattattgagtcatagaaacagaaaacccaatcatctaacagtagcagatggttatatgacctttaaggcatctataaaatggagcatataaaaacacattgcaaaatgtaattggtaataattaaagatataggagaaatggtcatggttagttaaattttaaagatgataaaactaaataaacaatatrgcacagatgtgttttacaatgaataggcataaataagaaaaagactagaaggaaatgtactactacagtaataactgtggcttgattaaaagttattttatattcttgttttcctaagtttcctaaaaactttactatgtatttgcatatgtgtatatgtacatataggtaagtatatacatatatctgcacatcatgtatacatgtacatagtatgtttatatgggtacatcacaatcagaaaaataaatgtttatgttttaaattatttttctccaagaaataaggtttaaagctcaaagcttataaacttcccaagggctttctgatgatcctgtgtggatctagatagtagcttgatctgtacgaaaccccagagaagaaaaagtaatagaccaacatgaaaaaatgagacaaagaactgtcctgtggycatatcaccatctgtggagtgcccagagtgacggtgtcagcaactggctttaacatcatcagggctagatgtaggtaatgaagtgtgatttcaggagagggcctcctccctgccaaaggaggagcrtgtgtgtgtgtgtgtgtgtgtgtgtgtgtgtgtgtgtgtgtgtgkatgtgcgcgcgcgtgtgtctgtgtgtaagagagggagagagagaagtaccctaggcctgcaaatgccacacagactatgaggagtagagaaaaagaatcctgtccataaagcaaaagcagagcttatgaaattgtcagataccaaaagaatttagaactgctgcaatagtatttctcttgatcttctttatccagatgaaaaaccagtttgatcaggatatccttatcagtcactgggtctggccttcataatacgatttcaaataaagtaacaaacgtaataaaaacacatttctcaatacttatatcaaattaaaagtatattttaagaaagagatacattttgttgataaagacatagtaattctcccaataagttttttttagaagtagatatttttaaacagaaatatctgcttcaattgttgttgtgaaaataaatccttcttttattgccatcctcatatataagccggtattttagtggtaaaaactgtgctgaggaaaacacacacgtagcacatactttcaaacaaattttaccgtagcacatactttcaaacaaatatgtatttaccgtagcacatactttcaaacaaatatgtcagctttttaatggtctgggccatgatgccgaacttggggagaaaagaaacatagcaacttgcccttcattcggtaaatacaggcagcagggaaagccaggaagccagagctgctgacttaggggggtggttgtggagggaactgaagccaccccaggactcattaccctcagcgtgtgtgtctgggccaggaggagttgagcttggccatctcctccagccctgtcatgttcaagtctaggcattaggatctgagggtgaggttgggaggctcccacatcaacagaagctgggatgctgatcagcaactcatgaaccgaaacctctacaagtgtcgggcccttccggtgatttgttgcacattaagtttgtccggcagggtgttcacctggctctgcagaaggacacgaaaggtggacatctgcggccatcaatgccacctccttgtgatccccctttctctccctcctgtggtgccccactgtgaggagcatccttcccatccgcagtgaaacagagatctccagattgcccaggaagttgttggaaggattgcacatttgcttctccctttattgtgtactccttctagaagaaagagcctgtgtttttagcttttattttattttatttctcttatttcctggaatcaagcattgagcttagtcggtgctcagtacagcattgatgactaagcaaaaagaatccaggcaagaaaataactaactaccaccaccgcccacccccgctagcaatttcagcagattctgagcataagtagtgtggagttgaatcccccaggcaataacctagaagccccaggcaataacctagaagcccgtccaacagctgccctcatctccaattccatggggttaggacccgcctccgtgatgtttctgaaaatgcattcctcctccgggctgatttccattccacaggggcccagtgccctggtcttggtgggccctcagcgacctaccccacacagaccaatactttctcttcctggttccttttactgtgttccctgcttccaaaaatccaagcaaagtgtgtgcattagaaacccttcattctctttcatcaaaggaaccwagcggtttctgcatttttaaacaacaagaaagtaaatcatgaacttttacttggctacatagatcaaagattctcttgaaggtccaagtgatctcaaattatttttaattatttatatttccagatctgaataaaagactgcaaaacacaccccaaaagttttctgtttactttatcaaccctcagcaccaaggcagccatgaagtgctttttgttcttttctcccttcatggccataccaccaggaaggtggtcttaacatgccatcgatcatatctgagtggcaaatgtagcgctggcccggccagcccagcacatatcgctgtgagccgcagtgacacacattcatttccgctggaggcagccctagggagtccggcggccctgcagctgtatttcatctctttgaactgtatggcctcccctataattcaggaaatgagtttactctatctgtgacaagcatcatgttcacacagttttgggagcggccagcgtggtgcagggctgtatgggaatggaggtggcaggcgtttgccaaccctggggagtacaccgacggtacttcctctcccactgccgagtgctccacttgaccktgactttcggcacacctgttgcctgagaaagtgtgctttatccccgtgtgctggraatctctggctgtaatctaacctgagatgagtaagtcagtttcttagacagggcgcttcttaaaacagcaaggcctctcagttgatcaccactcagctcccctgaagctgtagaactggtgcctgtcttttgtccatgcttattttttttcgctggtaaactttggcccctcttttggttgttattaaactagtatttgtttggtgcacataatctctgctggaccaggttaaaacaagtgcagattgttaagggaagagggctctggtcagcgcggagtgtgcatacactcggatcaaggaaaggaatgccagagccagcccagcatcaaaatacactgcaagttggtggtgagcttttgttattttgcgtatggttaaccatctcggaggtcataaagcgaggcctctgtcctccggtgcagcagctgggtttatacagtatttccagattgtttattctggcccagagccagggctacatcgtttttccattatgcatgtttgacagatgaagagaggtgggaagtgggactcccaggaacaggtctgtgatttcctttctatttacattaaagggacttttaggagtactgaagattatgaaccagttcaaacatatgtcaatgcagcagaggtagagaagctgctatgtttgcaaaaaatgttcagatcttgggcagtaaaacaaaatcaaagcaaaatcttgggcagtgagcacatcgtgcttgtcactgcccagtcttgcatgcagacaggttactggcgagtgatatttatcattcacatccagaagttaagctagtgtttgtttggcagggcattgggaggagcccctgagttggcaaaccagaatctgtgtgcaatccactgacatatgcatttcatgcagatgggtgtgcctggtgccgggcagagatgtgtttccaaggtcccagtagaactttttccctgcagccttttccctgagccaccagctttctgtggatactcccaaaagcccgggctaagttcttccaccaggaagtgttcaagactgaccaaagagccacagttcacattgtatccacagcaaagtccttggcacataggtcaaatggatgtgattgaatgactgttttccttctaaataaaacactttcattttgctaatggagaaacatcactaaaaagtaccaaaagtgatggcaaattaagtaactgaccagcattcatacagcaaagtcaggtcacacaaataaatgtctttttacccaacagtgtttgaatcttcagttaatggctggggtaaatatcacacccagcacaaattcattagctgcaagacggtggcttctacatagctatttgtgtttgtggtgaaccttccttatcatkgcatgtcttaagcttggctaagtatttgcaagcgttctgtcaccataacataatgttcttcaacagagtggctaagaaaagcaaataccactacctctccagaacaacctgtgatccaaaccttctctgtcagcctactatccagaaattcaatttccagaaatggaaagtttgctcaggaaggaccctcaactaaggaaggaatttagctaaaaagtgaagtatgcatagtcaacactgaaagttgccctttgggttaatccagtcttgcagatggatttaaaatacaggtttcaaatcaacaaacatttatggagggtggttaggtgccaggcatggagctggacactggggaactaaaaatgaaaaagacacagtccctttcagtgtgaaaacatttttgctggcttgcaagtttttcaccagatcctcccagacttaccaaagcattcccctcatcttagaacactcaagcccttcttttcaatggattccctgaatgccagaatacacacagggcaaggagaagtgggtggttatagatttccactcaatttggaaattaacagcctgtggtgtagcaaaaaggtgcaaggctgagaatcagaaagcccactttccrgtgcttggactgaaatgtcctggctgtacagccttgagctggtcttgtgacctctggggcccttggtatctgtaagtaaaatgggtactgggaagattgagcaaggtagtgaggggcgatgtgaaagcgcattaatccacagagccctatgaaaatgagagggatgtgcttctctgcaggacttgtatgagaagttgcactgttcgggctactatttgtaaagttttaataatacagaaagcagccccctcctggcctcatgccaggttttattctctaccaacattgggtggccaactacagatttttatgtcactgggggccagctgttagaagaatctccactcaggaccgtaactactctgtagtgtccctgccactccctccccagggacagcgcagagcctggaagtctatccccctgtggccctgactctatggctgattggacatgtctataaagaaaaaacaatctctattgtgttctttaaatagaaagctcaaagtttgtttttttactttgttttccctcttctgaacacttcatagctcaaaaccagtgcctattttgaggaaattttcaatagttatcataaaattaactaagggaattatttgaccaatccctaaaggtaataagaaaaaactttttaaaaaaatatcaaaaacatcctgaagccacagcttctttttgccaaaaagtattgatgaattaaagtagagaggcagaaaaatgtgccttgccagcactattggtcccaaaaggcaaccaaaccacaaagttaaacactgaaatgtacagaccccagccagatgggagggtagactgcttctcgctaaggacccagcatttgtgggtctcctaggaatttctgtgaaactccttcagatactgcctttgtgcccagctgtctgtctccatctcacagacacagccaagccttccttgaatctgacagcaccctcgtccttctgatggtttcttttgttccctcaagaagcctgtacagaggagaactgtgtttccccaggtgctgagctgtggaaatacaaagataaatggggtatcgcttttgtcctgatcactcagtataaaaagcctctttggaagaacagctaaatgaaacctggtggagatgttaagaataaaatctagagaaaattttttaggaggtggatagtgcctcagaggcctcctaaaagttttccatctcttgattgaaacacacacagaatctatactctcagacgtgcacacacagcacatacggcaaatcttcatgatcttrtagtaagtatgaaagacccaactccatgcagagtatttaagataagcccaataagcctggtctccctggtgaggatttctgaccaaacagaagaaatgttgactccagcaaatgaatcagagtgagatgccctctctgcccccatggtgacaagccttgtgagcaggcatctcccttagactgtgagctccatccactcgtcagcaatgtggagagttaagaacctgggctcattagtcagacttccccacacccaacttcgggcttcaccacttaccagctgtgtgagcctgcacaaacttctaaattccaatgccacagctttaaatggtgataataagagacctctacagcactgggagctttataaggattaaatgtgtgtttagatatcttacaattcttggcacagagaaagctctcaaagtgccaactgatgatgatgatgatggtgatgatgatgatgccccattcactgcaacaattcctgtgcgtggtgcagaatagctattcaacaaatctttgcagaaagagggaaggaagatgatattgggcacaccagtgaggcctaattgaagccttgattttgacgagaagcacttactctctaggtttatgaaagcctgaattttagaatctttaaagcagaagcataaaactcgactttctataacagccagtcaggtaacataaaagaatgaaccggcatttagagtctgaggcaaactggaaagccctggcctctttcacgggggcagtcacacttggctccagaagaatgtagccgccctttgagaaaagccagaaatccagctttccatgtgaaatagaccaagccttacaacaactgaatccatttctaaaaaaaaaaaaataccccacgggccaaacaacacattgcctgccagtccgatcttgggctgcctttttgccaccctgtcttaaagggaggagctctgtattcgtctctttcttttaaaatgtttatcagtgggcacaagagacatgagccccttgaagttactctcagttcctgctaggatcagagaacgctcatggagtgaggtcttcacttcttcatggttaatccgacagtatgtgctcacctaacgagggcttcttcccttcccaaggaatgctactartaagtatagatttttaaagcataattgttttgtggctgaaataacaacaattatttgaaaaaaaatcctaacaacttcctctagagctgctattatggcagtctggagagaggctgattccatagtccatgtagctttgttttgtttggatggaaagtctggcattttacaaaaatgtggaaaacttagcaatggaatgacttttccatagcaccgattatcgtacagcaagacacacatccatatgtctttgaaatgagatttttaagaattctctgcttattatacaagacaaaccacctctggtctttccatatgaaggtgatagttttctacaggctcatgaaagctgccctggttatggtgcagtacttaaagttagggaaaaatctcaacatagatggggacccagattcaaattcgttttttcacttaccagccagctatgtgaccttgggtaagtttctatttctccatctgcaaaagaggggtcatgatattcacctcacagggttattgagaatatcaaataaaataatgtatatgatgatccaaactcataatgggtgttccccatcaatattggttgaatctgagtctctgtttctcctggcacaaaatagcactcctgtttctgaccgcracataaccctctggcaatgtcattaaccttattaaatttggcagctctgtggaaaacgaaggtcaaaaaagctgtcattgtttatataaactgttcattttgttgttcacagtgctatgaggactaaaggatagagggttggatgctgccacccagggagtaaccagggagaagggaagaggctggaacagagcctgaggaggactggtctttataagacaggctgggaaagaggagggcgtagagaagatggaaagggagtgatcagagagagrtgagggtgccaggaaaacactgttgcagatgcaggggtttcaaaatggagtgtgtggcccacagtgtgatggggtcatgctgtgaggcgccctctgagctaccaacaaggaagcgagagtaactgaatggagtacagaaggaacagaaagcaggttttggtgagttcagtcacgtacgtaagctgaaaatgttacaacaaatgtagacagctcttcaggaagttgggctgtgatggggaggagagagaaaagatgaaagagggagggtgcatgagacaagggttttttcaagaagggaagtgagttttgatggcaaggagccagttgagagggagaggttgacaatgaagaagagggggtggatgagggagagaaggaaactccaaggaggcagggtgggtagacaaatgaagcaagaattggatattaatgcaaaactagagcttggggaaacattagatcccataagaatctgccaaaccagctgatactgaccctcatgtttagacgggggatttagggagggattaagaagagtaaggaagactgaagtaactgaaatacacgagacaatctgttgttattggaggggtaacaggaaaagcttctcctccaccctctgaagcttacttgaaaatgaacttacaataggcagattaacaggaaaaaaaggaataaaatttattaatatgcatgaaactgagcatggtagctcactcctgtagtcccaaatactcaggaggttgaggggaggatcgcttgagcccaggagtttgaggctgcagtgagccaccactgcactctagcctgggcaacagagcaagaccctacctcttaaaaataaaatgctacacaggagaaaatcacaggagagtggttacctcataacccagggaggtccagcttttttctatacctttcttcatagggaaaggggaaatggaggttaaatgtggcaattttgaagagtagtaaatgatatttaaggggaatgaatgggcccaatgctcagacaatggaaggtaaataattctctttgggaactgaatgggacccaagaacaggcaatagtttgggacaacgttcatctgagctctgagtgtggtgtttaatcttcagtcccttcctctgtgacatgagttttgatcttctctgrttaatgaaattttaggggaggtgactgaaggcaattttgttcctctttggcaggtccaatttctaggtagataagggaacttcagagaacagcttcatccaggatgtactggtctccaatggccttcaatttgaaatatcgccataccaagttgccatatttggcggtcaccctccctggatccttaactattcaagaaaggatcttttaaagctcttgccttgtagccaaacatgaaaaagtcccccttccctcttgtcttaaaagtctgtcctctctgtggagtgttctagcaaacatagggctgggcctcctcatgttctgactagcactatcaaatagccaaagcacttttgtcaggctggtaaggtgacatgcaattaaaatttggttggaaaggctacctgggatcttatcaaatatcaatcttattaaagacctctcattactgtataaaagttggataagatatgtcaatgtagggggctctgagtgaaatcataagagccagtactttccagtcatagagtcgatggagtgcactgggattttagatgctggttatcaccagaagtctgtcgttttccgaacatggtaaatactaggtcaatttctgcctgggatagaatgtttcctactggaaacacaaaattacaagtttaatctaaataaaccaccaggacgcagttttacctctcaggtggaactctgcaaatagtggttgttggggtggttttcatcactgactctgagtattggacccagagatgatcgtgcccaatttttttttaatcggcccttttctcctcccaaactataaagccattagccattccctccaaaacacctgccagtttcctgtgagatcggttgttaagtttgggtgcctcagtcagcakgaggagtagtaggctctaggcctggacattgaccattatgctctaccacactgtgaagaaaggtgtgagaagcagtaatagccctctcacctgtccacaccaagaaacaacacagcaaaagcacagcagctgattgtcatgaggagcctcctacctctgccactttctggctgcatgaccttgaatgagttatagccttggcctcagtttcctcatgtataaaatggctcttccatcaaggggttattgtgaggattaagtatgattgtgtgtacaagtgcttagctcagtgcttgctacacattagttcccattaactgtagctgttastataaaaatataccacaaagcattaggctcagccaggactgtcaccatctcgcaccatatcagttaactaatcgtgcaaatatgtcctggttcttttcacttgtacttgaaggacacaatatcacattttattgatrtataatattttacatatttatgggatatgtatgatatttttttccatgcatagaatgtgcaatgatcaaatcagggtgtttagggtatccatcaccttgagtatttatcatttctatgtgttaggaacatttgaatttttttttctagctactttgaaacatacaatacattgttgctaactatagtcaccctactctgctatggagcatgagaacttacatcttctatataactgtacatttgtacccattaaccaacctctcttcagcccgctctccaacccagacatccttcccagcctctggtatgtatcatcctactccctccttgtggtcaacttctttagctcccatatatgagtgaaaatacacgatctttgtctttctgtgcctagattatttcatttaacatgatgacctccagttccatccatgttgatgcaaatgacatgatttctttcttttttatggccaaatagtattccattgtgtataataccacattttcttcattcattcattgatggacacaggttgattccatatctttaccactgcgaatattactacagtaaacacgtgagcatgcaagtgcaggtatccctttgatatgttgatttcatttcctttggatagatacatagtagaagggttgctggatcatggtagttctatttttagttttttgagaactctccatactgtttaccatagtggctgttctaattggcattcccaccaacagtgtataagagttcccttttctccacatcctcaccagcatctgttatttattggcttttaataatagctattctaactggagtaagatgatagctcattgtggttttgatttgcatttccttgatgattagcatgttgagttttttcatatacctcttggccatttgtatgtcttattttgagaaatgtctattcggaaggatataatgtcacttttgacagagttatttacctgctctgcccatccaccaactcccccatcctaaccatagaggaaggcattcagggaagagagttttattgtcatgaactaggagtaaccttatggcagttgacccagtcacctaatcgtaatcaaagaaagaaatgtataaacccattatgctgtaactttaaagaatattcccaaagtttttctggcctgaaattaataaccatttatatagcaaatcaactcaatccattatrtagaccaacattttgcaagtgattgaagactagtaaaatgtgattggtatttctcagatagttttgtagtcaaggtatttatatgattacacttgctgtccattgtttttaggaaattactgtttcaaccttacgacaaagagctttgaggctgtgaaatagaacagatttccaaattacttctttacaaggatctaggctcccttttgcttatccccttggatcctttgccaggttgggccaaataatttaagtaatgaatttattttaaatcacaggagtcttacttttttgtgtatcagataacaaaaccctacacaatgtatagtgctctaagaggaagggattgaaggaggctttcaatgagagaattatttttcctctgcctctcaatgtttgacttaaaactctttatttcttgtctgtctttcataagattttttagctctgttttaaaaaacaaaaaggaacacctaagacctgtgaacaatgacccgccccagattagctagagttcatatctkcagagaagacagatattataaaatgttctgttaggaacccatttcagaagagtctatgccaagttatttaacagaaattctagagtgttcaatgtgtgttatgtttttaatttcartgaagaccatgttatctatttacaaggatctaggctcccctgtgcaaaggacccaacctggcaaaggactttcaaaagagtcagtttgaaaagtaatacccttattcaatgaggctgttggccacatagagaatttatttattttttattttaattaatacctaatggggtacatgagatgttttgatacaggcatgcaatgcataataatctcatcatggagaatggggtatccatcccctcaagcatttatcctttgcattacaaacaatccagttatgctcttttagttattttattattattattattaattttagacagagtctcgctctgtcgccaggctggagtgcagtggcgcaatctcagctcactgcaacctctgcctcccgggttcaagcaattctcctgcctcaggctcccgagtagctgggactacaggtgcatgccaccacgcccagctaatttgtgtatttttagtagagacagggtttcaccatgttggcctggatggtctcgatctcttgrcctcgtgatccacctgcctcgtcctcccaaagtgctgggattacaggcatgagccaccatacccggctcttttagttatttttaaatgtacaattaaattattattggctatagtcaccctgttgtgctatcaaataataggtcttattcatttttcaattttttttgtacctatgaaccatccccacctgtccccaatcccccactacccttcttagcctctacatagagaatttttcaaattccttctttagaattgctactgaaggcttcagaaggtacctcaaatatcctaaaaattgggaagtctatgtcctttcagatgagtctgattttggaaatagccatttggaactgtatttagtaaattatatacctattcaaatttgttgacaaaaattttagtcaaaagcaagattataaaagaaaatgtgagggcaaatcttcatgaccttggatttggcaatggcttctttaatatgacaccaaaagacaggcaataagaagaaaacagataaaatggtctccattacaattaaaaacttctatatgtcaaccttggatttggcaattttttttaatgtgacaccaaaagtcaggcaatatgagaaaaatggataaaatagtcttcattaaaattaaaaacttttatgcatcaaagaacactatcaacagagtgaaaagacagcctgtggaatggaagaaaatatttgtaaattatatacctgatatatgtgcagattatctaaaatatgtaaataactccttcaactcaacaataaaaacaaacaaaagcaaacaaaaaaaamccccacttcaaaaatgggcaaaggacttgaatagacatttctctaaagaagatatacaaacaaacagcatttgttggacacatgcttgtcaaaaagcacatgaaaaggtcattagaaattagggaaaccattagcatcagcatcactacaggagtcattagggaaatgcaaatcaaaaccacagtgagataccactccacacttactgggatggctacaattttaaaaagggaggaaaataacaatcgtaggagagaattcgaagaaattggaaccttcacacattgctggtaggaatgtaaaatggtgcaaacactgtggaaaataatttggcagttcttcaaaacattaaacttagaattaccgcatgacccagcaattctgctcctaggcatatacccaaaataagtggaaacagggactcagatactagaatgcaaatgttcattataataagcaaaagatggaaacaacccaagtgtctctccaaggatgaaaggataaacaaattgcgttctatctatacaatggaatgttattcaaccttaaaaggaatgaagttctgggccaggcatggtggctcacacctgtaataccagcactttgggaggccgaggcaggtggatcacctgaggtcgggaattcgagaccagcctgaccaacatggagaaaccccatctctactaaaaatacaaaattagccaggcatggtggtgcatgcctrtaatctcagctactcaggaggctgaggcaggagaatcacttgaacccgggaggtagaggttgtagtgagccaagattgcgccattgcactccagcctggacaacaagagcaaaactccatctcaaaaaaaaaaaaaaaggaatgaagctctgatacacactacaacatggaagaaccttgaaaacatgcttagtgaaataagctagacaaaaaaaggacaaatattgtatgattccacctacatgaagtactgagaataggcaaattcataaagatagaacatggattagaggttctatctaatcgatggggtaagtagggtggggtaaggaaaggaaaggaattgggagttattgtttaatggatatcaagtttttgtatagactcatgaaaggatttttaaaacagtggtgatggttgcacaacactgtaaatataattaatgccactgaagtgtacacttaaaaatagttaaaattgtacactctatatataacattttcatgctattcagcaatgaatataaaatatattttgttattaagcattagtataaaattaagcatattttagttgtatatattttaccacaataaaaaatttaaaatttacaagggttaaaattatatttagactgggtgcagtggctcgtgccataatcccagcactttgggatgccaaggcagaaggatctcttgatgccgagaccagtctgggtacatggtgagaacctgtctctacaaaaaataaaaataaattttaaaaatttgtaaattatacttaagaaatctggcagcccttcctttccttttctggacaaatgcattgttgaaatagtaaaatggaaatggattttgtatcaaattaaactttatgtcaatattttaaaacttacaaaacaagattattagaaagtggttagacagctcttccatgcctccttctgagggtaaagcccttttctggtgtatcaagaaataaaagagggaaaatggatagattctgctgttcaaaagaatgtagaactcagagttaacaattgaatttggtccaatcgcatggttcacatctgatgaaaggaaatttgatagcttgtgcttcgtcaactcatgttgacattaacacctagagttggtaagtgtttccaaatattgtcaggaacccttcttctcttctaatacttggatatgcagttgcttccttaggtgctaccagagttgtacaggtaatgtgggtcctcgccgggatcccttctaagctactgcaaatgatggctcatgtgcgaccccggttctcttccagagcacaggaagcttggaaacatgactgtgacggtgaagaagactgtcccctctcctgaggctgtgcagatcctctaccagcggatgagatacgagtacgagttttaccactacgtcaaagagcagttccacctgctgaagcrcaagtttggacttaagtctcacgtcagcaagccycccctgaggccacacttctttatcccaactccactggaaaccgaggagccaatcgacgatgaagaacaggatgatgaaaagtggctggaagatatttataagaggtgatgtgactgtgttgcctctatggctttatctcccttttccagaaagttctttgtttggggaagtaaaatccttaagggactaaattaatgcttgggtgcattaaaaagaacaaaacattcccacatgttggggtcattgggagatgcccggttttgcgggttttatttgtttaattttattctgtgttttctcttggctctttgggtctttcccgggtacactagatggctccatcccaaggcatcttgtcataaaacagctttcccccaccccatatcatgggaaaagggggagaaatatagcccctagcctaataacttatcatttgtaaaatgacttataaaaatattacctcaatggtaggagacatccagacttgtatatttcagtggaaatacaaaaccacttcagagaccagggtatctcctctggaaggatctaagagaaggtaagacagattaggacatcgaaaaggaggatggagccaggtgccatggcttgagcctataatccgaggctgaggtgggaggatcacttgagcccaggagtttgaggttgcagtgagctgtgatcacaccactgcactccagcctgggtgacagagtgagactctgtctcaattaattttttttttttaaaggaggaggatctccatgggtaagtggtttctacccgcatgggtagagttctgcctctggtccttctcagggggcactttcaccaagagcagtgtaattatctctgaaagagcaagtcagcttgtgccgcatccccaaccaatccacagcctggagtacctttcaaggtcaaagtgcatggccagctccattgagacattccatttcaaagcaccgtgctgacagatatcaaagtactctagcagggaaaataatttgtttgctgtgtaaggaagaatgtagacaagacagataaatctgaaggtcatgtggcatcagggaaagggcatggctgtgtcttttgcacccaatatgaaacatcttctcccaacactgctttaatggaagttctaggaaccaatttagctcaggcatttgactcctacagcagaagttctgagcctgaccacagatggtgtgtaatctatcaaacacacccctggccaagttgggtcctataggacctggtactatgtactattgtaacttctagttccctaagaggtacctgttttcagtaaaaaggggtcctgagttctgtgcaggtggaagagctacccgagaactacctgagttctgtgcaggtagagtcccatttcttatgggacctgtgtgctcctgagaactcttacttgagacatcaaaaagaagcagcaagagcttctgggacagagactgcttggccagctttgtaagtaagtggctgcctccaatgtgatgtgagtacatgttgggcagtctcactgtcctaaggtatgtcttctttccacctcccactgcccctcccctgccacctatcaatgatgccttggttcagtcattagaaatctgttgctttgagttctgaaatattttcaccttaaaaaaaatgctgaaaatacacattctcctgggaagacgataaacagctagctaagaagccgaggttcagtggtggcagcaggaaggacactgccacaaattttgtctatttcatatttgtcccctagagccagccctagcaaatgtgtgagttgggagtagttaatagtaaataagactctgactttacacaagctacacattttatacttttcataaaccacaaagtctctctagaattttttctgccttcactaaaattggactgtagccaagatataaagcaagtcatttggaacctgccgagtgagcactgaagctactttatcatgagatgtgtgttaagaaggctgcagcccacaggagtccagggaaggcggggaccacagaggcacagagtccagcacttggccgctcatgggccttctttctgcctcagaggacgggggcagagaagtgatgaagggaaatgttcttagaggaggaaatatcctttgtcctgttcagagagaccagggccctaccattaggcatactttcagaagcaacctggagaacagctatcaatcatattcaaaaccagtacaagaactgctgcctggtaccctgtgagtcatttctatgaaattccatataaagaatgatgataagtttacacactgtgcaatctcacaatctgaaaataaagttgagttggctgtgttttctctgctcttgtcagaacattgggacaattggtcgttcaaaaacattcatcctcttactgcaagtttatctgggtacttttacctgtgtgttcaaaggcatttcttttcagcagtgatcattataacttcacaaaaaaagatgctgacggatttacttacagggccttaatgttattttgtcccagccaacaccctctaggtcctaaaagtcaaggtacttcagtttatttggcaaacatgacaacattttttttggccctgggcccaacagtttgtacttcatgaaacatattgtacattttacatagtttaatttaaaaaataccttttaagctagttgatctttgactgtcttatttattataacctttcagcacattccaaggttttagttactcaggaaggagttaattaaaatgattttattttggtctgatggatgttttttaaaaggaaaattattattatgaaccttcagcctactttcttgagtgccgtaaaagtgcttgtaaatctttttttttttttaagaagaaagaaaaaaatggtgtttgacgttgatggaaattcaaaaatatatatggaactgaaacattaacttagctaaaataaaagcaatctgtgtttgagatgaagcrttccttaacttattcatcacccatataaataaataaatataaataagttgacatatttcttccatcctgttgacagctggaaataaaagtgcctgcagttcctcccctcagccttcttaattggccaagcttttttcctcaagatgggattttgaaaagctgtattttaaaaagtgtatcaattttcattcgtgtaattatatgacagcaaaaaaaagggggctgataaaatgaactagtcatttactcatgttgttgcatattttaaaaagcaaacaggtgattttatcagtatttccacggttggtttcatgtcggggtgctacatctgaatcatctgtctctgttatccagcatctacggggcatgtctaccgtcagataggaaaggaaggatgtgccccaattctcagtgtctacgatgatctgtttctcagacatgcagcacttcaaaacctggaccactctaagctctcaagtgagtagtcttgatctggaaacaccgttcttgggaaatttcactgctgtggtcaaatggagcttacaaagagaaacaaactatgctccctgtgtgtctgatgctacattccaattacatgtgactgttatataaaagaatcagaatgctgatacgaaaggaaagaaaaatccactttggtaatggtatgctttatttcaagtaagaatatgagaatcttaaacagcaggtgataagtggtgacctttgttcatcattttgtttgtccttctgtaactcaatcaaatgatgtttgactcaatcaactttagagccaaaaatactcaagaaaaactggaccgtgccatatctggggttgcttgtgtggtctgaagttctttatacatgtgccatcacctgcgggtttatccaatgagctatttggcctttaatgaattttatagataatgacagtatttcttaaaaggcaggatgacagccgagcgcggtggcttatgcctgtaatcccagcactttgggaggccgaggcgtgcggatcacgaggtccagagattgagacagtcctggctaacacagtgaaaccccgtctctactaaaaatacaaaaaattagctgggtgtggtggcatgcgcctgcagtcccagtcactcagtaggctgaggcaggagaatcacttgaacctggaaggcagaggttgcagtgagccgagatcatgccactgtactccagcctgggtgacagagcgagactccgtcaaaaaaaaaaaaaaagaaacaaaaaaaaagcaggatgacaatccatagctattaagaaaaatagccctctgggtcaaaattgtgaaacccccttcaagtaaagataaagaggagttattttactaacacggcttatttcacatcagatgataaagaaatctgtaaaaaataaacaaacataatgttttaaatatcctgctacagaaaagtcttttttgggctaaaaccaaaaatccaagtctgttaagaaaaacacacagaacttctttcacagcccagcacattcattgtgatatcatgtggtgttagtcggctaggcctaccgtaacaaagtgctgcggactggttgccttaaacaacagaagtgtattgtcccatagttctggaggctggaagtccgagattgaagtgctggcagggttggttcctcctgaggcctctctcctgggcttgcagagggcaccttatccctgcatcctcccgtgtccttcccccgtgcctgtctgtgtcttgatctcttcttctaaggaccgcaatcatattggattagggctcactctaatgacctcattttaacttaatgacttcgtttaagaccctaatatggtttggctgtgtccccacccaaatctcatattgaattgtagttcccataatccccacatgtgaaagggacccggtgatggataattgaatcatgggggtggttacccccatgctattgttctcgtgatagtgagttctcatgacatctgatggttttataaggggcttttccccttttgctgggcgcttcttcttgctgctgccaccatgtgaagaaggacatgtttgcttccccttctgccattattgtaagtttcctgaggcctctccaaccatgctgaacagtgaatcaatcaaacctctttcctttattaattatccagtcttgggtatgtcttaatattagcagtgtgaaaacagactaatacagatcctatttccaaaaatgctcacattctgagatacttggttaagactttcatatatgaatttgtgggggacacacaattcagcccataacacccagactatagcagaaaagttagggcagaggaactgaattcctactaggagagaagcaagcctcaaagtgcagattcctatagttgcattggggctctggagcagtgatctggtccattccctcattttacagacaaggaaaaccaaggtccaaagaggagacacaaatatgtcacatgctaactttgcccattgagggttcccttaacttttgaagcagctaccaaattaaaactttaaaaagatgatatagccaaagcccatctacagacctaggatccagaatgaaagtgatgaggcactttcagccacacccactgccacctgctgtactggagcagcctcaccatagggctctcctgggagccggggctttggaactcgcctttccacagagggaggggaggccctattggttttcagtcactgaagtcctcagagacaaatcccaaataaatattttatttttaatttttctgtctgctcaaaagacacagagaggttcttgttccttggtaaacagacttggagcatgtttgcccatctcagattacagagttttatttctcttaaaggcaaaatgaagattcttgtcctacttcctgtaacgagtttcagatggacccacctccaaaaatatagtcaaaatgcagttcataaaactaggggaagtcaagtacagacatgtcccaggaaagcagaaccagaggagaagcagaccccgggcactcgcaggactatttgactcactggagaattcccttctgccagggcaggcttggctcactgctccaagcactgcagattcccaaggaacacccaggcccacagatgttcatgggtcacagaattgtgaactgaccacttgtgcattttggatttcaacttgtaaacayggggattccctttttacaaaaagaaaaaggagaggatgaaaaatcaccatgcaaaggaaagttgagagctaagtttttccttttggaatcttggcatgcgcatttagctatcttcaatctggctttcaccagacrctgtgtgctttgagcaggggtggagcagtctgccctgtgccgctctgccagaacattcagacttgacctgtcacaggcctcttattccagtcaggagcagacacggcccaggagatgggccctgccagacacagcaggctgcctttgaggtgcaaccagagaggcagtaaaaacctgggaggagagcatttgactgactaggctgggggctgcccaccagtcaagtccccgagttcaagtcccagctgttctgtttcactgggcatcagtgtaaatcatttgacctccatcggtctgaaatcgactcagctggaaaacattagaaagaaaataaaacatctactgaaaaccaagagctgcttctgggatgaaccatttcccacccttgacccctaaatgctaaaagactgagccacaacacttcctaagctgatgaaaggtttgttctcaccacagaacactgtatccccagcaagagggcatagaattacatatagtcattccaggttgcctgaagcccccgttccttcatgtctgcaagtggcattgcccagtatgctgtgagtcgatggacagcagcatttctgaaatgtgaattgagctcccaggagtaggcacatcctcctgggcatgagatagagcaaatgcagcaaggacctgtcctgaagaagcatcggtcccttcctcctggcctggtttccactgttctgtttactgtgccattatccaagataaaccagtctgtggaattccacttttctcaagcattctttgggacgagtttgtctagctgcaagttagaagattcagctctaattcacagcttgtactaaatacaggcttcctctaacttatttaaactactgtgtgtatctgtgatcccatgactaatggtaataatgagcctaaaacatccatgtgaattaatacaggttgtgcacaaagaaaagtgttagtaaaaattggaaacctggcaggacgggggtactaaacttcttggagggtcatttctcattctcagaagtagtgttactgctgtgatgtgggaaaaatctggcaatgattttgtgggctggtgatgtttccagcatggttgattccccataggactgccatgttgaaaaactttaatgtgttgtattactaatctttcaaatgcagaagagagttaagacactgaccacaaacttccttatagtcaccttaagttttgcacatatcaaatttactatttgctttttctccttttggcacactttcctgtatggtgtccatctttggaaactagtgaaattctagtccaatgtgtattctcaaaggataattcatgaaccaagtgtgtgagataggcatgaaaaaaaatcgtgttaaataattttggaagtgctgcagttcatagtgtggtgttacacagtatggtagtatattcagagtatactaaggactcatgcatactgaagcatttttaaaaattaattgatcttttgttgaatttcaaatttctcaaaagtatttgccatgaaacccttatttgcataagacccattgatatcctgtggaactagtgttctggagactacactttgagaaacaatgctttaatgcaaattattggattacatttttcctcattggaagacttgttttcctcttgctgtggttcaattttggtccgtgcatcgtgcttgaagaaaatatatttgcatcagatgacgaacatgttgataaaaagaagatggggacaaataacatttttagaaaataacaaggaatcatctttcagttttgcttattctcctaattacattcctctatctcgggaaaaagtagaaactcttttcaaggtaaaattttttatacttttcaatattatttgggtaccttgaattaattcatgactcccatgaggatcagtgcttaaatccaaccaaataaaggacatctgtccccctttcttccttgggctacagttgcttgtgcagtggaaaggaaagctatgatgaaacagaaatcgcaggtgtttcaagtaaggttggtgatggggatgagattgctcagctccggagctctcagctactacacactggggcacctgtgttgttcagtgcactagggggcgccgtatccataacaatttactcaagaaatcacaagttctttccaaacctcctttctctctctcacttgctcattttcctttattgctttaaagcagtatggcccagaagaaactcatggttggtgcatttacctggtacatttaccagtgtacatacacactgttgatcaataagttattagcgttcccaggtcttctggcctgatttaagttttgttgctattatttttagattagcgttgtatttttaaaatcagtctttatcagatcatctttcctgagtttgttgtataactaaaacatgatgacaattctggttcagtaatcaagaggtgacccatgtgatgactgtcccagataaccttcaggcaataccataattgccacaatacagataagtagaaagtgtgtttaatgcaaaaaacaaggatataggaagatgtcaagaaagaggcattgccccgttatcaaggccggccacactagaaaaggattcaggtaactttcagtttaaattattttcatctacaaaaatttattggcaca

SEQ ID NO: 94912 - DNA, 73482 bp, Homo sapiens
agagggctgatcacctgaggtcaggtgagatcagcctgaccaacatggagaaaccccgtctctactaaaaatataaaattagccgggcgtggtggcacgtgcctgtaatcccagctacttgggaggctgaggcaggagaatcacttgaactcagaaggtggaggctgcggtgagccgagactgcgccactgcactccagtgcgcgggcaacaagagcaaaactccatttcaaaaaaaaaaaaaatcacttctcaaactaaagttctttacctggttatttggatggtgaaggaaaactgttacacatcctgttgatgaagcagcgacaattctttcctggtcaaaaaactaaagagaaaatttctgcttgttaaagattcagaaatattagcagggaggaagtccatttgtttatttaactcaattagtagcaaatcttataacaattttaaaaagcaaagagcctatgagtgctaaggaaataaaatgtgttaatgaagctgaaaggccaaactgccatacaaagtattttcatgaataaacaatattttttcctagacacattcacccacaattgatttaatttgggaccaacacaataaaaccttaggaaaatattattcctggctgggtgcagtggctcacgcctgtaatcccagcattttgggaggcctaggtggacggatcacttgagctcaggagttcaagaccagcctgcgcaagatggcgaggcctcgtctctacaaaaatacaaaaatgagttggggttgtagggaagtggaggttgcagtgagccaagattgagcccctgcattccagcctagttgacagagcaagactcagtttcaaaaaaagaataaaaattttaaaaaagaaaagccaggcacggtggctgacgcctgtaatcccagcactttgggaggctgaggcaagcggatcacgaggtcaggagttcgagaccagcctggccaatacgttgaaacctcatctctactaaaaatacaaaaattagctgggcgtgctggcatgtgcctgtactcccagctactcaggaggctgaggcagaagaatcacttgaacccacgaggtggggttgcagtgagccgagatcgagccactgcactccagcctgggtgacagagcaagactcgtcataaaaaagaaaaaaaaaaaaggaaaggaaaatatcgtctgggcatggtggctcacacctgtaatcccagcactttgggaggccaagccgggtggaccacgaggtcacgagttcaagaccagcctggccaacatggtgaaactccatctctactaaaaatacaaaaattagccaggcatggtggcatgtgcctgttgtcccagctactcgggaggctgaggcaggagaattgcttgaacccaggaggcagaagttgcagtaagctgagctctcgccactgcactccagctcgggtgacagtataagacttcgtctccaaaaaaaaaaaatgtatctttcctagagctagatagctttcttttttattttatttatttatttatttatttatttattattattattttttgagacagagtttcgctcttgttgcccaagctggcgcactctcggctcactgcaacctctgcgcccgggttcaagcgattctcctgcctcagactccagagtagctgggattacaagcgcgcaccagggctaggtagctttctatggaaaatgcaggggctctccacaccaggatttgaaaacttaatttcggccgggcgccatggctcactcctgtaatcccagcactttgggaggccgaggcaggcaaatcaccaggtcaggaaatagagaccatcgtggctaatatggtgaaaccccgtctctattaaaaatacaaaaaattagccgggtatggtggcctgcgcctgtagtcccagctacccgggaggctgaggcaggagaatcgcttgaacccgggaagcggaggttgtagtgagctcagatcatgccactgtactccagcctgggtgacagagcgagactccatcttggaaaaaaaaaaaaaaaagaaaactcaatttcatccccaccactcattactggttttgagactttggccaagttaagttcactaaatcgtggtaaatctttaaaacgggagcactaatctctacttagggagttgttatgagaattcaaaaaacaaaatgatgttatccccctgcacagtatctgtcacatagtacatgctcaagatatattagtctcaattttctcattagtaaaacaaagtaacgatacttgattcactggcatgcaacaataattaatttttgtaaagctccccaaacggtatttagcacatagtcgacagtcaattaataaaaaagtatgattaaatctacatcccctttcccagtcctttttctgccactaaatggctaaatgatgttgggcaaatcataacttacagagcactcagttttctgtaaacgaggggtgacaccagacaacttttatgatgctctgcttgtttaaatgtattactcaggactttcaaagttagcttttggatgctacacagatttacctgtaaatccattacatcaccatggtgtctgatatcacacaataactgatggtctccttcaaaccctccatcagagtccaagtttccaaaatctccaatagaccacagtgaaatataattttcctgtaaaacagaaagttttgtcttgagatgacataaacgtcaactctcggaaaataaaagttgtgctcccgtccggaaatgttgctccaaaacatctcaaatggtatggtgagtttaaaacacaacgagatacgaggctcaggcatgccatcaccggctctgagctacggagcaaccgcgcctgagacaggggtccgggggacctaaaagtgcgagaagaaccagaaggtgggagttggcgcgcggaaggccaggggtcagctcaaccggagagagggaggaggtaggggctcgtccctatcagcggcgatacctcattgtcccaagatcctgtagcgaacgtctccgcggtctgtaaacttcccggaggcagcggtcgccagcgggttttgctgattttctgggacacaaacttcgcataaatttcctccatgccgaaagcggccgcagcaggtactgcaaaaagcaagcacagtacgcgcctctcagcaccgcctcttcccgcggaaccctgattggatgggactttaggacggagacggtggctgcagagagtcaattctcgtcgatagccagtgtgggcacagtcagtacctagactgagaggcccacccatctcacagagcagctctgagcaaaggcaagagcgctttggcctttgagcagtaggacttgctcctaatctgcaatgtcagtattttcttgtgttcaataattgtgcagtgtaaaatttaagtgcaaaaacagaacaaaaacaatgcagtagaaaccaccttgaaaccacacctaagcagttgcaggtcactgcgcatagaaaacgattcaaaaatccttaaatactcgtggaagtacctcgaataaagtgccaacctactatcccaaacctctccctcttgtctcccaaacaaatactttgcttcaaagttaatacacactgtcagagcctggagttggaattctgaaagactccagttttagttttgatgccaattgcctagctttgatcaattcaattacgtgcatgattaagaatgaagtttgtgatacctattgtcaacggcccaggaatcagttttctaggttccttctgtgcttttggttacacctataatattcttcccttcctctttactcctcagaatcctgcctatccttcaaggatctgttctttcctttaccatttcctgacgaccccagccaatgttgatctaaatcaacaccattttttttcttttttaagacagggtctctgtggcccaagctggagtgcagtggtacaatctcagctcactgcaacctctgcctccgcctcccaggttcaagtgattctcccacctcagcttccagggtagctgggactacaggtgtgcgccaccatgcctggctaattttttttttttttttttggagagacgggatttcaccatattggccaggctggtctcgaactcttgacctcaggtgatccaactgccttgtcctcccaaagtgctgggattacaggcgtgagctagcatttgatatctagaccactaatgacatatattttggatatatcttatgttagttttctttagatgcatattcctcccccattagaatgtaaatcctactgaatacaagagatatgacttattcaactaaaaaatgaagctcttttacactataggtattcataactgtatgttggttatttctttaaaaagggccattatgctactgttgtttttatgtgatattggtagtcctacttcacagggacagtttacggaagcactgcatgtaaatgcaatccatctgggtcagctttagagttaccagtttcctatcaaggatttgacttttttcttttctccaaatggaagatcatcaagaaactgtagaaagatgaaatggaaaatattaagtgggttacagtcccaaatcaacaattttattcatgtttaatattgaagtaaagaacactgttttggccaggcacggtggctcacgcctgtaatcccagcactttgggaggccaaggcaggcagatcacgaggtcaggagttcaagaccagcctggtcaacatggtgaaaccctgtctctactaaaaatacaaaaatattagctgggcatggtggtgcgtgcctgtaattccagctactcgggaggctgcggcagaattgcttgaaccgggacctgggaggtggaggttgcaatgagccaagatcatgccactgcattccagcctgggctacagagtgagactccgtctcaatcaaaagcaaaaaaacaaaaagaaaccagttttgcctgtagtttcatttatggtcacataatcccagaaaataggtaatgttgattttggattggaagcaggccagtgtcacattttacaaaatcggataagaactagaatttgaaaattgtgctgatatagtggcacagatgtcttagctttgtttccttctaaaagattactggaggccgggcgctgtggctcatgcctgtaatcccagcactttgggaggccgaggcgggcggatcataaggtcaggagatcgagaccatcctggctaacacggtgaaaccctgtctctactaaaaatacaaaaaattagccgggcgtggtggcgggtgcctgtagtcccagctactcgggaggctgaggcaggagaatggcctgaacctgggaggcggagcttgcagtgagccgagatcgcgccactgcactccagtctgggcgacagagcgagactccgtctcaaaaaaaaaaaaaaaaaaaaaaaaaaaagttactggactagatgatggctggattctgtcagtctcaggtctaattaggagtcagcgatttggacgcgacaagcaatgttctcagtgagcttctcactcatggtcttgcagagctgagagcaataaagccacggtggaatttgtgaggcttaattaggtggaaatgcacacttacgtcgggagaataacacgttcaccaaaggacacagtggtattttttaaccaatcgcaactctgtacgttggtattattctaagggagcaaagctttgccccaacccccacccccatgtcctggtactcttccactctgagagctttagaaccggggttccaaagtctctgcttagcctaacagtgacgtgcttgtcacaaagccagaggccggtgtactcgggttagagagggcctttgtcgttgggttttattcttattgtattattcgggctccaccgacccaaatattagtcaactgggttgggcgaggtaggacggatgaagcccaccgtctaacaatctggacatctataggagcagatccgccgctcgaaacagstgacccagcgacgactgcggaaccactagcagcgtctgcacagatcgaccccgccatcccgccgtcccgytcggtgaccggagacacagccgggaacgcgactgatcaggctaccgagccgggccgcagggcgaaagcggtgcggtccgaggcctcagaaagggacacgcagcagcggmagtggcgctgactcagcccggcctccctgcagtcccctggcagcggtagcagccacaggggcgggcggctgggccacacgcctccyccgccctcggccycacccggccgcaccctaagccgcgcggcgtcacagagcgcatgcgtgccgcgggggatgccgggagcgcgcagtggcggcagcggcggcgacggcagtaacagcggcagctacagcggggacgcgagcggggcggtgacggtgtgggaggtggtctcactcttgggaaaactgctgggcaccgtcgtcgcgctgaaggtggttctgtacctgctccgagtgtgcttagcgatggcctggaaatccggcggcgccagccactcggagctaatccacaatctccgcagtaagtgccacctccgcccgttgtagggcagctggggcaggctgggcctggaccgggtccccctgggccgtccggaacgttctgtctgtccccgcgcgcctgttggagggcttcggcgcagagttgccccggtagtcccgaacggcgtgcgcttgcagtcgcctccctcgggacctgtcactcgtcgacgacgtggactggaaggggagagaaagagccaggggccgctgctggtgggggcaggggcagtcgtctccctgcaggccctgggggagggagtgcagtacaggtgatgctgctgtcactcaggtccgcgtccgggtccggcttgtgaggggcgtgccttcggggtgggagcgtgtgggctaggccttatggagagtgggctggcgctcaggagaccccaccctcgtcccctgcatttttctcaccttcctcctccataatcaacctcgctgcaagctttccctcttatgcagcctcccccgccctccgttttttcccctggagggagatgccaccgtctgatacaggcgaggggaggaagatgagagtattgccattgcagatgctgggagaaatttctcgggcggctgtccagtggaaagctccgtgcggggcggagaaagaacaggggatgctgttcctgagagacttgtatttcaggagcctttgcaggtcctggatcagcagagggttgtgtgtctgatgttctaacttttttcagggctaccataggctttaaaaaccttatgtggagtttctttatatcactctccttagttactgtattccttcttctgatgataattttaggataggatgagtgctgtgtcactttctttttttaaatcgaaatatagcgtccccgttttgttgggagactacaagggccgcagtctataataaactcactggtcagaatttatagcattmttcgctactatgcagtaatcatatcttgtcacatggtatttttaattgtcctgtgttacttagcttttcatgtgtttgtcttatttctcaactcgatttgtaatttccttaacggctggcaccattaaaaaaaattttttttggccgggctcattggctcacgcctgtaatgccagcactttgggaggccgaggcgggtggattacctgagttcaggagttcgagaccagccaggccgacatggtgaaaccccatctctactaaaaatacaaaaattagccgggcgtggtggtgcctgcctgtaatcccagctacttgtgaggctgaggcaggagaatcgcgtgaacccgggacggggaggttgcagtgagccaagatcttgccactgcactccagcctgggcaacaagggaggaaactccgcctcaaaaaaaaawtttttttttgaattttctctaagaatttaayagtcatccctttttttcataaatgcccattaaatgtccgttatatgcctaaatctgtgctagacagacaaaggtaattgagagaaattaggagtactgtttggcacatggttggtactttttttttttttttttttttttgagacagagactccctctgtagcccagactggagtgcaatggcgcggtcttagctcactgcaacctccgcctcccaggttcaaacaattgtcctgtctcagcctcctgagtggctgggactacaggcgcctgccagcacgcctggctaatttttgtatttttagtagagaaggggtttcactatgttggccaggctgatgtcgaactcctgacttcatgatctgcccacctcggcctcccaaagtgctgggattataggcgtgagccaccgcgccaggccggtacttgatatattagtcattttggatttttttttggtggggggacaatacttaatgtggaaactgagtctttagtgtttggtaagagagaatgttgattattttttttttttagacagggtttcactgtcacccaggttggagtgcagtggtgtgagctcggctcactgcaacccctgctttctgtgctcaagcgattttcccacttcagcctcctgagtacagtggtgccaccataccaggctaatttttagggttttttttttttttttggtagtttatgagatggggtcttgctatgttgcccaggctggtcttgaactcctggactcaagcaatttgttggactcaggctcccaaaattttgggattacaagagtgagccaccgcacctggccatggtgaatgtttagatgtcaacattttttttttttgagacagagttttgctcttgtttcccaagctggagtgcaatggcgtgatcttggctcactgcaacctctgcctcctgggttcaagcgattcttctgcctcagcctcccgagtagctgggattacaggcacccactaccacgcctggctaatttttagtatttttagtagaaacggggtttcactatgttggccaggctggtctcaaactcttgacctaaggtgatctgcctgcctcggcctcccaaagtgcttgaattacaggtgtgagccaccacgcccagcctagatgtcaatattttgtcaagcattgtcaggttcattttatggaatgatgcttgattggaaatggacatttatgtgctacaacagtagtatgaagtatgatttgggttctcatggatggcacataagctcaatatgttgtaaatattttttacgaaatcccttaacatgatctcagtgccttctattgcagtatatgtacctgaaacattttgtacacaaattgtgattaagtaattttccaccggtaggttatcatagtaggcacttggctgtggcagaaatttgtaatcaatcaggctcttaaagtctctccttttttgggccaaatttgtggtaagccaagactagatagatcttttcccggtggtttcataatcactttaatgtattgcattactgttcttagctgaaatttctaaggatgtttttctgtcaggaaatttaataaggaatatttaatatacatagatgttgattttgcaaatagttttatactagatttatgattggtaagaggaaattagagtagaatagttgtttagcctcttttgtaacacttgtgcaactttagtttcaacttcttgctgaggtaattctagctaatagatttctttttattagcttattataaaagtaatacttgctcatgtgaaaattgtaattgacataaaatttgaaaatattgccttccttcctcattattctactgtgtatattcttcctaaattaaaggcttttaattgaaatcttagaaaaatataaaaatgtgattgtgttgatgttgaaatgaaaaggggcctgcttactagaaggggaaggaaattacatttttaatggttttttttttttgagacagagtttcgctcttattgcccaggctggagtgcaatggcacgatctcagctcaccacaacctctgcttcccaggttcaagcaattctctggcctcagcctcccgagtagctgggattacaggcaggcgccaccacacccagctaattttgtatttttagtagagacaaggtttctccatgttggtcagctggtcttgaattcccaacctcaggtgatctgcctgcctcagcctcccaaagtgctgggattacaggcatgatccaccacacctggccaatagttttttttgttttgttttgttttgtttttaagaaatgaagcttaatataatttgttaagaatattttgttttccttttgtattaaaatctatcataataggactgtggttgtatgatttcatagttgatgcatcatttatagaatatttcagattgtaatggtagatttcttatgtcatggcttatattataaccactcttaagtaacttagaacagtgactaaaacttgagcatgcttcaaaatctcctgaatcacctggagagcttttcaaaayacagattgccggagcttgagaatttgtatttctaacagatttgtaagtggtgccactgctggtccagggaccacattttgagaaccagtgacatggagaattgaaaattataaggttgaattctgccagcatatcagctaaatcagttttatgctttagaataatgttttagaaaaagtctatagcagtcttgccctatagagtgcttggtgatgttctctatatygtccagtgtggtagctactagctacatgtggcatttaacatttgaaatgtggacaactgaagaaccgaaattcaattttttaaaaaattaacttaatgaaataaccacatgtatccagtagttaccatattggacagcacaggtctctagaaatgaaaaaatacaattattttatgattatggactggtaatgtgctcgtgaaacaaattagcttaatttgaaacygtgagcctgcttaatccagggaatgtgactatttaaataatgtttatattagagtttacttcctactcgtattgagataatttcaagccatggtaaaatttaggaagatagccagagtaggtgaggtgatgttctggagcaggggtatttaaaccagagggtttgtgggatgttaacttaatggataggcttcaaatgctatagagtagtccctcccttatcccatggttttgctttctgaagtttcagttaccccaagtcaactgaggtctgaaaatattaaatgggaaattcctgaaacaagcaattcataagttttaaattgtgtgctgttttgagtagcgtgaggaactctctggacgtcccacttgatcctgcccgtgacatgaatcatccctttgttcagcatatctatgctgtctacacctgcccgtttgtcacttagtagcctatttggttagcagtgactgtcatagtatcacagggcttgtgtccaaataatccttattttacttaataatggacccaaagtgcaagaataatggtgctggcatgtaatgatacttgttctattttattcattatttttgttaatttcttaattgtgcctaatttataaactaaactttattataggtatgttacgtataggaagaaaacaacatacagatggtccctgacttaacagtggtttgacttacaagttttttactttactggatgtaaacctgtcataataaacctgttataagttaaggaaggccgagtgcggtggctcacacctgtaatctcagaactttgggaggctgagtcaggaggatcgcttcagtccaggagtttgagaccagcctaggcaacatagtgaaaataacatttgtcattttctctacaaaaaataaacaaaattagctgggcattatggtgcatgcctgtagtctcagctacatgagctacgtgggaggctgagatgggaggatcacttgagcccgagaggttgagggtgcagtaagccaagatcatgccactgcactcgagcctgggtgatggagcaatactttgtctcaaaaaaaaaaaaatgttgagtatctgtatgggctgtatgggctttggtattgtatgcggtttcaggcatctattaagggtcttggaccgtatttcctgtgggtaaagggaaactactgtactgaccactgaaagcaattgttcttttatctatttttatttgtaaaaataattcagtccattcccctaatgatcaattgtttctacttatgtttcttttgcattcttgattttgtcattttacatatataatgtttatggaatttgtcatttagtcagctgatattttagtgctttctatatgacaggcactggggatacagcagtgaacaaaacaaacatccactccctcttgtagcttctaatgggagcagccaagtatagtatgtcacatgataagtgacaaagtagggagggaggacagagtgtgtggggcagtaggtttatagttgtagagaaggcctcagtaaggtatcattagaccaaagatttgctggaggagtagacacatatcacgcaggtagacttgggataagcattccaggcagaagaaatagcgaattccagatttggatttaggatctgggagaaaagattggaggcaaggatccaacaccaaggttttaggccttggcaactggaatgatttgccattttctaaattggaaatggtgagtgagtgagcagccacgtttattctgtgaggaggggactgtgggagatcagattattttgaggaatgcttttcttataagacatttaagtcgagatttttagtaggcatttgaatatgcaagaattatgatttgtagtttttatatcctaaaagcatttacttttgtaaataatgaaattattttctatctacmgcaccagttcttagccactagtaggtgttgctagtagaaaagagcatttattctttccctttttttttttttgagacagagcctctttctgtcgcccaagctggagtgccgtggcgtgatcttagctcactgcaacctctgtttcctgggttcaagcgactcctccatctcagcctcccgagtaactgggactacagatgcacaccaccatgactggcttttttttttttttttttttttttttttttttggtagagacggggttttgtcatgttgcccaggcaggtctcaaacccctgggctcaagtgatccacccgcctcagtctccaatattgctgggattataggcatgagcccctgcgcccagccagcatttactcttaatattccactacttttgtatgcacatgggaaaaatagaaccagctggtaaaatcctaagaaattggagcctcaaagtccagaggccttctcattttgacttatttcaaaccagtcttatggataggtactagtaagtaaacttgaaatcctatgtatatatttaaatttaaattatataaaaataaataaaattggccgggcgtggtgggtcatgcctgtaatcctagcactttgggaggccgaggtgggtggatcacctgaggtcaggggtaccagaccagcctggccaacaatgcgaaaacccgtctctactaaaaatacaaaaattagctgggcatggtgacaggagcctataatcccagctactcggaggctgaagcaggagaatcgcttgaacccggggagtggagtttgcagtgacctgagatcgctccattgtaccccagcctgggtgaaaaagcgaaactgcctcaaaataaatacataaataaataaaattaaaaatttatatctttagtcatattagccacatttcaagagctcagtagccacatggagctagtgcccaccctgttggacagtgcagatagagaatagatctgccatcactgaaggttcttttggattgcagtagatcttgatgcttggctgtattacattctggttaatgagatcttaggctgtagkaggggaaagattcgattgtgctgttacaaaaatatttttattaatattatatttagctttggttaaatgctttcagggtggcagtgtaaaactaaagattattggataagagtgatgaagataacaagaggatcagcatcttacatggtgctttgaagggatggaggtggtttggtttagcaaaacctttagggagcagtggtgtttaaatttgaagaaatgtcatgtagtagagggtcaaaccaggacaaatgggaggcagattttggctcattataagtaagtattcacaaagctatcctaacaatcaaaaagttggctttgaaaaagtgttttctgtcaccaaatatgttgaagcaaagaatggttgaccatttcactgtaagggatattgtagaagggattttgtcatcagatttgaatgtacactagatctctaaggacccttccaaatccaagattctgtgatttttttccccagtggtcccttgtacctagattttatgatttaaaaaatattttattttattttttgagacagagtctcactctgttgcctaagctggaatgcagtggtgtgatcttggctcactgcaacctctgcctctccggtttaagtgattctcgtgtcttagcctcccgagtagctgggacttacaggcacgtgccaccatacccagctaatttttgtacttttagtagagatggggtttcaccatgttggccaggatggcctcaaactcctgacctcaagtgatccacccgacttggcctcccaaagtgctaggattacaggagtgagccactgcgcccaaccaattttttttttctttctttctttcttttttttttttttttttctgagacagagtcttgctctgtcgtccaggctggagtgcagtggcgcaacctcagctcactgcaacctccgcctccccggttcaagcaattctcctgcctcagcctcctgagtagctaggattacaggcatatgctaccacgcctggctaatttttgtattttttagtagaggcgaggtttcaccatgttggccaggctggtctcaaactcctgactttgtgatctgcccacctcggcctcccaaagtgctgggattacaagcattagccactgcacctggcccaatttttttcttttttttaatagtgttatggattgcatgaaattacttgtggagtgtatgtgttttagtagccagctacagaagtttaacattaacttctaatgttacctgcattttaggttttgtataacattgtagtttgttagagatgtaaaggaatccaaggaacatatcctttgagaaataacatctaaatactatgtatcaattaaaagttattaaggtatartgaaagatccattttattttttttccccattgattggcagaggaaggtacatattttaaaataatctctggtacttagagaatatgctttaccgtaacttgccatcacataaaattcttccttaattatattgtgmattttttttttcttttttgagacggagttttgctcttgttgcccaggctagagtgcaatggcgcgatctcggctcacgacaacctccaccttgtgggttcaagtgattctcctacctcagcctcccgaatagctgggattacaggcacatgccaccatgcccagctagtttttgtatttttagtagagacagggtttcaccaagttggccaggatggtctcaatctcttgacctcgtgatctgcccggctcggcctcccaaagtgctgggattacaggcgtgagccaccgcgcccggccatgttgtgaatttaaaactaattcctttcacattttttcagtacagaaagtacctgggagtgtctcagcctctacttagcatctatcatgcctaatcattctgaatgggaagaaaaaggtgaaagttttgttaatttcttattgtttttccagacatgttgatagcagagaagaaatgtggggtagatggttaacagctatccaagtcttataaactaatataataaggtaatatttcttttatttagatgtaaccttgtaacaagcttagaaagtttctatatgacttgaaatctatctgcagcttattttctttctttctttctttcttttttttgagatggagttttgttcttgttgcccgggctggagtgcaatggcgggatctcagctcactgcaacctccgcctcccttgttcaagtgattctcctgcttcagcctcccaagtagcagagattacgggcacctgccaccacatctggctaatttttgtatttttagtagagacggggtttcaccatattggccaggctggtctcaaactcctgacctcaggtgatccacccacctcggcctcccaaagtgctgggattacaggcgtgagccactgcgcccggcctattttcttacctgtattttcagtgcttataccaacacaggccctctttatttttttatttctgccagagttttcagcattttagatcatatatcttagaataatcactgattctttcagactgtcatcagattaactcagcagttcttacaaatgcctttcatagccatccctttcaccatattttcattgataccatcccagcccaggttcgtagttgaaacttacgagtaacatacctggtgtctgattggttgtcatacttttcattttccctcctttcagatccaatccattctacacattatactgattttttcctagtgtactgatttctgttatgtcactttgctgcttaggcttcttaatgcttactgtatcaggtgtaaacaccttttgcttacctttccaggcctttttagagtcttatatagcttactcccatgctccaactccaatcctgttctgcaggctggtcttatttgcctcttcatatgccttgtgcatgagggtacattgttcagttgctataaaaaragaccaaaccacaataccttaaacaaaataagtttctctctcccatagcagtccaaacagttcaagactaatatggtggttccatggtgctgaagacctagactcctctcttgttgctctgctctttccctcatctacaaggttaaagatagtttaccttcaccatttccctcttccagccaatggggaggtaagcaggagaaaaaggaaaacacccattccttttaagagcatgatctgggccaggtgtagtggctcatgcctgtaatcccagcactttgggaggtcgaggtgggcggatcacgaggtcaggagatcgagaccatcttggctaacactgtgaaaccctgtctctactaaaaatacaaaaaatagctgggcatggtggtgcatgcctatagtcccagctacttgggaggctgaggcaggacaatcgcttgaaccagggagtcggaggttgcagtgagccaagatcgtaccactgcactccagcctggcacagagcaagactccgtctcaaaaaacaaacaaaacaaaaagagcatgttctggaagttgtatccataatttctacgtatgttccattgacaagaacttaattgtaagagttcacataatcacagggagrctaattgggaatgcacccaaataattctatcactatatactggattatagaggatgcaggtaaaaaagtgtgtgtgtgtgtgtgtgtgtgtgtgtatacacacatatataaaactgatataactatatgaaggaaggggataggtttgtgttgtgtaaatactcatccatcttggcaggaggtcagcagatgatgtctaaagtagataaaacatgaaatacacacacacacacacataaaattttatcactatgaaagtaaagcagtccttgctgtatcttgctaattgtaagggtgatgtgtgtgtgtgtgtgtgtgtgtacatatatatatacacatacatactatctatgataggagaattgagaatattaatttttaatcaagtaatatatgtacatatttaaaagatacagaataagatgagcttataatgaaaaacaacattcttcgccattcccagactcattgcttagagtgaaccacttttaactgtttttggttcttgtgattatcttcatatctctaaatcatatgcttaaactgatgtttcatgttttatctactttagacatcatctgctgacctcctgccaagatggatgagtatttacacaatacaaacctatccccttccttcatatagttatatcatagtttttggttcctcttttgtggttacctttgtaactttaagtaatagactttaacctctgtttcttgttccataatttataaactgacactacctcttaacccatctacttggtaagaaagggtattagggagttcccgctctcatttcctaattgattgacagttcttttacattgtcaaagttgataacatttacattttgttttgagcagtaaataaatcttctgcaccttattgttgatttcaaaagttgaaaatcagtagccatcattaatatttatgactgtatccatactttgctgaacgatgtagtgtattgagtttattccttgccctttgtttcctatattacagacctttctgctattgaagactgtcaaatgtttttcctttgttttttaatgcttcatcagttgctttaaatcttgctacattttagttttccttatatgtaaatcataactcttgtrtagtgtttttgttttttttcctggaatttgatttatcctctgtgcccgttttcacccacgcttcaagttgggaaaagaaacatatttttcttaccatgaccctaattttttcaaggtttttattatttggctgatagcttggattctattgtagtctcctttttgaatcctgttttcatttggatcagttgcatatttggaccaacattagccattattataatcatttaatgagggtctttagaccctagggcggcaagcagatcgggtatgggtggctctcaagctgttctctatttcagaaaagcctaatggtaattgcacatttacccctaattagcctgtacatgcaaagtaaaacatcaaattacttttctgtttgttagaaatattttagagygctggtaatctatgatatatatatatatctatgatatctatgatatatatatgaatctatgatatatatatctatgatatctatgatatatatatctatgatatctatgatataaatatctatgatatatatatctatgatatagatatctatgatataaatatctatgatatatatatctatgatatagatacctatgatataaatatctatgatatatatatctatgatatatatatctatgatatwtatatcatagattaccaatgacagaaaaattatttaataacttagtaaatatataatagtttggtttaagcatcttttagaacatgggatcctgggcaaaaataaataataagaaacttgtgaaaattttggaaaccacccagtaatgcctaaaaaagctttattctgagacatgatgggttcagctttttaataaatggctgatggcatgctattaataacaatttagagtttttagtaacttccatatgccttcatatctgtagagccaaagaagctcacataaatttgatagaagtatattatcgagcttgaaggaagtgatttctttaatttactttgatttttagaatgtgcctcaagtaaaatctttaagatgtcacactttaagtatccatctagagaagaatgaatacagtgaatatgatgatggtttcaaaaattgatgaataattggcagtgttgagtgaagctgcctaacctgaaaaaaataaagctggaggtagtcctgatttatctttatgtaaaaaatggttgactagatagaaattcaatatattctttgtggcttcagagaataacactaagagtgtcatgtgagtgaattatgaaaagggagattcatcttaatacagggaaattgtctaataatcagagtggtctgaatgagctagtaagaaccacaataatggaactcttttagaagagaatatggtaccaatttatgaagttagactcaatggctcctaaagcctcttgtgactttgagagtctatgaatcaccctctgggatttgaattaatttcaggggaaatgaaccactcaagaattattttgggaaatgaattagtagaactcactaagctatttgaatatgttagtagcagtatagtgaagtgatcatagaaatctaacatcttaatttgaataaccctaccccttatttgctctgttatcttggactacttaactagtctttctaacctcaatgttatgatctgtcaaatgaaataataatagtgcctactttataggcttatttgagacaacataagattctgtttattagtactgtatctttcacatggtaaacattaagcgaatatcactgctattattactctgcttttaaaactttaaaaaaaaatgctttcaggctagggacaggggctcacacctgtaatctcagctgaggtgggaggatcacttgaggccagmaatttgagaccagcctgggcaacatggcaagacccactctctaaaaaaaaacttttaaaaattagccgagtgtggtggcatgcacatgtaggcctaggtgttggggtggctaaggcaggaagagcactggaactcaggagtctgaggttataataaactatgatggtgccactgcactccagcctgggcaacaaagccagaccatatctctttaaaaattaaaaaatggggccaggcgcggtggctgaacgcctttaatcccagcactttgggaggccgaggcgggtagatcacgagatcagaagatcgagaccatcctggctaacacagtgaaaccccgtctctactaaaaatacaaaaaattagccagtcgtggtggcgggygcctgtagtcccagctactctggaggctgaggcaggaaaacggcgtgaacccgggaggcggagcttgcagtgagccgagatcgcgccactgcactccagcctggcgagagtgagattccgtctctaaataaataaataaataaatataaaaaataaaataatgcggccaggtgcggtggctcacgcctgtaatcctagcactttgggaggccgaggcgggcggatccacgaggtcaggagatcgagaccatcctggctaacacggtgaaaccccgtctctactaaaaatacagaaaattagccgggtgtggtggcgggtgcctgtagtcccagctactcgggaggctgaggcaggagaatggcgtgaacccgggaggtggagcttgcagtgagccaagatcgtgccactgcactccagcctgggagacagagcgagactctgtctcaaaaaaaaaaaaaaaaaaaattaaaaaatgctttcagtgttttattctaattacctttttgggtagcttgcctatgcttcttcgggtagaaataatattttctatttgggtaatttatccaaaatttatattttaaaatggaaagaccatataagtttgtctttgctagtttattactatttacattgttttctctatttgatgtgccttttttgctaattttaaaaaatattcattgttacttggaaagtttgtatttataccctttatagtgtcgttaattgaccttatttttttattttttattttttattttttatttttttgctaggcatgatggctcatacctgtaataccagcactttgggaggacgaggaaggtggatcacctaaggtcaggagtttgagaccagcctgaccaacatggtgaaactctgcctgtactaaaaatacaatattagctgggtgtggcggtgggcatctgtaatcccagctacttaggaggctgaggcaggagaattgcttgaacccgggaggtggaggttgccgtgagtggagatcgcgccactgaactccagcctgggcaacaagagtgaaactctgtctcaaaaaaaaaataawtttttttttttttttactatctggtttatcagtatgaaatggtatgctttgattccttctattacctgtacagcagtcagtgatctaattatactttcccttttttcctcctcccattgtttttagttgtattctttctactttgtcagaacatgtaacatttaagtgctattatttcacccatgttcctatccttatttctgtctttgctatacaattgggtatgtgtcctttgccaacatatccctggttatctcttggttaaatgaaacacatcctctagaagattcctcagaaagggcttgtgtgtacagcattctctgagttcctgcatattcaaaatggtttttttccttcctatggcctcgatatttgaaggacagcttggctgggtataaaatcrttggcttacacttaaaaaaaatcagctttattgaggtataagttatataaaaattcaccagttgtaagaatacaatttgaaaaatgtgacaaacagaaagtgtaaccmccaacttcattatgatgtggaacatgggtcagcaaactacaggccacagacaaaatttggcctgctgcctggttttataaatttttattggaacacagccacactttcatttatgtagtgtttctggctgttcttgcatcacagtggtagtgcttagtagttgcaacagagattacacggcttgcaaatcctaaaatatttactatttggacctttacagttgtttgctgatctctgctatagaatgtttctttcacccaaaaagttttctggtgtctctttgtaattaatctcctcccttctcctatcctctagcaactacagacgggccttctaccactatggttttggcttttctagaatgtgttaaaaatggaatcatgtagtctcctcacctggcttctttcacttagattagtgcttttgagattcattcaagctgagtgtggtggctcacatctgtaatcccagcactttgggaggctgaggtgggtggatcacgaggtcaggagttcaagaccagcctggccaacacagtgaaaccctgtctctgctaaaaataccaaacttagctggatgtggtggcaggcgcttataatcccagctacttgggaggctgaggcaggagaatcacttgaacccaggaggcaggttgcagtgagccgagatcacgccactgcactccagcctgggcaacagaggaagactccttctcaaaaaaaaaraaaaagaaattcattcatgttgggtatatcagtaattcactcttttttttttttctgctgctcttcaactcaggctcaagtgatcctcctaccttggcctcccacagtgctggaattataggcatgagtcaccgcacccagccgttcactcctttttatggtgacttgcactttctttccttgaatttcttgaaaatgctgccttattcttactttgctttgaatcttgctcttaatttttatttttatttattgagacagggtttcactctgtcacccaggctagggtgcagtggcatgatcagggcatactgcagccttgacctcccaagctcaagcaatcctcccacctcagtcccctgagtagctgggtctacaggtatgcgtcactacgtccagctaattttttaagttttttgtagagatggggtctcttcgtgttgcccaggctggtctcgaactcctggactcaagtgatccacccaccttggctttctaaattgctgggattacagacgtgagccactgcatctggcttgtttgttgctcttaagaaatctgtagtgacctaattttttgttcgtttgtttgttttgagatgacgtcttgctctgtcacccaggctggagtgcagtggcgcgatcttggctcactgcagcctccacctcccaggttcaagcgattctcctgcctcagccttctgagtagctgggattacaggtgcgcaccaccacacccggctaatgtttgtatttttagtagagatagggtttcgccatgttggccaggctggtcttaaactcctgacctcaggtgatccacccacctcggcctcccaaagtgctgggattacaggcatgagccaccatgcccgacctgtttgtttgtgttttgagacagggccttactctgttgcccaggctggagtacagtggcatgatcacagctcactgtagcctcaacttactgagcttaagtgatcctgccacctcagcctccaagtagctgggaccacaggcacatggcaccacacctggctaattttcaaatttttttaaagaaacggggtctccctatgttgcccaggctggtcttgagctcctaggcttaagcaatccttttgccttggtctcccaaagtgctcggattacaggcatgagctaccgcacctggcccctaatttttaaaattcttattataataggtgatttgatcttttagtcttgaatttttttttttttttttttttttttgagatggagtctcaccctgtcactcaggctggagcgcagtggcatgatcttgactcactgcaacctccgcctcccaggctcaagtgatcctcctaccttagcctctgagtagctgggatcacagacatgaaccaccatgcacggctagttttttttttcttttttaatttttttaaagacagagcctcgctctgttgctcatgcttgagtgcagtggcatgatctcggctcactgcagcctccttctcctgggttcaagcgattcttgtgcctcggcctccttaggagctgggattacaggcatgtgccaccacgcccagctaatttttgtatttttagtagagatggggtttcgccatgttggccgtattggtcttgaactcctgacctcaagtgatccgcctacctcagcctcccaaagtgctaggattacggacgttagccaccgcgccagcctggctaattatttttgccttgatgttttgagaatttttttcctttcctttaaaatctaatagtttcattagaatgtattttgaagttaattcttcctggtaatatgtttactccctggcacattttcttagagtatagttttaaatactggttttctttaatcagcagaaatgtttttatttgcatttagttttctttttacattagatttgaatggcattggtttgattggtttttttctttttcctacttttaggcattttgtggacagagttcattgtgtaccccctcctgttagtatagcatcctgcaccttctttaatggatgatgatattggtagtggggaggaaaaggggagttagcacctatttgtgcaggattcttttttttttttttttttttttttgagactgagtcttactctgtcacgcaggctggagttcagtggcacgatctcggctcactgcaacctcagcctccgggttcaagcagttctcccgtctcagcctcctgagtagctgggattacaggggtgcgccaccacacctggctaatttttgtatttttagtagagatggggtttcaccatgttggacaggctggtctcaaactcctgaccttaagtaatttgcccgcctgggcctcccaaagtgctggaattacaggtgtgagctaccgtgcctggccttgagacaggggtcatgctttctcacccaagctggagtgcagtggtatgatcatacctcactataatctcaaactcctgggctcaagcaattctcccacctcagcctcctgagtatttatgactacatggttgtgccatgatccccagctaattaaattttttttttttttttttttttttttgtggagacagggcctatgttgccttgcctggtctcaagctatcctccctgttggcctccccaggctttgagattataggcatgggccgctgcacctggccttaatctcagctaattgttggggaaggcaaatatatattattgatcttgctttccttcctgagaaattcacgtctcctggctctacaacagtcaacagtatggtctggtcttcatcctgcctctgtgactgctcatcatctttcatggctctgttttctttgcatatcttttagatgttggctttgtcttctctacttattctctggccactttgaattcactttgattgctttagttgccatccataataaatagaaatctttattctagatctctttcctgagctccagatccatgtgtccagctgactacagaatatctccagttgtatgatctgaagcccctaactttttaccccttaactttgatccttctacaggatttcttaaattggtaaatggcatcagcgtatcaatgattacctccactcccatccccaaatccagtcagtcaggtatatattacctaccaaatataactcattatccttctagttttctgtgtccttgctgttactaaagaccaggttgggctgggcacggtggctcacacctataatccagctttgggaggctgaggtgggtggatcatgaggtcaggagatgaaggccagcctggctaacacagtgaaaccccatccctactaaaaatacaaaaaattagctgggcgtggtggcatgcacctgtagtcgcagctacttgggaggctgaggcaggagaatcacttgaacctgggaggcggaggttgcagtgagccgagatcgcaccactgcactccagcctgggcaacacagcaagactccatctcaaaaaaaaaaaaaaaaagccgggtccagtggctcacacctgtaatcccagtgctttgggaggccaaggtgagcagatcacaaggtcaggagatcgagaccatcctggctaacatggtgaaaccctgtttctaaaatacaaaaaattagccaggcgtggtggcgggcacctgtagtcccagctactcgggaggctgaggcaggagaatagcgtgaacccaggaggcagagcttgcagtgagccgagattgcgccactgcactccagcctgggcgacagagcgagactctgtctcagaaaaaaaaaaagaaaccaggttgccattacctgggccattacaacaacttccaatcattctctcttccagttcagtctctatagcacagctggtgtaattattctaaaatatctctgatcatgtctctctcttctgaaaatatttgcctcacttgtttcagaaaatggaatcatcaagacagataaagtatttgaagtgatgctggctacagaccgctcccactatgcaaaatgtaacccatacatggattctccacaatcaataggtaagctttagatttctgaaaatatcatagttttcatcatttactttatgatttttggaagtagaaaaagcctgggacacagatatttatctattattaccttcttaatttgaattttatgactcagcaagtttcataatcccaaacatacctattttaataaaattatgtatgtttttctgttttctcgaacaatatataatatgtataaagaattaaaaacattttttgaaataaaatattttagtgaaaaaaacttttgtatttggagacggagtctcattctatcatccaggctggattgcagtggcacaatatcggctcactgcaaccttcacctcctgggttcaagcagttttcctgccttaacctcccgagtagctgggattacaggtgcatgccaccatgcctggctaattttttgtattttagtagagacggggtttcagcgtgttgcccaagctggtctcggaactcctgagctcaggcaaaccacccgtgttggcctcccaaagcactaggattacaggcatgagccaccacaccctgccgtaaaaaaaaacttttaatgaaaacttacagtattagccgagtgctgagttttctttaggggccttagtgttgactaaagattagttttcaggttaggattaattttttaaatcaatatttaaataagtgtgcttaagttattaatgacttctctgctttatttgccctgcttttttggcttgtgtttgtttttagaaagtcctgtatttaactccttctcctgaagcaggttttgctgaactgctgagccttggcagtgggcgcctttgaggcttagaagtgcctcaggattctgtcagtcggctgccatgctatcttcttttgacgcactataacagtcagcagagaagatcctggggagcttctgaaccccgaaggcacctgctaccaccgctcagtgaaacttgcttcagaggcagaaagaagcaggtaaataagttttgagaaagcaacaccacaagaaaagaaactaaaagttaagaaccacgaaaagattgtgtgaattaacattagatgataagataaagaataaaatgaagtattttattggtcttttaagctactttttcagttattctagtttttttttaagttgacagaaatatgaagcaatttaattttgcacagactttgtatacctattacatatgaaaacttatttttaaaaaacaatctgaagtaaaaacaagccaaaaatatatcaactctcaacttactgaaattyttcytttcttagctgactctacaggagaagaaatttttagctgccgtactttagagggactgttttactagatgagcacgttaccctttggcatgattatattttctaattttaactgctgggtgacagtactctaatagaagtaagttttattttcttgagatcataaaaactaaaaaagaattattgtgaaagccgggcgtggtggctcacgcctgtaatcctagcactttgggaggccgaggtgggtggatcacgaggtcaggagatcgagaccatcctggctaacgcggtgaaaccccgtctctactaaaagtacaaaaaattagccgggcgtggtggtgggggcctgtagtcccagctactcgggaggctgaggcagtagaatggcgtgaacctgggaggcggagcttgcagtgagccaagatcgcgccactgcactctagcctgggcgacacagtgagactgtctcagaaaaaaaaaaaaaaaaaaagaattattgtgaaaaataacgtatggatggtagaaaagaaattatgtgaaatagtatatttttacagctgactgtatcagtagttctcttcttcttttgcaggtttccaagcaacaatcagtgctccacacatggtaagttaagtttgttcacttggttacaaatggattacatttttctctataatcattttctttagtaaaaaagatttaaagaaagttgtatcaatttatcatctatgagttatgtgaattggtaatgaacatcattttcttttttgaacatcttattcttaatacagggtctgtagaaggagttttgttttgttttgttttgttttgttttgttttgttttgtttttgagatggagtctcgctctgtcgcccaggctagagtgcagtggcacaatctcggctcactgcaacctcccacttccgggttcatgccattctcctgcctcagcctccccaggagctgggactayaggtgcccaccacgatgcccggctaattttttatatttttagtagagacggggtttcatggtcttagccaggatggtctcgatctcctgaccctcgtgatccgcctgcctcggcctcccaaagtgctgggattacaggcgtgagccactgcgcttggcccagaaggagctttttaaggtagaaactggcatattaaaagattttggtggttgtcagtatctgtgacatgtaaaaattgaacataaaaggttatttagtagacagttaattaatggagataatattttaaatagtataatggacattttatagaaatctcaagttgaatattatttcacattttatgtggaraattcattagggagtggttaagtataagagccattaagctgcatagctccttgagaaagacttactttgagtgatctagcagttttaatctgttgggaattttcttgggttttatttatttatttatttatttttgagacaacttcttaccttgtcacccaggctggaatgcagtggtataatcatcacagctcactgcagccttgactcccgggctcatgcagtcctcccacctcagcctcctaaagtgctaggattacaggcatgagccactgtgcccaaccttttcttagggtttaaatgtcagtatttgaatgagtacttttgttttattttgtaggaaagaacaatagcttttcttttctttttcttttctttttttttttygagatggagtctcacactgttgcccaggctggtgtgcagtggcgcgatcttggcttgctgcaacctccgcctcctgggttcaagtgattctcctgcctcagcctcctgagtaactagcattacaggtgcccgccaccacactcagcttatgttttgtatttttagtagagacggggcttcactatgttggccaggctggtcttgaactcctgaccttgtgatccacccgcctcagcctcccaaagtgctgggattataggtgtgagccactgggcccagtctttttttttttttttttgagacggagtttcgttcttgtgcccaggctggagtgcaatattgtcatctctgctcactgcaacctccacctcctaggttcaagtaattctcttgcctcagcctccctagtagctgggattacaggcacccgccaccacacctggctaacttttttttttttttttttttgagacggactctcacctgtggcccaggctggagtgcagtggcgccatcttggctcactgcaagctccgcctcctgggttcacgccattctcctgcctcagcctcctgagtagctgggactacaggtgcccgccaccatgccctgctagttttttgtattttttagtagagacggggtttcaccatgttagccaggatggtctygatctcgtgaccttgtgatccgcccgcctcggcctcccaaagtgctgggattacaggcgtgagccaccccacccagccttaactttttgtatttttaatagagacagggtttcaccttgttggccaggctggttttgaactcctgacctcaggtgatccactcgcctttgcctcccaaaatgctgggattataggcatgagccactgggcctggccagaacaataacttttctgattctctgcaagtatttggggttggagaagctcttatttaaacttaatactaatataaattctatatgtatttatagcaaattgataattatactagaagaaaaaagcagacatttataaaaattgaatagtaatgtcttcttgaaacatgacagaaaacacagaagccattaaaaaaacctgatacattttgaaacttacatatctaggatttttgcggagaaaaaatgttataagcaaaaattaaagaggaaaaattggctgtgtgtggtggctcacacctgtgtaatctcaacactttgggaggccgaggcaggaatatcgctagaagccaggagtttgagaccagcctgggcaacaaagcaagactctgtctctacaaaaaattttaaaaattagttgggtgtggtggcaatgttcctgtagtcccagctacaagggaggccaaggcagaaggattgtctgagtccaggaatttgaggctgcagtgagccatgattgtgctactgcactccagcctggttgacagagaccctcatctcaataataataattaacgattgagggaaatattgtaatacatatgacagcaagggaaaatttcaatatgtagacatgtatgcatacatttgtgtttgtgtgtatcctgttaataagtgaaagaccggtaagcccaaaagaaaatgtgtaaaggacaggattgatagttcatcgtggccrggcgtggtggctcacatctgtaatcccagcactttgggaggccaaagtgggcgaatcaccagaggttgggagtttgagaccagcctcaccaacatggagaaaccctgtctctactaaaaatacaaaattagctgggcgtggtggcgcatgcctgtaatcccagctacttgggaggctgaggcaggagaatcgcttgaacccgggaggcagaggttgcgttgagctgaaattgcaccattgccctccagcctgggcagcaagagtgaaagtctgtctcaaaaaagaaaaggctaagatagttcattgaacagaaatacaaatgactttgacatttaaacaaatgaaaagatgtcatcttcacgtatttaaatttttttttttttgaggcagagtcttgctctgttgcccaggctggagtgcagtggcatgatctcggctcactgcaacctccgccccgtggattcaagcaattcgcgtgccttactcagccttcctcgtagctgggattacaggtgtgcactaccatgcccggctaatttttgtatttttagtagagatggggtttcgccatgttggccaggcttgtctcctgacctgacctcctgacctcaagtgatctcctgacctcaagtgatccacccgccttggcctcccagagtgctgggattacaggtgtgagccactgtgcctggccattaaaatttttttttgtagagacagggcctcactttgttaccccaggttggtcgtgaactcctgggctctagtgatcctcttgctttggccttctaaaatgttrgattacaggcataagccaccatgcccagcctcatcttcacttatacttagtaaattgcaaattagcactataatgaggtaccagttttcacctatcagattgttagagattaaaaaatttgatactttgtattggaaatggaaaactggcagtcacatactttttttgtgtgggagagtacattgaatgtttttggaagacaatttggcagtatctatcgaaatgtgaaataaatataacttagatttcccagttttatttcaagatatttatcccataatatatacatgagtgcagagtgacttaagttatttattgacgtcttatttattataattacaaaaagcaatgtccacaaatggtggatggttaataaattacagtacagatgctccttgacttacatgggggtatgtcctggtaaacccatcataagttgaaaatactgtaactctaaaatgcatttaatatacttagcctaccaaacttcatagcttagccttgcctaccttaaatgtgctcagaacacttacgttagcctacagttgggcaaaatcaactaacacaaagtctgttttataataaaatggtgaatatcacatgtaatttattgaatattgtactgaaagtggaaaatagaatgcatgtatgggtacttgaagtacaatttgtacagaacgtgtataatttttacatcatcgtaaagtcgagaaatcatatgttgaaccactgttaagtcagggaccatcttaacctccatgttgtggagtattgtgaaactgtwaaaagaactctgcaagtacaaatatgacaaagtcttcaagaaatgcagtataatacttacaggtggttttttgggtgggaaaaataagaatgaaayagtataaaagttgagtcccaaagggtatttagaatattctgtaatgtatgaaaatcacatatgcacacatacatgcacayatatgtttttctttgggaatgaaaactaaaaataatttcttctaagataggaattagcttatttaggatatatgggtggaattgagatctgattttcactctgtgtccttgatctgttatcaattccttcctttctttctttgctttctttgactttctttctttgtcctttctctttcttttcttctttctttttctccttccttccttccttccttctttccttcttttcttctttttttttttttttttttccacaaagtctcactctgttgcccaggctggagtgcagtggggtgatcttggcttactgcaacctctgcctcccggattcaagtgattctcctgcctcagcctctcagatagctgggattacagatatacaccaccaagcctggctaatttttgtatttttagtagagacagggtttcgtcacgttggccaggctggtcttgaactcctggcctcaagtgatctgcctgactcggcctcccaaagtgctgggattacaagcttgagccactgtgtctggcgtgttatcaatttctttattccttttgcttaattttttttaacattttaattttttattattattatttttgagatggagtctctctctgtcgcccaggctggagtgcagtggcacagtctcagcttagtgaaacttttgcctcccaggttcaagcagttctcctgcttcagcctcctgagtagctaggattacaagtgtgcaccaccacacccggctaatttttgtatttttagtagagatgggatttcaccgtgttggccaggctggtctcaaactcctgacctcaagcgatccaccctccttggcctcccaaagtgctgggattacaggcctgagccactgcgtctagcccttaattttttagtttttgttttttttaagacagggtgttgctttgttgcccaggctggagtacagaagcatgatgatggcccactgcagccgagacctgctgagcttaaaagatcctcccaccttagcctcctgagtagctgggactataggcacataccaccaccctttactttttaaaaacattttctgtagagatgaggactcactgtgttrcccaagctagttctgaaccctggagctcaagcgatcctcccacctcagcctcccaaagtgttagcattacaggtgtgagccactgggccgggctttcttttttctttaaaccatagattaggaatgacttttttgtatattacctattcaataagtgattaaaaagaaaagttatagtcttaagataatctgcaaacagtttgaactactactgaagggggaattaatgaattttataagtataatggtagaaaaatttattctttttcttgaaggtagaacgtaatatagccccaccccacccccccactctggtgcggggcccgggttgagagagaatattaactgcttatccctcctctatgcgcagagaggcttatctgtgttccatcgttttacattccttgaggcacagcgagttcttgcttccctccctagctcggctgtaaagtcacaaagttgataagcaattgctacaaaagcatgtattcccaaggatgtaaaacatatggtgtaacaaatgtaaaagagtaattaactgcctttgatctcgcttctgcaagtacccttcctgcagcacgtaactccctaactcctgccacaaactgcttaaaaggtgattgatccctttgttcagggatcagactttctggaccctagtccgactgcgccagtgatcaccttaataattagacactctcctgaactgtgctcagtctctcccgtctctgatttgtcccacaacactacctaaatgaaagatttatatagaagcatgaatgtgactgggcggggtggctcatgcctgtaaccctagcactttgggaggccgaggcaggtgggtcacctgaggtcaggagttcgagaccagcctggccaacatggcaatatcccgtctctactaaaaatacaaaaattagccacgtgtggtggcaggagcctataatcccagctactcaggagcctgagacaagagaatcacttggacctggggagggtgcaggttgcagtgagccaagatcgcaccacttcactccagcctgggcaaaagatcaaaactctgactcaaaaaaaaaaaagaagtatgaatgctaaaagtcattttggagaaccagtatctagcatggttgggaaattgactggagtggtatgctttcaggtattaagggaaatactttgtgatttttttctttcccctgaagtttggtctgggtgtccagttcattgctgaacaaagcatagcagttacttcatggcaaaagatgcattttaaaacaacaatacaaaacagctttattaagatacaattcttggctaggtacagtaccttgagcctgtaattccagcactttgggaggccgaggccagaggatcacttgagcccaggagtttgagaccagcctgggcaacatggtgagatcccatctctacaaaaaataaaaaacatttagctgggcgtgatagtacgtgcctgtggtcccagctattctgcagactgaggtggaaggattgcttgagcctgggagatggaggctgcagtgagtcatgataacaccactacacccctgcctgagtgacagatcaagaccctgtctcagaaaaaaaaaaaaaaggtataattcttatactgtagaattcatccctttaaagtgtagaattctgcagtttttagtttattcagagttacacaaacatcagcactctctaatatgaggttttcatcactgcagaaagaaaccttccttatacccattagcagtcagatcccaacccctgctctgctcaggtcctggcaactactaatctattatttgtttctatagatttgcctattctagacatttcatataaatagaatcatataatatgttgccttttatgactgactttttaaatttagcataatgttttcaagattgatccctgttgtagtgtgaatcagtacttctgtcctttttatgactgaataatatccgattgtatggatatacaacatttatctattaactgttgagggacatttggattgtttccagtgtttggctattctaaataatgctgcagtgaacatttgtgtacacatttttgtgtgttttcatttctctcgagtatttacctaggagtggaattaccagatcatatatgaaaactctatgtttaacattttgtggaatggccaaaccgtttttcaaagcagctgcaccattttacagtcccactagcaatgtatgagggttccagtttctctgcttccttgttaacatttgttattttctttttttaaaagaattttatccatcctagtgactatgaagtggtgtctcattgtggttttgatttgcatttccctaatgatgaatgatgttgagcgtcttttcatgtgcgttttggccatttctgtatcttctttggagaaacatttattcagtctcttacccctttcttgtttttttttttttgttttttttttttagataattaaaactttttttttttttctgagacagagtctcgctctgtcacccgggctggagtgcagtggtgccatctcagctcactgcaacctccgcctcccaggttcaagcaattctcctgcctcagcctcctgagtagctaggattataggcatgcaccaccacacctggctaatttttgtatttttagtagagacaaggtttcaccgtgttggccaggctggtcttgaactcctgacctcgtgatccgcccacctcagcctcccaaagtgttgggattacaggcgtgagccacggcgcccggccaaaaaattttttttaaagacagggtcttgctatgtcgcccaggctggtctcaaactcctgagctcaagcaatcctcctgcctgtgcctctcaaagtgctgggattacaagcacgagccaccatamctggcctcttgaccatttcttaattgggttatttgtcttttcattgttaaaactgtattttatataaatgcattaaaatttttaattgtgttaaaatacacataacataaaatttaccatcttaaccattttaagtgtaccatttagtagtgttaagtacatttacattgttatgcaatcagtcttcagaacacttttcatcttgcaaaactaacactctatactcattcaataacaatttcccacttttctcattctttctttacctcagcccctggcaaccaccattctattttctgtttctatgaatttggttcctctaggtacatcatataagtggaatcataaagtgtttgtctttttgtgactggcttatttcacttagcatatgtcatagcttatgtcagaattttctcccaaagctgatgcatttttaattacttatattttctgagccatctatgactgttaataaggaaaacttgtgtatctatgtatgtatatagtcacatgaaacatctatatgaatgtttatatatatgcacataacagtaagcatacagtgcaagatgtgaatagggtaaaatatttttaattgtattatatgaataagcagttgtgatcttgaatcatttattgcataaatcttagcagtattataagacaagcagaaagtgaggatgcaaagagaaatgacatctacatctaatgaaccttaaaatcacaagcttggaattaactataatcctggaatattttccaaacctgtaaagaaaaatgtgatgcgtgcagtggtgaagagattaaaggcaatctgttaaaatggtatcctggtagcagtgagcacacctggcatccaggtttgggatcctaaataccactgcttactaaaagagtcaagtgctccttggagtagtgactgacatctgtcaagtgaggaagtactcaaaggctgaggaggtaatgtcagaaggacatacgagcagatttgaagaggctcccaaaggccaaattggagagaatttgagaatcaacaagaataatgatggtaacagattatagcacagtgaattgaaaaacaaaaatttgtgagtctatggagacttaaaaaaaaacaaaaagagcaagacagggaaaaaagcgaaaatgatttttttcagaaaaacagaagaatgttaatgaataaatgtggaaggaataatgaaattttaaaaatcagtattttggctgggtgcagtggctgatgcgtgtaatctcagcacttcaggaggccgagcgggcagatcccttgagcccaggagttcaagaccaccctgggcaacaaagcaagaccctgactctacaaaaataaaaataaagatcactattttgttatcatcaatgtaatgaattaggcaaagattattaatgaatctaaaaccattaggaggaagattgttggagaacaaaaatactcatgtagtctcaaattagtactccacatattattattattttttttcaagtcatagtcttgctgtgtcacccaggctggatgcagtggcgtgatcttggctcactgcaacctccgccttctgggttaaagcaattcttctgcctcagcctcccaaatagctgggattacaggcatgcaccaccatgcctggataatttctgtagttttagtagagacggggtttcaccatgttagccagcctggtctcgaactcttgacctcgtgatctgcccacctcagcctcccaaagtgctgggataagaggcataagccaccgcacccgtcccacatgttattaattataaagaaaaaaatatgccttgaaagtagagtgatctattggtgaccacatttactgagtggttgaggttgacatgtccggtggtgtggtggtccaatattatatacktcttaatgtgatgctcttagggagttgcatagcaagacttgcgtgtgttcttgctagacgtctttgatctgaatctaaccctgaggaagcagagacatctagaatgtggtgcattatgtgtgggacaactggacaggactctttttttttctcccccctgagacagggtcttgctctgttgcccaggctggagtgcaaagatcatagctcactataacctcaagctcttcagctccagtgatcttcctgcctctgcctcccaaggagctgggactataggcatgtgccatgacccacactcagataatttttaacttttttgtagacatacggtctcaactgtgttgtccaggcttatttcaaactcctggtctcaagttatccttccactttggcctttcaragcactcggattataggtataagtcaccatgccttgccaggactccttaaatgagtcagtgtcctgaagaacagagcaaagtggtaggtggagggagataattgggggaacattctagattggcaaatgtaatgcatgaaccttgaatatattgggggaaaaaacagccatttaacacatatttgtgtgttacccctaaaagggttctgtggaacattaaggactttctggtttgaaagtttgaaatgtcttggattatgtgaggctgtatctattcaaggccttctctccatatataagttgggggaaaagatagctttaactttttaaaaattctttttttaagctcccaagtgcttggaaaccttagctttaaataaaaacacaacttcttattatggaaaattatggaagagttccagtaccatatatacaaataaaatagtataatgaacctataaatcacccagctttaataatgaccaacaatttactaatcttgttttatttaactctctctttttttttttttgaggcagagtcatgctctgtggcccaggctggaatgtagtagcgcaatctcagctcactgcggcctgctgggctcaaatcatcctctcacctcagcctctcgagtagctgggactacaggtgtgcaccaccacatccacctcatttttgtatttttgtagagatggggtatcgctgtgttgcccaggctggtcttgaactcctgaacttaagcaatccacccacctcggcctcccaaagactgggattacaggctatgaaccactgctcctagtgtaactctctcttttgctgaagtattttaaagcaaatcccaaacatacataatattatttcatccctggatactttattataaatctcaatgactttaaacataaactacaatgtcattatcatacctaacaatgtttcttaatatcttatgtctactccacgttcaaagtttgccaggtgcttaaaaatttttatagttaattcgcttaaatcagtatccacacagagtctatacattgcatatttttggtcttgtttcagttttttaaagtatcttttaatttttaaagaaagacccctttctttttttaaatgccatttgtttattgactaaagtagttcatttgttatatagaatttcccatattctgaatttggttaattgtttcctagtggtggttgacttattcttaaaactttttttttcaggaacacttcctaatggtccttcctgttgcatcatatcaggaggtccataatgtctggtcatccacttttagtgactggaataagtagttgttaatttttttttaattgttccatggaatagggcattttcgttctatctttctctttggcattggctgttttctttttttttttttttttaatttaaatgtggtatgtttattcagttctttttttttatttttatttttttttattgatyattcttgggtgtttctcgcagagggggatttggcagggtcataggacaatagtggagggaaggtcagcagataaacaagtgaacaaaggtctctggttttcctaggcagaggaccctgaggccttccgcagtgtttgtgtccctgggtacttgagattagggagtggtgatgactcttaacgagcacgctgccttcaagcatctgtttaacaaagcacatcttgcaccgcccttaatccatttaaccctgagtggacacagcacttgtttcagagagcacagggttgggggtaaggtcacagatcaacaggatcccaaggcagaagaatttttcttagtacagaacaaaatgaaaagtctcccatgtctacttctttctacacagacacggcaaccatccgatttctcaatctcttccccacctttcccccctttctattccacaaagccgccattgtcatcctggcccgttctcaatgagctgttgggcacacctcccagacggggtggtggccgggcagaggggctcctcacttcccagtaggggcggccgggcagaggcgcccctcacctcccggacggggcggctggccgggcggggggctgacccccccacctccctcccggacggggtggctagccgggcagaggagctcctccttcccagtaggggcggccgggcagaggcgcccctcacctcccggacggggcggctggccgggcggggggctgaccccccaacctccctcccagacggggcggctggccgggcgggggggctgacccccccacctccctcccagacgggacagggcggctggccgggcgggggtgctgaccccccccacctccctccaggacggggcggctggccgggcgggggctgacccccccacctccctcccggacggggcggctggccgggcggggggctgacccccccacctccctcccggacggggtggctggccgggcgggggctgaccccccacctccctcccggacggggtggctgctgggcggagacgctcctcacttcccagacggggtggctgccaggcggaggggctcctcacttctcagacggggcggctgccgggcggaggggctcctcacttctcagacggggcggttgccaggcagagggtctcctcacttctcagatggggcggccgggcagagacgctcctcacctcccagacggggtcgcggccgggcagagacgctcctcacctcccagacggggtcgcggccgggcagaggcgctcctcacatcccagacggggcggcggggcagaggcgctccccacatctcagacgatgggcggctgagcagagacgctcctcacttcctagatgggatggtggccggaaagaggcgctcctcacttcctagatgggatggcggctgggcagagacgctcctcatatcccagacggggtggcggccgggcagaggctgcaatctcggcactttgggaggccaaggcaggcggctgggaggtagaggttgtagctagccgagatcacgccactgcactccagcctgggcaccattgagcactgagtgagcgagactctgtctgcaatcctggcacctcgggaggccgaggctggtggatcactccggttaggagctggagaccagcccggccaacacagcgaaaccccgtctccaccaaaaaaatacgaaaaccagtcaggtgtggtggcgcgcgcctgcaatcgcaggcactcggcaggctgaggcaggagaatcaggcagggagattgcagtgagttgagatggcggcagtacagtccagcttcggctcggcatcagagggagaccgtggaaagagagggagaccgtgggtagagggagaccgtggggagagggagagggagagggagcgggagcgggagctggctgttttcattgataaaatagttataatttttttttttttttgagacggaatctcgctctgtcacccaggctggagtgcagtggcgccatcttggctcactgcaacatccacctcccgggttcaagcgattctcctgcttcagcttcccagtagctgggattacagccgccaccacgcccggctaattttttgtatttttagcagagacagggtttcatcatgttgggcaggctggtcttgaactcctgaccttaggtcatctgcccgcctcrgcctctcaaagtgctgggattacaggtgtgagccaccatgcccggcccaaatgtttttaaatctttgacataatttctgacttacagaaatattatgcagatagtacagttcctgtgtacttttgtccacacagtcttaccattggtaaagcaaatctcaccatttgctttatcatttattctctctccctttatcccctctctcctctgtgtgtgtgtgtgtgtgtgtatgtgtgtgtattatatttccgtttttctgagctctttgagggtaaattacaggcataatgctctttacctttaactttttttgagatggagtcttgctctgtcgcccaggctggggtgcagtggtgcagtggcacgttctcagctcactgcaagctccgcctctcgggttcacgccattgtcctgcctcagcctcccaagtaactgggactacaggcgcccaccaccacgcccagctaattttttgtatttttagtagagatggggttttactgtgttagccaggatggtctcgatctcctgacctcgtgatccgcctcggcctcccaaagtgctgggattacaggtgtgagccactgtgcccggccaatgctctttacctttaaaaataaggacattctcttacatacccatagtacaatttttgaaatctggaagtcagcattgatataacactattagccaatttatagaccttattcagatttcatcaattattctgataatattccttataggaaaagaaaatagtagattgtgagttttatttgattgtcatgtctttttagtttcctttaaagaatgactgagaaatggttccttattcttttatgaccttgaaaaccttgaaaatwtttacgaatatgggccatttattttgtataatgtccctcaatttgggtttgtttgatgtttcctcataattcaatataggttatgcatttttgcctggcatatcccagaaatgaagtatcttagcagaggcatttgatgtcagtgtgtcccataattgtggtgttaactttgatcatctgattaaggtagtgttgacccagtttttccactggagaacttttttctgaastccattgtaaaattactatttttccttttgtgattaataattatctggggcaaaccctttgagattatgtaaatatcctgtttatttttcaaatgttagtccactagttttagcttccatttatgatttttacctgaatcaatcagttattattgagatggctgcccaaaggctgattttcttaattttttctatgtgcattcattatgtatctatatatttgttgggaacggttttccctatttttcatttatatatgtatagaatratgtattaatttatcactatagattaatggatgggtatttttatcaaccaagatctggtagtaaatgtgtttactgctattggatctgatttttttttttttttttttttttttgagatggagtctcgctctgttacagcccaggctggagtgcagtggcatgatctcggatcactgcaatctccccgtcccgggttcaagcagttctctgcctcagcctcccgagtagctgggattacaggtggctgccaccatgcccagctaattttcttgtatttttagtagagatggagtttcaccatcttagccagactggtcttgaactcctgacctcgtgatctacctgcctcagcctcccaaagtgctggaatgtcaggcctgagccaccacgcccagcctgatctgattatttttaataatgagaatactggctgggtgtggtggcttatgtatgtcatcccagcactttgggaggccgaggtgggcggatcacctgaggtcgagagttcgagaccagcctgaccaacatggagaaacctcatctctattaaaaatacaaaattagcctttgtatttttgtatttgcttatatatgcaaagaatctattccttcctttttggaaggagtcacaagaaactagtaatattggttacctttacagagtgaaacctggatggttggaaatgggagtagggtggagacttttcacttataaatcttttaatttttttactgaattaattaaaagttaaaaattcacacactggaggtctaaaattactgaaacacatgatctgaatgtaagaattctaatcaaacagtttacttaagtaatacctgggcagatagccaagataacttggttatcttggtagatgacaatagtagaaaaattggtagaaagttggcaactttatttatataccatgatgtgtgtactttagtcttaatgaatattttgttttcttttggcagcatgcatatgcgctagaacttctatttgatcagttgcatgaaggagctaaagctcttgatgtaggatctggaagtggaatccttactgcatgttttgcacgtatggtaagagttttatttctcactctggccccaacagaagaatattatatgatttggctgtatgtttttttaactagtggttttcatgtttatttgtttgttaattctattaggatagcagttggaatgagcatcacttaggattttgttgttgttgcaagtgacagaacatgcaacccaaactggcagagctaaaagggagtttatttagttcatataacagaaaagtctaggggtgtatacggtctgttgtgtggctggatttagaagagcagatgttgttattgacgatagggttctctctgtttcttgatttggctttactttcctccacatgttggtgtcattatccggtaagctctacccttgtaatcacaagatggtggccagtagctcccaaactaccttcttccaagttctgatttggcagaaaagaatagaataagcctggttttcttttcttttttttttttttttcttcttaaaaacagaggttttattgcatttggtccacagttggtatttcaccttatctcatggtgcagggaccctgggtaggggactctctacagtacttggtggggcatgtggctgggggagacagagcagtatagctggtcaggcccagaaggggagaaggaaggctggaggctccttaaaacctactgagggaccagacgcggtggctcacacctataatcccagcactttgggaggcttaggcaggcagatcacatgaggccaggagttcgagaccagcctggccaacgtggtgaaaccccatctctactaaaaatagaaaaattagccaggcatggtggagcacctgcagtcccagctattcaggaggctgaggcaggaaaatcccttgagcccaggaggtggaggtgcagtaagccttgattgcaccactgcactccagcctgggcaacaacaacaacaacaaaaacctactgaggcacagtgtggggggtgggsttagcatggagagggggtcaggcttagccycracaactcagaattctacttccttgtacaggcctcagtttccccaccgggccctgggacatgtctgagggtcccagggaaatccagtcactcaggagcctgagatatttagcatcgtagctgggccccrtctcccaggggactcatttcccagcaccctctccactgtccctgcccagaatgagcctggtttctaaacattcctgcagatttaccaggatgaaggtaaaacttctgcattagaaaaagtgctcttagaaaaataatgccttgttatacttctgccttttctcatcagagtcttatctggtcaatggctatccagagtattaactggggacccactaatatatgttggagtaaaggttgatcattgcttagatcatcacatcagtttgatttgagaaatatcgtgcctggaggacagattggaatattctgatctagttaaattgggagttgtggatccaccttggactagaatccatgtaacttgctataaatgtataatcagcagacttactagaatgtaagctccagggagttggaaattttgtctgctcttttttatcatgatggtatcctaaacatctaaaacaatgcctggcacataataaggactcatattttctcagatgttttgctcattttgtagaggttaagtcctcattaatggatatcagtgattttttttaaggttagaaatgccatttaataaatgactcattctctatacttgacatgtttatagttttagaggatgtattcattttaaaaaatcatttggtttctgagttgtttttcataaaatggcattaatgtttttcacacatttaccatgtgtgaaagtactttgtgttttaagcactagagcctgtgttctaagtgctaccccatttttatgatggggtttatgcctttttcctccccattttgtactgaggaacctgattcatacaaggaatgataggccgggtgtggtggctcacgcctgtaatcccagcactttgggaggccgaggcaggtggatcacctgaggtctggagttcgagaccagcctggccaacatggtgaaaccccgtctccactaaaaatacaaaaattagctgggtgtggtggcacacgcctgtaatcccagctatttgggaggctgaggcaggagaattgcttgagcccgggagacagaggttgcagtgagctgagatcacgccactgtactccagcctggccaacaaagcgagactttatctcaaaaaaaaaagaaggaacggttaacttgccaaggtatgtatgtatgtaagtgatgacacttagacaagaacccagatagtttgacttcaaagcctttatgtgttaattttttaaatttttatattttttcttgaaacatttatacttaatattttaatttacaaataaatatgcaaagaagggatttttgttgttgttgctttttgtttgttttctgagacagggtctcagtctgtcatccaggctggagtgcagtggcacgatctcaactcactgcagcctctgcctcccaggctcaagtgatcctcacaccacatcagcctcctaagtagctgggacttaggaggcacaygctaccacacctggctagtttttgtattcttttgtagagatggggttttgccatgttgctcaggctggtctcaaactcctgggctcaagcagtctacctgcctctgcctcccaaagtgctgggattataggtgtgagccactgtatatattttcatgttttctactaaaagcagtagaaacaagtgtagaaattccttcccatcaggcgggaggcagggtgtgtggtggctcagtcctgtaatcccagcactctgggaggccaaggcgggcagatcacgaggtcaggaatttgagaccagcctgaccaacgtggtgaaaccctgtctctactaaaaatacaaaaaaattagctgggcatggtggcgggggcctgtagtcccagctactcaggaggctgaggcaggagaattgcttgaacctgggaggcagaggttgcagtgagctgagatcgtgccactgtactccagcctgggtgacagagcgagactctctctcaaaaaaaaaaaaaaagaaattcctccctgtcaaattctttatgtaacattttaatatttaaagttatactttagatggaatttaaataaaaaattattgtactactattaaatattggtaattttcttcaaagttctagatttaatctaagaaagatataatttttcttagtattacaagttttattcaatgagagtgatagttgagaaagttgtatatatggtaaataatttatgataaactgagtgtttagcaatctatagaagccttaagctatttttgttttctctttgtagaatatgactttcgataaggaaaaacttcaataatactttagaaaaacaaatttagcccaatgagctactgaattgttttctcttttccaggttggatgtactggaaaagtcataggaattgatcacattaaagagctagtagatgactcartaaataatgtcaggaaggacgatccaacacttctgtcttcagggagagtacagcttgttggtaagtatcagaaaactttaaaaatttcttcagaggatttttattttcagaagatccaatgcaagctaaataatactcagaggtaattattgtatttttttttacaatcacttttaagtactaaaaaataaaaacgattatttttgctcacctagtgtgtattttgcagccatctctttgtgagtttaattttgtattttcctattaacctctgagattgaattttttgtaatgtgtctgaccattaggattttgtcttttgtgaagtacctgttcagatattggattgcttgtatttttgacttacagggcttctagccctttgtctatatatataaatacatttcttctcccatctgaggtgtgccttttcatcttattggtacccttttgataatagaaattcttaattttaatgtagtcagacttaccaatttttttcagtgctttctgtgtcctttttaaggatactctgagaccatgaagatatgtctcttattatttcttagaacctttatcatttttagcttttcatgtttaggtttttgatcttcctgatgttggtttttgtgtatgtgtgaggtaaaggtgcagttatatgtttttgtgtatgaatatccagttgtattccccagacacactcagttttgtttaaaagataaaatattggccaggagcggtggctcacacctgtaatcccagcactttgggaggctgaggtgggcagatcatgaggtcaagagtttgagaccagcctgaccaacatggtgaaactccgtctctactaaaaatacaaaaataagctgggcgtggtggcgcacgcctgtagtcctagctactcgggaggctgaggcaggagaatcgcttgaacccgagaggtggaggttgcagtaagctgagatcgcaccactgaactacagtctggcgacagagctagagtccgtctcaaaaaaacaaataaaataaaataaaggcccgggcagctctagtagccacagccaccccctagagggatctggctgaggaggaagtggaggtgttgcttgccttggcctttgccctgatcctgtgtggacactgaaaggggaatacaggagtaaaccacaccaaaatgagtctcatgttgccagtgagggacatgagagatcaagagatagacgaaggtcaagtgacagatcacgggattcatctcatgaaagaacagagtctcaactcacttcttgtattagaaacgtttcttctctggctggatgtggtggctcatgcctgtaatcccagcactttgggaggccaaggcgggcggatcacttgtcaggagttcgagaccagcctggccaacatggtgaaaccccgtctctactaaaaatacagaaataagccaggcatggtggcaggcacctgtaatcctagctactcaggaggctgaggcaggagaatcgcttgaacctgggaggcggaggttgcagtgagctgagatcacgccattgcactctagcctggcagacaagagcgagacttcgtctcaaaaaaaaaaaaaagaaatgttaacttctccaacacgacagcgccatgttgcatgagaaaaagatcacagttcctctygtccaagcagtccttgttctccaaaagcctctccagatggttccattagcagtactgggaacagcagtagaaacactagtcagtcaagtttagataatagctgttaagatatctggggagatggtgtttgtatttgagaatgcaaaagaaggagctctgaatataagaacataagaacaaatagcaccaatagtgagtaacactatatttgttgtagayccatccgtttctactgcacagccaaatacagtgttgggcaggatgtttgtttggatctggccgagaacacaactttacacaacccaatgagaaaggagagtatgaagtagcagagggaattggttccactgtgtttcaatctattctggattactataaaataggaattacytgttgtcctgatggcataactgttcctgaattgagagaagcatgggactatctatgtatgtcttttgaatgtagtactattaaggtactatatcttaagytaacttaaataggtgctgctgccaaagtattcctccagtaaaattcatatagtttgctgcccataaggagcaaaaaatatttatcttgggcttatttgaatgattaggatgagatttaaaacagaacttttcagttccgttatctccagtgccgtttcatgctttagagtgagtcacgtgcagggagtgtgaacgtcagaggtggtttattatccagtctgccttatccttaatctgttcacagatatttatttactaatgctttcgttcttaagagttgtgggatagaggctgggcgcagtgtctcacacctgtaaacccagcactttgggaggctgaggcgggtggatcacctgaggtcaggagttcaaaaaaaagagttgtgagataggaaaatgaagcgcttttcatttactaaatgattgttaactccagtttttcatcaaaataaaattccattgttttaatgtttctgaccaaacaaaaaataaaataaaatgagttaaaaacagcaaaaaagtgaatatccagttgtcccaggatcatttattgaaaaatctatcctttctccattgtaaacctcctgtactagaattcttcacattaagtttgatctaaacaggtttttaaagcatagctgtttttctttcagtgggggatggaagaatgggatatgctgaagaagccccttatgatgccattcatgtgggagctgcagcccctgttgtaccccaggcggtgagtcgggattttttctgtttgtgtgtttttattcaactaaaactctacaagacttaaatagaaaagacttctagatgatgttcaaaatataattagacttttatatcatacattttggttacatttagctgttactcttttcttttttcatatgcaaacaattgtataaatgacatgaaaattactaaaccccagtttgtggcgctcatatttgatccaggtaagaactaggacaacagtagaattgggaaaatccctctggagtttatgacctgataatcaggttttttttgtttgtttgttttttgttttttgttttttktttttgaggtggagttttgctcttgtcacccaggctggagtgcagtggcccaatttcagctcactgcaacctccgcctcccgggttcaagtgattctcctgcctyagcctcccgagtagctgggataacaggcgcccgccaccacgcccagctaatttttgtatttttagtagagacggggtttcaccatgttggccaggctggtctcgaactcctgacctcgggtgatctgcccgcctcagcctccgaaagtgctgggattacaggtgtgagccactgcacccggccagtttgatgttttttaaatagcagaatatgtaaggctgtatttggtgtatgggagatatgagaaagtatttgccatacattatattctcacaaagcttgtattctagaagagatatgtcatatatgtaactgggaaattagcgatatgataacatataattaacacaggatatctattggaaggaaaataaaatatgcatatgagggagagaattgtgcagtgagtggtcaaggagacatcacacacggatggaacttgaactgaatcttaaagaatagtaggatatatggccgggcatggtggctcatgcatgtaaccccagcaccttgggaggccaaggtgggaggattgcttgagcctaggagtttgagaccagtctgagtaacatggcaagaccctgtttaaaaaaaaaattagccaggcacagtggcgcatatgcctgtagccccagctactctggaggctgaggtgggagaattgcttgagcccaagctgttgaggctgcattgagccatgtttgtgccatggcactgtagcctgtggtcctagatttctgttacatatggcttttgcgtagttcttgactagatgaccggggatgaaggtgacactgtttcttctgtctagtctcatccgtttttttggtaggcttagatcagttatgggaagatgaaagttgtataatttgttctggtcattgacttgctgcttattggccaagtgactgggaaaatgacttaattgctttggccctgttgattatctgtttaaaaaaaaaaagtagctcacgcctgtaatcccagcactttgggaggctaaggcagatgaatcacttgcgctcagaagttcgagaccagcctgggcaacatggcaaaactccatctctacaaaaaatacaaaaaattagatgtggcaggcacttgtagtcccagctactcaagaggctgaggtgggaggatagcttggattgcgtgagcctgacaggttgaggctgcagtgagccatgcttgtactactgcattccagcctgggtgacaaagtgagaccctgtctcaaaaaaaaaaaaaaaggtagattgaactggtggttttacacattttaactgaagtattaatataatgtagaaaattttacaagtcataaacgaacagctcaatgaatttgaacacatgaccaatgggtttttaacttttcaaaaaaaatattgataacctagagtgaacagttaaaatctgaaatagaactgtgcttaaatgaggcgggtgggtgcagggcccatttctccctactgggaccctgaagtgatcttgaaagatatttctagatttaattaaattgaatttaaatattgtagtaatacttgcaagtattataggggtatgtatacatctgatttaagatagatgtactgaaggggctttccagttttaagatagcagaatgaagatgtttatgccttcttttggatatcaccccaagataaccagaaaaacagaagcataaactccatactcaattaactaggagactatacctgcagtcctgaactccacagtgtgtgaagatagaaagcagatggaataatagctgacccaggagggtagaggaagtagaaactaaagagactacagagtgaaatattatgcatacgcagtttgcwctgcaaaactctgaaaaggcttaggaattggtggcatcaagaccttgaaaatcataggtaaaacatgggtctgaaaagagggaatgctgcttgagactctgcatgaggaataatcagcactaatcyctacgtaagaaattttctaaaaactgatggacataattctaacacaaagaatttttaaaataagaaaaaagaacaaccatatcatttatattcagaatattaggggataaagagaagattctgaaagcctctagaggccaggtgtggtggctcacacttctcagcagtttgggaggccaaggaaggaggatcgcttgaggatctgagtttgagaccagcctgggcaacatagcgagaccccatctgtacaaaaaaattttaaaattagccagatgtggcagcctgtgcctgtagtcccagctacatgggaggctgaggtgggaggattgcttgagcccaggaagttgagatttcagtgaaccatgattgcaccactgtattccagccgaggtgacagagaaagaccctgtctctaaaaaaaataaaagcttctagaaaaataaaacagatctcctgttaaggactggtaatcagaaaggcatcagactgcaaacagcattagaattcgtaagtcagagtaccaaaccatcaaattctgagttgmaaattatttccaacctcgaattctgtatgcacacacatcaccaagatagttttaggtttgcaaatctccatctctttcttttaatacattccatgcactatttcacaaaatgcttctgaaggaactttcttaaatgattaagatgtcttaaaatgtcttaaaatttaatgtattaaaatgccatttttgtcatccaaaaatgaaatgagggaagagacagatagtaggaaaaaccaaaagaggaaaccacatagggcatcttaatcaggcagaggcatggaagtttgcaggattgttacaaagggaagggcctggatggaagctgtgcagcaggcctggagaataaccagctcagatttggagcaagaggaggaaaggaaacaatgattggatacttcttgactcagcagcaaatcatagttacacagtcataactagaaatgattttaataaaaaatgattggttggattgggggaaggaagcaaaatgtagattaagggagttcaatccttatctagcgtatgttttgaaatataaaggtaaatactagaagacatagctaaaaggatttgaaatgactggatttagagagcaagggtggggtagggagaggaagtcagctgtttttcattataagccttgaaattgagaaaaacaagaagatagacttgcagacaaccaaaactttgattgagggcaccctttcctgaggtaataaatatccaaagtaaggtttctggctgggcatggtggctcatgcctgtaatcccagtactttaagaggccgaggagagcggatcacttgaggttaggagttcgagaccagcctggccaacatgttgaaagcccgtctctattaaaaatacaaaaaaaattagtcgggctcggtggtgggcacctgtaatcccagctacttgggaggctgaggcatgagaattgcttgaacctgggaggcggaggttgcagtgagccgagatcgtgccactgcactccagcctgggtgacagagcgagactcagtctcaaaacaacaaaaaactacaacaaaaaacaaaacaaaacaaaaaaccagagtaaggtttcttctttaatgttttttattaatagtgatgcgtaaagctatatgaaaatggtaacatgatttaaaagttttctgactgtaagagcttccattgagtactcttggttcttcattgacaggagtgtcctcattctaacactgcagggactccagccctaccttccctccttatggtaccagtaaacctcaattgaatcgtataactagggttcccttatcccttcagtgatgccctagattctacaataataggatagggattccttgctgattttctacacttcctctcctcccctcctccttccttcaaacccacaaagattcaaaacaggcacacaggcattagaattctatgctctgcctttggcccgccaagaggatagttctatattagttggttcagttcaaacattttgagcactacagttgtaccaggtactgtgttagatgctaaagacacaaagatgaataagacacagtccccatcctcaagagcttgtcgtttaatagaggaggctgatagttgagtaataatataacaatcaaagtatgtacagggtgagtatcccttctccaaaatatttgggaccagaagtgttttggattttggattttttcagattttttcacattttggaatatttacatatacataatgagatatcttgggaatgggaccaagtctaaacataaaactcatttatgttatacctcttatacacatagcstgaaggtaattttgtataatatttcaaataattttgtgcatggaataaagttgtgattgcattttgactgtgacttgccacatgaggtcaggtgtgaaattatctacttgtggtgtcatgttgatgttcagagttttggattttggagcatttccagtttcgggttttcagattattgatgctcaacctgtatatactatgtatttatttttaagacggagtctcgctctgtcacccaggctggagtgtggtggcrtgatcttggctaactgcagcctccatctctgggttcaagcaattctcctgcctcagcctcccaagtagataggactacaggcatctgacaccatgcctggctaattttgtacttttttagtagagttggagtttcactgtgttggccaggctggtcttgaactcttgacctcaagtgatctgcccaccttggcctcccaaagtgctgggatcacaggcgtgagccaccgtgtctggccttaatttgtatatactaaataaagaacgtttctgctttctgcctatggacactaaaagttgtttataatgatgtcaaatgactattaatataaaatctgggccgggcacagtagctcacgcctgtaatccaagcactttgggaagccgaggtgggtggagtacttgaggttaggagttcgagaccagtgtggccaatatggtgaaaccttgtctctactaaaaatacaaaaattagctgggcatggtggcgtgtgcctgtagtcccagctacttgggagactgaggcaggagaatcacttgaacctgggaggcagaggttgcagtgagctgagatcgtgtcattgcactccagcctgggcgacagagtgagaccctgtctcaaaaataaataaataaaataaaataaaatctgtaacttggtgatgtatgtgcttttttttttttcttttagctaatagatcagttaaagcccggaggaagattgatattgcctgttggtcctgcaggcggaaaccaaatgttggagcagtatgacaagctacaagatggcagcatcaaaatgaagcctctgatgggggtgatatacgtgcctttaacagataaagaaaagcagtggtccaggtggaagtgattttatcttctgctctttcttcttccacacatgcaaggtgaaagggtgtggattttaagacattagactacaagagctgtttttggttgtcacctttatgctcctccattataacgtcagaaattcattacattaaaaatgtgaaaaatgttgcatggtctgcccttattttggtttaacatatatatctttgggaaagggagggtgagacttggttggcacaaaggctttttttgtttgtttgtttgttttttttttagagagactttcagcttcaattcagtactttgtaaggattttttcttcattatcagccactctgtttttatgtttttaaattatttttatagcactggatgggcatggaaacaatgagtttggtctgtaaaagaggccaggcggagtggctcatgcctgtaatcccagcactttgggaggcctaggtgggcggatcacttgaggtcaggagtttgagactagcctggccaacatggtgaaaccccrtctctattaaaaatacaaaatcagctgggcgtgatggcacaggcctgtaatcccagctactcgggaggctgagccaggagaattgcttaaaccctggaggcggaggttgcagtgggccgagattttgacactgcactccagcctgggagacagagcaaggctctgtctcaaaaaaaaaaaaaaaaaaaaaaaaaaaaaacaaggggccatcatttcctgccctgtttattgtaccaacaaggagaaagaaggggaaagataacggtcgtctcagttttctaaaatgtcagaataccagagaggacattctacctctcagcttggtttatctgtttcaaccaaatcatagatacctgacagcccatgcctatttttcattcagccttgtttaagagtcaccttctccccattctatagaataggccagccactgtttaagctattctggctaaattcctaggaagaggcaaggattctacaagttacccaatgagtgcccaggtctcacaaacccacccagagggtcagcagcatgcagcaactttcagcacagcatggtttataaagaatgtccacttttgttttatgtctcagcataatctgaatattttgtttgaagccaagatttctcttttcctccccttcccactcccttccatgagagagagtgacatcagtacataacagtgccattagctcaaattacttgaaattaaatgccaaaacaagaacggctttacagtttccttgtcttagcatcttatttttatttgacataaagattcttattttaaaataattagtttcttaataagtaaaaggggtgataataagtttaatagatctctcaatgttgtttttattcttcaccaatagctattttctgtgaattatacgtggagcacagccactggaaaaaaaaaaaaaaaaaaaagcattttagtccaggcattttgggaggctgaggtgagccaatcatcttaagtcaggagtttgagaccagcctggccaacatggtgaaaccctgtctctactaaaaacacaaaaattagctgggcatgttggcttgcatctgtagtcccaggcactcaggaggctgaggcaggagaattgtttgaacccaggaggcagaggttgcagtgagtcgagatcacactactgccttctagcctgggtgacagagcgagactctgtctcaaaaaaaaaaaaaaaaaaaaaaattaaaaaggcatttaaaaaattactggttttttcaactggaatcagatgtagttattaacaactaactaaaaccttccttcactttgcttctagtatggtttatacaattacataattgtgagattattgtagtataaaaggggcaaatatgttactgaaattactgaaatttgataagaagagttgattttcattagcaacttagaaatttttctttttatatacaataaatattagtgttgaacatcttgcctataatttataatttataattatgaaggaattataaaaagggaattttgtttttatgactagaggtagatttactgtgaagctaacaaagctgaagctgcagagcccttgcttgtctaggttttctctgaccctgttcttaatttaatttaatttaaaaaagtgttttttttgagacggagtcctgctctgttacccaggctgtgtagagcagtggtgcaatctcagctcactacaacctccgtctcccaggttcaagcaattctcctgcctcagcttcccaagtagctgagagtataggcgcccagctaaattttgtatttttagtagagaaggggtttcaccatgttggccaggctggtctcgaactcctgacctcaggtgatctgcccgcctcggcctcccaaagtgctaggattacaggtgtcagccaccatgcctggccctgttcttaattttatattatgcatagtcttactgattttttttttaacttcataaaaaggttcccctgttttctaattatataaaccttaggcccccacaaaacctgaatccacctttgataaaaccaaactatttgtattaagaaatttaaaatagggccaggtatggtggcttatgcctgtaatcccaatgctttgggaggttgaggtgggaggatcacttgaggccagaagttcaagagaagcctgggaaacatagtgagacctcgtatctactaaaaatttaagaactagccaggcgtagtggtgtgcacctctagttctggctacttgggaggctgagataagaggatcacttaagcccagaagcggcagtgagctgtgatcaccacagcattccaggctgggcaacagagcaagaccttatctttaaaaaatatatttagaataatttttaaatttatggacaattagtcatctgctaaacattaaatgtatacctgcttttaggctgggcgcagtggctcacgcctgtaatcccagcactttgggaggccaaggcgggcagatcacaaggtcaggagatcgagaccatcctgggtaacatggcgaaaccccgtctctcctaaaaatacaaaaaaattagccgggcgtggtggcaggtacctctagtcccagctactcgggaggctgaagcaggagaatggcgtgaacctgggaggccgagcttgcagtgagctgagatcgcgccattgcactccagcctgggcaacagagcgagactccgtctcaaaaaatgtatacctggttttctttttgaccttcaaagttttttaaaaattgaacaaatttaggctgggcacagtggctcacgcctgtaatcccagcactttgggaggctgaggcgggcggatcacgaggtcaggagatcgagaccatcctggccaacatggtgaaactccatctctactaaaaaaacaatacaaaaattagctgggcgtggtggcaggcacctgtaattccagctactcgggaggctgaggcaggagaatcacttgaacctgggaggtggaggttgcattgagcctacattgtgccactgtactctaacctggcgacagagtaagactctgtctcaaaaaaaaaaaaaaaaaattgagcaaayttacatgttcgcactatcagaaaaaaaaaaaatttctccaggtgtaccaggaggactttctaatttttctgttgtagatgcttttctttggccatttgttcagttgctaaatatttttcagcgtgaggatcttcttaatattattcgtgaattcaaccaatatgcatatgccaactaggccaggcactgtactaggtgccaggagtcatcagctgtgaatttgaaactgactgctctcatggagcttacagtaacgtaggagatgcaaagaccaagatgaataggcagttatagggtagtgttcagactcgcggtagggagccaggcattgaagtgrtcagaattacatttcagaaagataactctagctgttatgtagagactagcctgggaagggacaaaagtcragtcagaaacaggaagtggttatagcaattcaaggatgaaatgatggtctgcattaaggcagtgttagtaaggatagagagaagtgggtggatagctacatctaaaatactgtcactgttttctgggaattatcatctaaaaagttccctagtcaacttcttgccaggctacgtgatttctgttctttcaaactttccgtttttgtttttgttttgttttattttgttttgttttgatacagtctctctctgtcacccaggctggagtgcagtggcatgatctctgctcactgcagcctcaacctcctgggctcaagcgatcccccctgcctcagccttctgagtagctgggaccacagggtgtgccaccatactcagctgattttcttgttttttttgtagacaaggggttttgccatgttgcccaggctggtctcggactcctgagctcaagcgttccacccacctcagcctcccaaagtgctgggattacaggcttgagccaccagcctcaaactttcttcaggattactttaactcattataatactttcctaggaaccttctcttgtgtctcaccagctttccacctttcttactgaggaataatccagagctaattgcggtgctctgatgagggtgagatcccatttttgctgaggmgatgtggcagaaactgtatttttaaaaatgagaattagtggacatgtggaattctagtaccaagtaaagatccaaacttgaatgtagacttgagtctttttacacttggaaagatgtcacttgtaattttggtggattaatagaaggggagacaatgccagatctataggccagagacctagaatctgtggaattgtgttcatgactatggacatgtaatagttgtattagttgctacagaaagttaatagttcttaagtattattttattttaaataaataatttatatgtaaaaatattttgttaatcttctggtaaaagttttatttttatttatttatagatatttttgagacagagtcttgctctgtcacccaggctggagtgcagtgatgcgatcttggctcactgcacctccgcctcctgggttcaagtgattctcctgcctcagcctcccgcatagctgggactacaggcacgcaccacgaggcccggctaatttttgtatttttagtagagacggggtttcactgtgttgaccaggctggtctcaaactcctgacatcaagtgatccacccgcctcagcctccaaaactgctggaattacaggtgtgagccaccacacccagactatttttgtttttagtagtcacaagagttagtgtaattggtccatctttagtttgtgaaactgaggaatgttcaagtttattattccataagctctttgtttattgatgtcttcttaaagtgccttgcatctatgaaaaagatgttaggaattgactgcatttccaagactgacagtattggtgctaagggatccaattgatcccgtgttccatattctatattgttcctttttaatctctttacatatgttccagtattgtgacatacattacatccttaaaagcagggatatattctgttacttttggaattctttttgtctctcatagtgcttcgtacaaagcaaattgtacaacacttttattaccttggaagatccatgaaattattagaaaacgttcatggattttgattgttgtttccttatagtatatcttttcatttattcttggtaaagaatgtataagactaaatgttagtatcatagagttaataaaatctaataaataattaarttatgtataattatatactagtagaaatatatacagttattaacctaatgaatatatttagcatagtatatagcaattttaaagagcctttctaaaaatttagtacatactattttttattgtaaatgatctatacatgtaagtcagataaagaaatggtcatacagaattttgaacattggggaaaatttaataacttgaaagttacatggattttagagtattaggcttttaaaaaattgtgcacgcgctggcagcaagtttttgtttttccctagcacctctaattttaaaattcaggtctataaacctaatttcttttccttttttaaagtattttttagacagagaggatagttggaaaaatggtacctatgttgttgagggggcattaatttatttacagtatacttaatgtcttgcagcaggtaaattgtagtaaattattattattattattgttttctgagatgggagtctcgctctgtcgctcaggctggagtgcagtggcgtgatctcagcttgctgcaacctccgcctccctggtttaagcgattctcctgcctcagcctcccgaatagctaggattacaggtgcatgccaccacacccggctaattatttgtatttttagtagagacgaggtttcaccatgttagccaggatggtctcgatctcctgacctcatgatccgcccgccttggcctcccaaagtgctgggattacaggtgtgagccactgcccctggcaaattgtagtaaattatttaaaaataacaatatctttggcttgggcatggtggctcacacctgtaatcccagcactttgggaggctgaggtgggcagatcacttgaggtcaggagttcgagaccagcctgagcaacgtggtgaaaccctgtctctactaataatacaaaaaaaatttagccgggtatggtggtgcctgcctgtaatcccagcgactcgggaggctgaggcaggagaattgctggaacctgggaggcagaggttgcagtgagccatgatcacaccactgcactccagcctaggtgacagagcgagactctgtctcaaaaaaaaaaaaaaaaaaaaaaagccaaaacaagaaaaacaatatcttcagttcatattctaaaaagcagaagtgaattttactttatgaatagagcactttgcaaataattctttgttgaccaaatattttaatgcctgcatgagttaagtaaaagctgttctatgagaattataacattgttatttggaagaatatattaagaggaagcagacttatgatttgtcatttaatagataatccaataytataggataaaggcagcttattggagaaatrattttaaaaatattttcttgcacaatttacaaaatttagtttaaaaaaattgtccagtaatttacccccacttacttgtgaaattatgagctctttatttcttcttcccttcaaatttatcttaacaactttttcaaaacttttaactttaatttttattgccracaagttgctaggatagtacaaataactcctaaatctcttcatccagagtcatcaattattatcatttttctacatttctttcccctctttctatatatacatatatgtaatttttttcctttttcttaaaccacttgagacttaattatcaatatcatgcttctttacccctaaagttcttgtttttgtcactcacattaccttcagctatgaggcttgtgggcttctctcgtggttttattcattttttcacttttaacagttttactgaggtataactgagataccatacagtttattttagactgcatttttattccttccttcctctcactggcagttgctggtacagtgctgcacctggctgagygaatggtttcttttggagctgataaagctgccttatgaaatcagctgacaggtatattatacctacagatgatgccttttctctcagagcgcttgggttgagattgacccactccacaattgctagtggacattctgagcaaaagaccacatttctgtccaattttgtgaatgtaactatcaactcatttgaactctaaaacacttaagttgtcattttactatagtgtaaagatgaccgtagatctaaaagatattttttctgaattttgacattgaaggaagaaatctatttttagaaatcaaaaatgaagaactcacgccctttaggttgcatacttggttctggagtggcatggaagatgtttggaatggctgaccctctgttgctttcacttgggttgtttgcatttttattttttaaatatattgcttggtgatcagcgcatttttattgacttaatagttgtgtctaaactattataaagccaaattgggtagtgtgtaactcctactaatgtatttctctcttttttcctcacagggatgaattgtaaaagcaacatcagcttgaccagtataaaattacagtggattgctcatctcagtcctcaaagctttttgaaaaccaacaccatcacagcttgttttggactttgttacactgttattttcagcatgaaaatgtgtgtttttttagggtttctgattcttcaaagaggcacagagccaaattggtagaggaaggatgcaaagtataaatttgtgtaatattactttaacatgcccatattttacttggaaatatwaaaagaaagggttctgtaaaatggaaaacttagtttgtgaattgattttgaggagtggtttttcttttcttggacrcttaattctgttctgatattaatttatcagattgcttttgtgcattggataacaccaccattcacaagttaagattcttggtatttggatatctgttagatgctactaagaaaatagagatgagctttctttttaaagcttttgatgtggtgtcatagaatagcatgttgtagatacaatcagctgctttgttaccttaaaactaggcatttgtaaatattaaaccwtaagatggcaggtgatgtcctgtaaacactcagctgttcagattggacataactgacttagttcttcccttctctctctctcaaaattataggagacttgtagtttagtgtggttttctgtttytaatttgctgctgataatgtatatgaacttaacatgctgtgtaagctgtgtcctagttcttgaacagtttatgcagtgctgctttgccaaataaagttaaaagtaaaagaggcattggttgtttttgaatatagaaggaagaacagcaagtccaccagatagggagtgtttacgatcatgggaaaaagactgtttctctggttgtttccttttgcgaagtctgagtaagtaattagcattaatccaactgtacattgtagaatgtgactacactgctccagggccaggaccgtacttcagtcgtcatttctctttgactccctagcccagggcttgccctgtagtagctatacagtaaatgctggtgagtgagtgagtggtgaatgaatcgacttaaagtcaggaaagaacaggattgagggtgaacagaccaaaacccatctctcacctatacaaagatttattaatataatgactatagctgaatttctaagaaggcagtagcactttgggatcttatttaaatgttgtgatttataacttttataagaagtagttctggaactgaggaaatataagctccagaatgagcagaatcagcactcccagcaaagcccttctactgggtgcatgtgtgggtgcgtaattctggcaaagaaccttcgtgggcatgtgaacactccccccagctcttgaaaaaagtcttaaatattacttctttacaaatggcttttaggctgggtgcggtggctcacgcctgtaatcccagcactttgggaggctgagatgggcagatcacctgaggtcaggagttcaagaccagcctggccaacatgatgaaatcccctctctacccctctctactaaaaatacaaaaattagctgggcatggtggcacacacctgtaatcccagctacttgggaagctgaggcaggagaactgcttgaaccagggaggcagaggttgcagtgagccaagatcgcgccattgcacttcagcctgggtgacgagtgaaactctctcaataaataaataaataaataaaatggcttttaaaactgatgcatcttttcacaagtgcctcttcttgggtaaggtcttagacacaggaaactagcattatttggtgcccaaaacttgagagtttaaatttattgttggcttcagtttgctgctgttaattgcttccatactcaggccatgaatccctgtggtccaggactagtccattttaaatagttgtaaaggtcaaatattctttttttttttattttttattttttgagacggagtctcgctctgtcgcccaggctggagtgcagtggcgcgatctcggctcactgcaagctccgcctcccaggttcacgccattctcctgcctcagcctccagagtagctgggattacaggtgcccgccaccacgccagctaattttttgtatttttagtacagatggggtttcactgtgttagccagggtggtctcgatctcctgaccttgtgatccccccacctcggcctcccaaaatgctgggattacaggcgtgagccaccacgcccagccaaggtcagatattccttacaactgaagttaattcttaaatgtatccactggtctgtgtctttcatagccattaccaacattttactatatatgagtctctatgtttggttttgggaatagaaaagggcccttactctcaaaagtgtgaagtctgtttgaggagacaattatataaatatgacaagacaaacttaagtgccacctgattagtacagacagtgctatgccttcagcattgttcaagcactgctcttggactttacatgtttatgaattaaaattgtagaatgttgaataaacaggaatgggctttaagggagcatgaataaatgggtagaaacggaaataatggattttagctaggcctaagagtttttttttctgtaagatgtgtgtgtgtgtgtgtgtgtgtgtgtgtacaggttacaggcaagaaaagtctccttaatctttagtattcataatttctaaaacatttccttatgtcattttccttaatagacatgattcctttacataatatgaagggcaacaatgaaaacatttcaaaaagtttcagtctagtgagatcatgttgaaatgagattttttctacagatttggttttattaaaggccaaatcaagctctcaaaatttatgtaatcttgcccaggcatggtggctcaaacttgcaatctcagcactttgggaggccgagcgaggaggattgcttgaggccaggagttcaagaccagcttgagcaacaaagtgacatcttgtctctacaaaaaaacaaaaattagccaggcatggtgatgtgctcctgtagtcctagctacttggggggctgatgcaggagaattgcttgagcccaggagttcgaggctgtagtgagcaaagctatagtgagctatgatcatgccactgcactccagcctgggcaacgagtaagactcagtctctccctctcttttttaaaaactcttttcctccacccttctaatagaaacctaagaagcctatctcttaaaacaaaaaccacttatataatctaagcctgaattatgaatatcagctttttattgagggtttcttttttttgagtgcaatggtgtgatctcagcttactgcaaccgtcacctccggggttcaagcaattctgcctcagcctcccaagtagctgagattacaggcagacgccaccacacccggctaattttgtatttttttagtagagatggggtttcaccatgttggtcaggctggtctcgaactcctgacctcaagtgatccacccaccttagcctcccaaagtgctgggattacaggtgtgagccaccacacccggtcgagggtttcaactcttttccagtcaataacattagaagaaaatgacattctgggaggaaaataatccattaacattgttcatgcaagtgttttaaattccactgccctaattttaaatactgccattgttcaaaaaaagttcactgtgcagtggtgcgatctcggctcactgcaacctctacctcccgggttcaagtgattctcctgcctcagccttccacgtcaccatgcccagctaattttttgtatttttagtagatacagggtttcactgggttagccaagatggtctccatctcctgaccctgggatctgcctgccttggcctcccaaagtgttgggattacaggcgtgagccaccgtccctggcccactgaacttttaaaattggtatataatgtacctctattaaagcatcttaaaaattcaattgatctaaaatagactgacatctttgagtaataatgctcatgaatttttgaagctattcttggtgtgtgattgtcagccaggaaacagctgcttagttttgtttcattagccaggtgggtatttttggttttcagctaaatgttaacaaattttcaatagtttgatattttactaaaatatatgagtatggtaactgaacactaatattgtaaatgaactaatggattatttttagtgttctaaatggggttcagaggctaatacattattttaggtaagtgctaacattcttctaggtataaatcattgcctacaacttattgtgttcttaaagaactgaacagtaaaacaaatgggttctgattggatttcagttggatctctggattcctctgaccattttccagaaagatgagtgttgtgttctcactgaacctagcacgtggctcaaatagagggctggtgaaagaatcccacttgaagaaaaccagctgacccaaggggccaaggaatgtttgtgtattgtaatatgataaaaaggaaatcaggccgggtggggtggctcacgcctttaatcccagcactttgggaggccgaggtgggtggatcacctgaggttaggagttcaagaccagcctgaccaacatggcgaaaccccatctctactaaaaatacaaaattagccgggtgtggtggtgggtgcctgtaatcccagctacttgggaggttgagacaggagaatcactagaacccaggaggcagaggttgcaatgagccgagatcacgccactgcactccagcctgggcgacagagccagactctctcaaaaaaaacaaaaaagagggaatcaagtccaataatttccttatccttaatccttctaatatcattgctacaataatgattgttggttccccacttccggcttcatctttctggctttttttttttttttttttttttgagacagtctctcactctttctccaagctggagtgcagtggcgcagtctcggctcactgcaacctccgcctgccaggttcaagtgattctcctgcctcagcctcccaagtagctgggactacaggcgtgcgccaccatgctcagctaatttttgtatttttagtagagacagggtttcaccatgttggccaggatggtctcgatctcttgacctcgtgatcctcccacctcagcctcccaaaatgctgggattacaggcgtgagccaccatgcccagccccagcttcatctttttaactgactttgtgttgtttcagtcaggaatctctgtgaaacggccctttgcttgctgggagagaaaatagagtaaaatctaactttcagttcccatatagtactgtgctgtgctagggggccctcagaacctctgaggcatgcttctgtctgtccctcctctcacccccctgtttttcctcatctttccacctccctggcagaaaaaaagttaaagctgtggtctcacagattgcagttcatggttctgatttctttttctatacacaaatctctagatcatatatttacagatttatcaagatctctagtttcatctgtagaactgttttgtttatatgtaagaactcttttgattcatttggattttgagtatttggtcatatgaaatgactatgaaaatgaaagagcacctttaaaaaaaaaagcccgtacactattttcctgagcttttttttttttttttttgagatggagtctcacactgttgcccgggctggagtgcagtggcactatcttggctcgctgcagcctctgcctcctgggttcaagcgattctcctacctcagcctcccgagtagctgggactacaggcgtgtgccagcacgcccagctaattttttttagtagcgacggggtttcactatgttggccaggctggtgtcgaactcctgacctcgtggtctgcccacctcggcctcccaaagtgttgggattacaggtgtgagccactgcgcgtggccttttttttttttttttttttttttttttttgagatggagtcttgctctgttgcccatgctggagtgcacaatctcagctcactgcaacctccacctcctgggttcaagcgattctcccacttcagcctcccaaatagctgggctttacaggcttgccaccatgcccagctaattttgtatttttagtaatttttgtatttttagtctcaccattttggccaggctggtctcaaactcctgacctcaggcgatctgcccacctcgcctctcgaagtgttgggattacaagcatgatccactgcacctggtccaatttccctaagctatttttgtaaaagttaacattatttttgtattaaaatattttgagaagtttcctaaattttgaaataacttcataaaaggatttaagctgaataatattataaattgatctctttccaatttgcagggtgatgacataagattttaaaaactgatgtgatttgagaattaaaataagtaggaaggaagatatgcttagacctaaatatgggaaatataggagaaggctcagttctaaccagtcaattcccaaaaacattcagctttgggatgtcgaaccttatttttgtccttggtggttttctatttagctggagaatctgtgtttatccactaaagtagctataacttaaaatattcattttatttttagaatactagaatccagtaggtcggaaaatggggacaggaacagaaaagtctgcaacacagatgcttaaaaagccaacgagacgagaaatttgtg

SEQ ID NO: 94913 - DNA, 39386 bp, Homo sapiens
atgacaaaatcaagaatgcaaaagaaacataagtagaaacaattgatcattaggggaatggactgaattatttttacaaataaaaatagataaaagaacaattgctttcagtggtcagtacagtagtttccctttacccacaggaaatacggtccaagacccttaatagatgcctgaaaccgcatacaataccaaagcccatacagcccatacagatactcaacatttttttttttttgagacaaagtattgctccatcacccaggctcgagtgcagtggcatgatcttggcttactgcaccctcaacctctcgggctcaagtgatcctcccatctcagcctcccacgtagctcatgtagctgagactacaggcatgcaccataatgcccagctaattttgtttattttttgtagagaaaatgacaaatgttattttcactatgttgcctaggctggtctcaaactcctggactgaagcgatcctcctgactcagcctcccaaagttctgagattacaggtgtgagccaccgcactcggccttccttaacttataacaggtttattatgacaggtttacatccagtaaagtaaaaaacttgtaagtcaaaccactgttaagtcagggaccatctgtatgttgttttcttcctatacgtaacatacctataataaagtttagtttataaattaggcacaattaagaaattaacaaaaataatgaataaaatagaacaagtatcattacatgccagcaccattattcttgcactttgggtccattattaagtaaaataaggattatttggacacaagccctgtgatactatgacagtcactgctaaccaaataggctactaagtgacaaacgggcaggtgtagacagcatagatatgctgaacaaagggatgattcatgtcacgggcaggatcaagtgggacgtccagagagttcctcacgctactcaaaacagcacacaatttaaaacttatgaattgcttgtttcaggaatttcccatttaatattttcagacctcagttgacttggggtaactgaaacttcagaaagcaaaaccatgggataagggagggactactctatagcatttgaagcctatccattaagttaacatcccacaaaccctctggtttaaatacccctgctccagaacatcacctcacctactctggctatcttcctaaattttaccatggcttgaaattatctcaatacgagtaggaagtaaactctaatataaacattatttaaatagtcacattccctggattaagcaggctcacggtttcaaattaagctaatttgtttcacgagcacattaccagtccataatcataaaataattgtattttttcatttctagagacctgtgctgtccaatatggtaactactggatacatgtggttatttcattaagttaattttttaaaaaattgaatttcggttcttcagttgtccacatttcaaatgttaaatgccacatgtagctagtagctaccacactggacaatatagagaacatcaccaagcactctatagggcaagactgctatagactttttctaaaacattattctaaagcataaaactgatttagctgatatgctggcagaattcaaccttataattttcaattctccatgtcactggttctcaaaatgtggtccctggaccagcagtggcaccacttacaaatctgttagaaatacaaattctcaagctccggcaatctgtattttgaaaagctctccaggtgattcaggagattttgaagcatgctcaagttttagtcactgttctaagttacttaagagtggttataatataagccatgacataagaaatctaccattacaatctgaaatattctataaatgatgcatcaactatgaaatcatacaaccacagtcctattatgatagattttaatacaaaaggaaaacaaaatattcttaacaaattatattaagcttcatttcttaaaaacaaaacaaaacaaaacaaaaaaaactattggccaggtgtggtggatcatgcctgtaatcccagcactttgggaggctgaggcaggcagatcacctgaggttgggaattcaagaccagctgaccaacatggagaaaccttgtctctactaaaaatacaaaattagctgggtgtggtggcgcctgcctgtaatcccagctactcgggaggctgaggccagagaattgcttgaacctgggaagcagaggttgtggtgagctgagatcgtgccattgcactccagcctgggcaataagagcgaaactctgtctcaaaaaaaaaaaaccattaaaaatgtaatttccttccccttctagtaagcaggccccttttcatttcaacatcaacacaatcacatttttatatttttctaagatttcaattaaaagcctttaatttaggaagaatatacacagtagaataatgaggaaggaaggcaatattttcaaattttatgtcaattacaattttcacatgagcaagtattacttttataataagctaataaaaagaaatctattagctagaattacctcagcaagaagttgaaactaaagttgcacaagtgttacaaaagaggctaaacaactattctactctaatttcctcttaccaatcataaatctagtataaaactatttgcaaaatcaacatctatgtatattaaatattccttattaaatttcctgacagaaaaacatccttagaaatttcagctaagaacagtaatgcaatacattaaagtgattatgaaaccaccgggaaaagatctatctagtcttggcttaccacaaatttggcccaaaaaaggagagactttaagagcctgattgattacaaatttctgccacagccaagtgcctactatgataacctaccggtggaaaattacttaatcacaatttgtgtacaaaatgtttcaggtacatatactgcaatagaaggcactgagatcatgttaagggatttcgtaaaaaatatttacaacatattgagcttatgtgccatccatgagaacccaaatcatacttcatactactgttgtagcacataaatgtccatttccaatcaagcatcattccataaaatgaacctgacaatgcttgacaaaatattgacatctaggctgggcgtggtggctcacacctgtaattcaagcactttgggaggccgaggcaggcagatcaccttaggtcaagagtttgagaccagcctggccaacatagtgaaaccccgtttctactaaaaatactaaaaattagccaggcgtggtagtgggtgcctgtaatcccagctactcgggaggctgaggcagaagaatcgcttgaacccaggaggcagaggttgcagtgagccaagatcacgccattgcactccagcttgggaaacaagagcaaaactctgtctcaaaaaaaaaaaatgttgacatctaaacattcaccatggccaggtgcggtggctcactcttgtaatcccaaaattttgggagcctgagtccaacaaattgcttgagtccaggagttcaagaccagcctgggcaacatagcaagaccccatctcataaactaccaaaaaaaaaaaaaaaaccctaaaaattagcctggtatggtggcaccactgtactcaggaggctgaagtgggaaaatcgcttgagcacagaaagcaggggttgcagtgagccgagctcacaccactgcactccaacctgggtgacagtgaaaccctgtctaaaaaaaaaaaataatcaacattctctcttaccaaacactaaagactcagtttccacattaagtattgtccccccaccaaaaaaaaatccaaaatgactaatatatcaagtaccggcctggcgcggtggctcacgcctataatcccagcactttgggaggccgaggtgggcagatcatgaagtcaggagttcgacatcagcctggccaacatagtgaaaccccttctctactaaaaatacaaaaattagccaggcgtgctggcaggcgcctgtagtcccagccactcaggaggctgagacaggacaattgtttgaacctgggaggcggaggttgcagtgagctaagaccgcgccattgcactccagtctgggctacagagggagtctctgtctcaaaaaaaaaaaaaaaaaaaaaaagtaccaaccatgtgccaaacagtactcctaatttctctcaattacctttgtctgtctagcacagatttaggcatataacggacatttaatgggcatttatgaaaaaaagggatgactgttaaattcttagagaaaattcaaaaaaaaattttttttttgaggcggagtttcctcccttgttgcccaggctggagtgcagtggcaagatcttggctcactgcaacctccccgtcccgggttcacgcgattctcctgcctcagcctcacaagtagctgggattacaggcaggcaccaccacgcccggctaatttttgtatttttagtagagatggggtttcaccatgtcggcctggctggtctcgaactcctgaactcaggtaatccacccgcctcggcctcccaaagtgctggcattacaggcgtgagccaatgagcccggccaaaaaaaattttttttaatggtgccagccgttaaggaaattacaaatcgagttgagaaataagacaaacacatgaaaagctaagtaacacaggacaattaaaaataccatgtgacaagatatgattactgcatagtagcgaataatgctataaattctgaccagtgagtttattatagactgcggcccttgtagtctcccaacaaaacggggacgctatatttcgatttaaaaaaagaaagtgacacagcactcatcctatcctaaaattatcatcagaagaaggaatacagtaactaaggagagtgatataaagaaactccacataaggtttttaaagcctatggtagccctgaaaaaagttagaacatcagacacacaaccctctgctgatccaggacctgcaaaggctcctgaaatacaagtctctcaggaacagcatcccctgttctttctccgccccgcacggagctttccactggacagccgcccgagaaatttctcccagcatctgcaatggcaatactctcatcttcctcccctcgcctgtatcagacggtggcatctccctccaggggaaaaaacggagggcgggggaggctgcataagagggaaagcttgcagcgaggttgattatggaggaggaaggtgagaaaaatgcaggggacgagggtggggtctcctgagcgccagcccactctccataaggcctagcccacacgctcccaccccgaaggcacgcccctcacaagccggacccggacgcggacctgagtgacagcagcatcacctgtactgcactccctcccccagggcctgcagggagacgactgcccctgcccccaccagcagcggcccctggctctttctctccccttccagtccacgtcgtcgacgagtgacaggtcccgagggaggcgactgcaagcgcacgccgttcgggactaccggggcaactctgcgccgaagccctccaacaggcgcgcggggacagacagaacgttccggacggcccagggggacccggtccaggcccagcctgccccagctgccctacaacgggcggaggtggcacttactgcggagattgtggattagctccgagtggctggcgccgccggatttccaggccatcgctaagcacactcggagcaggtacagaaccaccttcagcgcgacgacggtgcccagcagttttcccaagagtgagaccacctcccacaccgtcaccgccccgctcgcgtccccgctgtagctgccgctgttactgccgtcgccgccgctgccgccactgcgcgctcccggcatcccccgcggcacgcatgcgctctgtgacgccgcgcggcttagggtgcggccgggtgrggccgagggcggrggaggcgtgtggcccagccgcccgcccctgtggctgctaccgctgccaggggactgcagggaggccgggctgagtcagcgccactkccgctgctgcgtgtccctttctgaggcctcggaccgcaccgctttcgccctgcggcccggctcggtagcctgatcagtcgcgttcccggctgtgtctccggtcaccgarcgggacggcgggatggcggggtcgatctgtgcagacgctgctagtggttccgcagtcgtcgctgggtcasctgtttcgagcggcggatctgctcctatagatgtccagattgttagacggtgggcttcatccgtcctacctcgcccaacccagttgacyaatatttgggtcggtggagcccgaataatacaataagaataaaacccaacgacaaaggccctctctaacccgagtacaccggcctctggctttgtgacaagcacgtcactgttaggctaagcagagactttggaaccccggttctaaagctctcagagtggaagagtaccaggacatgggggtgggggttggggcaaagctttgctcccttagaataataccaacgtacagagttgcgattggttaaaaaataccactgtgtcctttggtgaacgtgttattctcccgacgtaagtgtgcatttccacctaattaagcctcacaaattccaccgtggctttattgctctcagctctgcaagaccatgagtgagaagctcactgagaacattgcttgtcgcgtccaaatcgctgactcctaattagacctgagactgacagaatccagccatcatctagtccagtaacttttttttttttttttttttttttttttgagacggagtctcgctctgtcgcccagactggagtgcagtggcgcgatctcggctcactgcaagctccgcctcccaggttcaggccattctcctgcctcagcctcccgagtagctgggactacaggcacccgccaccacgcccggctaattttttgtatttttagtagagacagggtttcaccgtgttagccaggatggtctcgatctcctgaccttatgatccgcccgcctcggcctcccaaagtgctgggattacaggcatgagccacagcgcccggcctccagtaatcttttagaaggaaacaaagctaagacatctgtgccactatatcagcacaattttcaaattctagttcttatccgattttgtaaaatgtgacactggcctgcttccaatccaaaatcaacattacctattttctgggattatgtgaccataaatgaaactacaggcaaaactggtttctttttgtttttttgcttttgattgagacggagtctcactctgtagcccaggctggaatgcagtggcatgatcttggctcattgcaasctccacctcccaggtcccggttcaagcaattctgccgcagcctcccgagtagctggaattacaggcacgcaccaccatgcccagctaatatttttgtatttttagtagagacagggtttcaccatgttgaccaggctggtcttgaactcctgacctcgtgatctgcctgccttggcctcccaaagtgctgggattacaggcgtgagccaccgtgcctggccaaaacagtgttctttacttcaatattaaacatgaataaaattgttgatttgggactgtaacccacttaatattttccatttcatctttctacagtttcttgatgatcttccatttggagaaaagaaaaaagtcaaatccttgataggaaactggtaactctaaagctgacccagatggattgcatttacatgcagtgcttccgtaaactgtccctgtgaagtaggactaccaatatcacataaaaacaacagtagcataatggccctttttaaagaaataaccaacatacagttatgaatacctatagtgtaaaagagcttcattttttagttgaataagtcatatctcttgtattcagtaggatttacattctaatgggggaggaatatgcatctaaagaaaactaacataagatatatccaaaatatatgtcattagtggtctagatatcaaatgctagctcacgcctgtaatcccagcactttgggaggacaaggcagttggatcacctgaggtcaagagttcgagaccagcctggccaatatggtgaaatcccgtctctccaaaaaaaaaaaaaaaaaattagccaggcatggtggcgcacacctgtagtcccagctaccctggaagctgaggtgggagaatcacttgaacctgggaggcggaggcagaggttgcagtgagctgagattgtaccactgcactccagcttgggccacagagaccctgtcttaaaaaagaaaaaaaatggtgttgatttagatcaacattggctggggtcgtcaggaaatggtaaaggaaagaacagatccttgaaggataggcaggattctgaggagtaaagaggaagggaagaatattataggtgtaaccaaaagcacagaaggaacctagaaaactgattcctgggccgttgacaataggtatcacaaacttcattcttaatcatgcacgtaattgaattgatcaaagctaggcaattggcatcaaaactaaaactggagtctttcagaattccaactccaggctctgacagtgtgtattaactttgaagcaaagtatttgtttgggagacaagagggagaggtttgggatagtaggttggcactttattcgaggtacttccacgagtatttaaggatttttgaatcgttttctatgcgcagtgacctgcaactgyttaggtgtggtttcaaggtggtttctactgcattgtttttgttctgtttttgcacttaaattttacactgcacaattattgaacacaagaaaatactgacattgcagattaggagcaagtcctactgctcaaaggccaaagcgctcttgcctttgctcagagctgctctgtgagatgggtgggcctctcagtctaggtactgactgtgcccacactggctatcgacgagaattgactctctgcagccaccgtctccgtcctaaagtcccatccaatcagggttccgcgggaagaggcggtgctgagaggcgcgyactgtgcttgctttttgcagtacctgctgcggccgctttcggcatggaggaaatttatgcgaagtttgtgtcccagaaaatcagcaaaacccgctggcgaccgctgcctccgggaagtttacagaccgcggagacgttcgctacaggatcttgggacaatgaggtatcgccgctgatagggacgagcccctacctcctccctctctccggttgagctgacccctggccttccgcgcgccaactcccaccttctggttcttctcgcacttttaggtcccccggacccctgtctcaggcgcggttgctccgtagctcagagccggtgatggcatgcctgagcctcgtatctcgttgtgttttaaactcaccataccatttgagatgttttggagcaacatttccggacgggagcacaacttttattttccgagagttgacgtttatgtcatctcaagacaaaactttctgttttacaggaaaattatatttcactgtggtctattggagattttggaaacttggactctgatggagggtttgaaggagaccatcagttattgtgtgatatcagacaccatggtgatgtaatggatttacaggtaaatctgtgtagcatccaaaagctaactttgaaagtcctgagtaatacatttaaacaagcagagcatcataaaagttgtctggtgtcacccctcgtttacagaaaactgagtgctctgtaagttatgatttgcccaacatcatttagccatttagtggcagaaaaaggactgggaaaggggatgtagatttaatcatacttttttattaattgactgtcgactatgtgctaaataccgtttggggagctttacaaaaattaattattgttgcatgccagtgaatcaagtatcgttactttgttttactaatgagaaaattgagactaatatatcttgagcatgtactatgtgacagatactgtgcagggggataacatcattttgttttttgaattctcataacaactccctaagtagagattagtgctcccgttttaaagatttaccacgatttagtgaacttaacttggccaaagtctcaaaaccagtaatgagtggtggggatgaaattgagttttcttttttttttttttttccaagatggagtctcgctctgtcacccaggctggagtacagtggcatgatctgagctcactacaacctccgcttcccgggttcaagcgattctcctgcctcagcctcccgggtagctgggactacaggcgcaggccaccatacccggctaattttttgtatttttaatagagacggggtttcaccatattagccacgatggtctctatttcctgacctggtgatttgcctgcctcggcctcccaaagtgctgggattacaggagtgagccatggcgcccggccgaaattaagttttcaaatcctggtgtggagagcccctgcattttccatagaaagctacctagccctggtgcgcgcttgtaatcccagctactctggagtctgaggcaggagaatcgcttgaacccgggcgcagaggttgcagtgagccgagagtgcgccagcttgggcaacaagagcgaaactctgtctcaaaaaawaataataataaataaataaataaataaataaataaaataaaaaagaaagctatctagctctaggaaagatacattttttttttttggagacgaagtcttatactgtcacccgagctggagtgcagtggcgagagctcagcttactgcaacttctgcctcctgggttcaagcaattctcctgcctcagcctcccgagtagctgggacaacaggcacatgccaccatgcctggctaatttttgtatttttagtagagatggagtttcaccatgttggccaggctggtcttgaactcgtgacctcgtggtccacccggcttggcctcccaaagtgctgggattacaggtgtgagccaccatgcccagacgatattttcctttccttttttttttttcttttttatgacgagtcttgctctgtcacccaggctggagtgcagtggctcgatctcggctcactgcaaccccacctcgtgggttcaagtgattcttctgcctcagcctcctgagtagctgggagtacaggcacatgccagcacgcccagctaatttttgtatttttagtagagatgaggtttcaacgtattggccaggctggtctcgaactcctgacctcgtgatccgcttgcctcagcctcccaaagtgctgggattacaggcgtcagccaccgtgcctggcttttcttttttaaaatttttattctttttttgaaactgagtcttgctctgtcaactaggctggaatgcaggggctcaatcttggctcactgcaacctccacttccctacaaccccaactcatttttgtatttttgtagagacgaggcctcgccatcttgcgcaggctggtcttgaactcctgagctcaagtgatccgtccacctaggcctcccaaaatgctgggattacaggcgtgagccactgcacccagccaggaataatattttcctaaggttttattgtgttggtcccaaattaaatcaattgtgggtgaatgtgtctaggaaaaaatattgtttattcatgaaaatactttgtatggcagtttggcctttcagcttcattaacacattttatttccttwgcactcataggctctttgctttttaaaattgttataagatttgctactaattgagttaaataaacaaatggacttcctccctgctaatatttctgaatctttaacaagcagaaattttctctttagttttttgaccaggaaagaattgtcgctgcttcatcaacaggatgtgtaacagttttccttcaccatccaaataaccaggtaaagaactttagtttgagaagtgattttttttttttttgaaatggagttttgctcttgttgcccgcgcactggagtgcagtggcgcagtctcggctcaccgcagcctccaccttctgagttcaagtgattctcctgcctcagcctcccaagtagctgggattacaggcacgtgccaccacgcccggctaattttatatttttagtagagacggggtttctccatgttggtcaggctgatctcacctgacctcaggtgatcagccctcttcggcctcccaaagtgctgggattacaggtgtgagccaccgcgcccagccaaaggtaaccttttctaatagacatgcctagttaatataagtcccagttcatgttaagggtttttttgagtcatttagaaaaagctatagagattaatattttatttattttattttattttatttatttatttttttttttgagacagagtctctctctgtcacccaggctggagtgcagtggtgcgatctctgctcactgcaacctgcatctctctggttcargcaattctcacacctcagcctttcaagtagctgggattacaggcgcgtgccaccacacctagcaaatttttgtatttttagtagagacgggattttgccatattggccaggctggtctcgaacccctgatctcagatgatctgcctgccttggcctcccaaagtgctaggattacaggcatgagcgacagccgtgggccagatatgtatattttagatgtaggttaattcccataagaatacaaagagttgcytttgaacatccaactgcttgatccctaaaagtcattactgtagtttgagataaatgtggggcattattaaacaatattccttttgtatctaattcagtgtatatagaactttgatggcagtagtttctagatttcattattctaaaggaaaaaggagagatttattcttgtagaagggtgtgagtcagaatttaaagatactcttgttgggaagaagtgctaattccttagtactttgctttaatagtatcctcatttctgatgcctagactctgtcagtcaaccagcagtggactacagctcactaccacacaggccctggcagtccttcctatagcagtgcaccatgtacaggtgttgtgtgcaacaacccagaaatcgttacagttggagaggatggtcgaataaatctcttcagagctgatcacaaggaagctgtaagaaccataggtaagaaaaatcccagcctggccaacatggcgaaacctagtctcttctaaaaatacaaaagttaggctgggtgtggtggctcaccccggcaattgcagcactttgggaggccgaggcaggtggatcacctgaggtcgggagtccgagaccagcctgaccaacatggagaaacaccgtctctactaaaactacagaatttgctgggcatggtggcacatgcctgtaatcccagctacttgggaggctgaggcaggagaatcgcttgaacctgggaggcggaggttgcagtgagcagagatcgcaccattgcactccagccagggcaacaaaagtgaaactctgtttaaaaaaaaaaaaagaaaagttagccaggcgtggtggcgcatgcctgtaatcccagctactcaggaggctgaggcaggagaatcgcttgaacctgagaggtggaggttgtggtgagctatgatggcactctgcagtcccacctgggtgacagagggagaccctgtttcaaaaaaagaaaaatcattgtactcctttcatccatcagagtaattgagcacttaccatrtactaagtaaatactgccaggcacggtggctcatgcctgttaccccagcactttgggagggtgatgcaggcggatcacaaggtcaagcgatcaagatcatcctggccaacgtggtgaaaatccgtctctactgaaaataacaaaaataagctgggtgaggtggtgtgcatctgtagtcccagctactcgggaggctgaggcaggagaatcacttaaacccgggaggcagaggttgcagtgagccaagattacaccactgcacgctagccttgtgacagagagagacttcatctaaaaaaaaaaagtaaacacaatgttaagtgatggagggatgtaaaaatatatggccgggtacagtggctgacgcctataatcccagcaccttaggaggcaaaggcgagcagatcatttgaggccaagagtttgagaccagcctgaccaatattgcaaaaccccatctctactaaaaatacaaaaattagctgggcatggtggcacaggcctgtaatcccagctgcttgggaggctgaggcatgagaatcgcttgaacctgagagactgagaggctgcagtgagccgagatcatgccaccgcactccagcctgggtgacagagcaagactctgtctcaaaaaaatataaaatatatgtacacatgtgcacacacaacgcaaggcaggatccctttgtcaagacagtatgttgatgagaccagtatgaatgactgactagaggaaacagaaacctttttttttttggtgagagggcattatcagataaaacatctggaagcaggtagtaattaatagtttttctaggttctagaccataagtaatactaaaagatggcgtgctagacaaagggaataggccagaggcaggataaagacattcagagaatgacaaaaagtatagtttgacccgactttagatatttatttaggagagatgaaagatgaagcaagagagaagtaagctggggccagattgcaaagagtctgtaatgcaaaatcacagaagttacatcttttaggtggaaaactaagtgtattggttctgaactatgcttcagccagacttctctgaggaaattttttaaytgtcgaccactctagaccttttaaatcagaatctctaggaattgagcccatgaatccattttgtrtgtgtgtgttttgtttgtttgtttgtttagatggagtcacgctctgtcaccaggctggagtgcaatggcacgacctcagctcactgcaacctccacctcctgggttcacgcgattctccagcctcagcctcccgaggagctgggactacaggcgcacgccaccacacccacctaatttttgtatttttagtagagacaggctttcaacatgttggccaggatggtcttgatttcttgactttgtcattcgcctgcctcggcctcccaaagtgctgggattacaggcgtgagccactgtacctggccttttgtgttgtttattatgattttcatttctgagttaagttgcattactttttttttttttttttttttttttgagacagggtcttgctctgtcacccaggctggagtgcagtggcatgatcccagctcattgcaacctctgcctcccaggttcaagcgatcctcccacctcagccttccagggatgtgggactacagatgcacaccaccatgcccagctaatttttgtagaaacgaggtttcaccatgttgcccaggctggtgtcaaactcctgggctcaagtggtctgcccacctcggcctcccgaagtgctgagattacagacatgacccactgcactgggcgacattacttatttgttaattaatgaccattgcctggtggcagtgtagaggagtggcacaaactaaagtccataaagtatatgttaaattatgaggcataagttctaaacactaggaaatcaacaaaaaggaccattatgacaataaggagtgacttcatggagagggcgagagttgatgagggtgaaaatgagtagatttgggatgagtctgcagaataatacaaggttagaatgagctctgtaggaagcactggagtttggctcaatagaatggaagttctaggtcagggactagtgggaagtaagattgggtttagaggagcttgaacaactctctcagaaatgcagggtaacratcttaagagttaaaaagaaatgtatgaaaactcagccttccatttagaaaacagttcaaggctgggcctggtgggtcatgcctgtaattctagcactttgggaggctgagtgaggcggatcacctgagctcaggagttcgagaccagcctggccaacatggtgaaactccgtctctactaaaaatacaaaaattagccaggcatggtggcatgtacctgtaatcccaggtactagagaggccgaggcaagagaatcgcttgaacctgggaggcggaggttgtagtgagcccagagtacgccactgccctctagcctgggtgacagagcgagatccatctcaaaaaacaaaaagaaaaagaaaacagtaggccaggcgtggtggctcaagcctgtaatcccagcattttgggaggccgaggctggtggatcacctgaggtcgggagttcgagaccagcctgaccaacatggagaaacccagtctctactaaacatacaaaattagctgggtgtggtggcacatttctaatcccagctayttgggaggctgaggcaggagaatagcttgaatccgagaggtggagattgcggtgagccgagatcgcgccattgcagtccagcctgggcaacgagcaaaaaaaaaaaaaagaaacagaaaacagttcagatgtcctgtgagtaaatgtttttcccatccaaagagaatccatttaaacatatacattaaccatgcatttttctatagaaatttaaattataagttactggaaattgtaatatatcaatccatgaaaggagtgtgatttaagattttcttgggaaaaaaaggggactcattaacacatactaccattttttaaatttttagacaatgcagatagtagtacactccatgctgtaacctttcttcgaactcctgagattcttactgtaaattcaattggacagttgaaaatatgggatttcagacaacaaggaaatgagccttctcagatattgtcactgtaagtgttgatttgtaatttcagtaatgtaatccacaaattaatgtgttaggttgtttatagctactggctttaagccatattgaattttaattgcattttaagagggagatccctgattaaaatttggtagagcaagcataacttgacggggttggtactactatgcttcatttagtaattatttgttatagtgattcagagcctttactctttgaagtttgtattatttcatggagaacttatttctgctctttcaatgattgtttaatggataaaatatactccagatgtaatgattgggggaaaaatataattccaaatattttttctgagcagaaatccccctttgtaggtgtacaacgttctctcgtaagaaaatagaatgtgtcacactgaaaaaatagttacataaactaagcattaaataagatgataaataatatttagtatataattgatgtatgagtttttaaataatttaacaagtggaaatgtgatttgtacatcttaccatcggattgtctttcattccatgtctccaaattgaagtgaaaatgaataattgtggccttgaattatttcaaaattgtactatttagaaatatatctaatttagttcattttttttggtatcattaagattcagccaggctgggcgtggttgctcatgcttgtaatcccagcactttgggaggccgaggcaggcagatcacttgaggtcaggagttcaataccagcctggccaacacagtgaaaccccgtctctactaaaaatacaaaaactagccaggcatggtggcacgtgcctatagaccccgctactcaggaggctgaggcaggagaatcacttgaacctgggagccagagtttgcaggagaatcacttgaacctgggaggcagagtttgcaggagaatcacttgaacctgggaggcagagtttgcagtgagctaagatcgtgccattgcactccagcctgggcaacaagaacaaaactctgtctcaaataaaaaaaagattcagccagtagctccagccactaagttgacacttagttaccatataaaacatgtttcttggctgagcatggtgactcatgcctgtaatcccaacattttggaaggattatctgcggtgagaagtttgagaccagctagggcaacacagtgagaccccatctctaccaaaatttcttaaaatagcctggcacggtagcatgtgcctgtagtcctagctacttgggaggctgaggcaaaaggctcttttgagcccagcttgcagcaagctgtagataggccattgcactgtagcctgggtgacaagacaagaccctgtctctcttttttttttttttctttgagacagagtcttactctgtcacccaggctggagtgcagtggcatgatcttggctcactgcaacttctgcctactgggttcaggcgattctcatgcctcagcctcccaagtagctggaactacaggcatgtgccaccatgcctggctagtttttgtatttttagtagagatggggtttcgccattttggcctggttggtcttgaacctcaagtcatccacctgccttggcctcccaaagtgctgggattacaggtgtgagccactgagcctggtctcttaaaaaataaacaaaaaaaaacaggctgggcacggttaccagtcatcccagcactttggaaggccagggtggctagatcactggagcctgggagtttgagaccaacctgggcaacatggagaaaccccatctctacaaaaatacaaaaagttaaccaggcatgatggtacacacatgtactcccagcaactcaggaggctgaggtgggaggatacctgagcccagggagtttgagcctacagtaagcaatgattgcagcgctgcattccagcctgggtaagtgaggccttgtctcaaaacaaacaaaaaacgtgtttcctgtgttacacaaagataaattatactttatttgattttgacgtcattgttatctcccacaaaaggactggtgaccgagtgccactccactgtgttgatagacatcccaaccaacagcatgttgtagctactggtggccaagatggaatgttgagtatttgggatgttagacaaggtactatgcctgtatctctgctgaaggctcatgaagctgaaagtaagtattgtgaagatacagaaagtttatattgggtgagttatatgacatataataagcacctttccataatgatacatgtggatcattttacatcatagcttttaatggctgaattgtgtaaatttaaatagttatgtaatttctttttactcgacatttaagttctttaacatttgtttttgtttttttggagacggagattcacccttgttgcccaggctggagtgcaatggcgctatcttggcccaccgcaacctctgcctcctgggttcaagcgattctcctgcctcagcctcccgagtagctgggattacaggcatgcaccaccacacctggctaattttatatttttagtagagactgggtttctccatgttggtcaggctggtcttgaactcctgacctgaggtgatctgcccagctcggcctcctaaagtgctgggattacaggcatgagccgccgtgcctggttttttttttttttttttttttaaagagacagggtctggttctgtcgcccaggctggagtgcagtggtgcagtcacggctcactacagccttgacttccagggctcaggtgatcctcccgcatcagcctcccaagtagataggactataggtgtgtgtcaccatgcctagctgattttttgttgttgtttgtttttttttttgtagatatggggtttcactttattgcccaggctggtctcaaactcctgggctcaagtgatcctcaggaagtgctgagattacaggtatgagttatgagccaccacatcaaccacaggtttaattcttatatccaaaactgtagttagaatccttagatatttatctctgtgtgtgttttttttttttttttttttttggagacagggtctctctctgttgcctaggccagagtgcagtagtggtgtgatcatagctcattgcagccttraactcctggacttacacgattctcccaaagtgctgggcatagccattatgcccatgcccagccttatgtacttattttcttaggataattttttagaagtagaattgctaggccaaacattttgcatagcgcattgacagatttttctacacaaaaataataccagtttaagccaggcacattggcacatgcctgtagttccaggctcctcctactcaggagcctgaggcaggaagattgcttgagcctgagagtttgaggccagcttaggcaacataacctctttaaaaagttaataatactagtttaatccaggtgagtggcatgcaccagcttctcaggaggccgaggcaggaggattgcttgagtccaggaattcaaggctgtagtgcattatgattgcacctatgcactccagcctggacaatatagtgagaccccactccctgaaaagtgataaaaatcataccattttatatgccatagtgaagtgtgcaagaatgcccttttcccatgcaaatgcaggctgtcatatttgttaataaatgttgtgctcctcaatttattgttgcatcacatcattttttttaacatgaacaatagatttataagcttttttttttcttttgattctggtggagatgatttagccggacagaaatttttcattttctcactctgtctttgatatcatgccagaatggattatccttttttttttttttttttgagacagagtcttgttctgtcgcccaggctggagtgcagtggcacaatcgcggttcactgaaacctctgcctcctgggttcaagccattcttctgcctcagcctccctagtagctgggactaaaggcatttgccaccatgcctagctaatttttgtatttttagtaggaatggggtttcaccatgttggccaggctggtctcaaactcctgacctcaggttatctgcctgccttggcatcccaaagtgctgggattacaggtgtgagccactgcgcccggccctatatatttttttaaaaatggggtctctctcacccaggttggaatgcagtggcatgatcacagcccactgcagcctcagccttgcctccctggctcaatcagtcctcccacctcagcctcccgagtagctgaggctacaggcacgcacccctactacacccggctaattttttattttttgtagagacagggtctcaatatgttgcccaggctggagtgcagtggcatggtacctcacttaagcctcaacctcctggggtcaagtgatcctcttgccttgcccttctgagtagctgggactacaggtatatgccactacacctagctaattttttttattattagatttctatagaaattatgattccataaaagattttgaggaaatgatggccgggggcggtggcttatgcttgtaatcccagcactttgggaggccgaggcaggtggatcacctgaggtcaggagttcgagaccagcctgaccaacatggagaaagcccgtcgctactaaaaatacaaaattagccgggcgtggtggcacatgcctgtaatcccagctactagggaggcagaggcaggacagtcacttgaacctgggaggcagaggttgtggtgagccaagatcgcaccattgcactccagcctgggcaacaagagtgaaactccgtctcaaaaaaaaaacaaaacaaaacagattttgaggaaatgaggaagactggtatctttcagaattgaaagtgattttggaatatatagaatttctttggggctgggcacggtagttcatgcctgtaattttagcactttgggagtccaaggcaaacagatctcttgagcccagttgtttgagaccagcctgggcaacatggagaaaccccatgtctgttaaaaatacaaaagttagccaggtatggtgatacatacctgtagtcctagctactcaggaggctgagataggcggattgcttaagccttggaggtcaaggctgcagtgagccatgaccatgccattctgcactccagcctgggcgccagagcaagaccctgtttcaaaaagagagagagaatttctttgagttgaattatgtagaagtttgtcactgacctatgttcctaaagtatgaagcatacatatgtgggctaagaaatagtttttcttgataaataatcaacaaataaaaaataaaaagccctccatctgagactggatccaaattcttggaacatttccaaattttggtttggtagaagtcagttgctatttctgtgataaagaccagaagtattcagaatcttggcattaaccaatattggatattgcctcttagaaattcatttttatatttcattaggatctttctcagtttttccaataatataatcttcatatattaatgacacaggaattgaaaaataagacaacttaccaatttaaaaaaaaacttttccgtaaaagacagtcattcctagctgggcacacacctataattccagcacttttgggaggctgaggcaggaggattgcttgacgccaggagtagaagaccaaggtagacaacatagcaaaaccctgtctctatttaaaaaaataaaaataaaataaaataagctttttcataaagtaatagggttaaatgttttagcaatgattttcttttcttttttttgagacgtagttttgctctttttgcccaggctggagtgcagtgatgcaatctcagctcactgcaaccttgcctcccgggttcaagcaattctcctacctcaccctcccaagtagctgggattacaggcacctgccaccacgccgggctaattttttgtatttttggtagagatggggtttcaccatgttggttagctggtcttgaactccagatctcaggtgatccactcacctcggcctcccaaagtggtaggattacaggcatgagccactgcgcctggacatttttttttttccttgagacagagtctcactcttgttgcccagactggagtgcaatggtgtgatgttggctcattgcaacctctgcctcccgggttcaagcgattctcctgcctcagcctcctgagtagctgggattataggcacccaccaccatgcctggctaatttttagtatttttagtagagacggagtttcaccacgttggccaggctggtcttgaactcctgacctcaagtgatccacccaccttggcctcccaaagtgttaggattacaagcatgagccactgtgcctggctactattttcatttatttccttgcccagtacgcaaatttagttggcttctttttcctttcttttcttttttttttttttttctcagacagtgtctcactttgtcgcccaggctggagtgcagtggtgcgagctcggctcactgcaacctccgcctcccaggttcaagtgattttcctgtctcagcctcctaagtagctgggactacaagcacgcgccaccacgcctggctaacttttgtatttttagtagagatggtgtttcaccatgttgcccaggctggtcctgacctcaggtgatccacccgccttagcctcctaaagtgttctttttcctttctatgtgttatagccattggaaagttacattatgtcttttctttaattctgaagcctttaatttttaggacagacttgaggctcgaaggtatgtgatggaggataatggaagatgatgcctagagatgggggtttaatgttgtttgttcagcgaatctgcacaggaatgagcttattgattcttgtctcttagtgtgggaagttcactttcacccatccaacccagaacatctttttacctgctctgaagatggatccctctggcactgggatgcttccacagatgtacctgaaaagtcgtcactctttcaccaaggtaaaactttttaatgaatactgttatgtgtactttttttttttttttttaagacagagtctcactctatcacccaggctggaatgcagtggcacgatctcagctcactgcaacctccgcctcctgggttcaagcgattctcgtgcctcagcctcccgagtagccaggactactagtcatgcaccaccgtgcccggctaatttttttgtatttttagtggagatggggtttcaccatgttggccaggctggtctcgaactcctgacctcaaatgatccgcctgcctcagcctcccaaagtgctgagattacaggagtgagccaccacacctggccttttttttgagacagagtcttactcagtcacccagaatggagtgtagtggtgcagtctcagctcactgcaacctctgcctctcaggttcaagcttttcttgtgccttagcttccctagtagctgggattacaggtgtgtgccaccacaactggctaatttttttgtatttttagtagagatggggttttgctatgttggccaggctggtctcaaactcctggcctcaagtgatctgaccacctcagcctccccaaagtgctgggattacaggcatgagccactgtgcccagcctgttatgtgtaattttatcatacttttattttgttttttttttgtttgagacagcgtctcactctgacatgcaggctggactgcagtggcatgatcacagctcgctacatcctcgccctcctgggcttaagtggtcctcctgccccagcctcccaaatagctaagaccagagatgcttgcaaccacaaccagctaattttttttttttaatttttttgtagagatgagctctcactatgctgcccaggctgctctcaaactcctgagctcaagcaatcttcctgcctgggcctcccgaggtattgcaattataagcatgagctggctgtacccagccattttatacttttaaataccaaattagacatcctcgtattttttacttaatggcaaaacatttttattctcttgcctcagagtaaatttgagtatcacagggcttgaaatctgactgtcaagttacttactactgtatggctgatggctagaaatgctgtaagctggctcacttgagacagccaaggttctcctttgtgagtgccattaacctggaccctcatgccatagcatagacagtggcaaatctttcatattgcattgccaagtttgtgtgaatggcaagaaaaaagttgatatttgatgtaactgagggtactggttaaatggcctgatctcaggccgggtgtggtggctcatgcctgtaatcccagcactttgggaggccaaggcaggtggatcacctgagtttgggagttcgagaccagcctgaccaacatggagaaaccccgtctctactaaaaatacaaaattagccgggtgtggtggctcatgcctgtaatcctagctattcaggaggctgaggcaggagaattgcttttacccaggagacagaggtttcagcgagccgagattgcaccattgcactccagcctggatagcaaaagcgaaactccgtctcaaaaaaaaaaaaaaagggcgtgctttcctcattacagtcagttgtaggttatggtcagccaaagaccatgcacttgtaatcggggtttatgtgtttttgcattttccaagtttcctgtttttgagggtttgtctgtggctccaaagttcttttgcttattcatttattcagaaatatttactgaatgcctaccatgtggtaggcattcttctaggtgttaggacgtgtaacagtgagcagaacgaaatgtcgaaacgcatagagcaaatattctaatagttaaaaaaatagataatgtatcagtaagagtccaattagaatgtcagaaactaccttagatgtagaaggaattggtctcacatgtgttagaagggctgggaaaacaaaaggtaataggaggggtgctgggagaacaaataggaagaaaagggaaaacccagaaatagtaattgttagtacccctgctacttgactgttgaaaatgctktaaaagtttgttctgaattaggagaaaaggcgctccctcaaccaggctgaaactaccaccagtgttgttgccagaaacctggagcaggaaggagctgcttctcccytccgccttccagtcacccaccattaatacctgctattggcaaggcccatctggatggcagatggcaaagcagcctggaaagtggagtttaccaacttctacctcctacagtatatagtggagcacagcaaagtggaaaaggaggccgggcgcggtggctcacacctgtaatcccagcaatttgggaggccgaggtgggcagatgacctgaggccaggagttcaagaccagcctggtccaacatggtgaaaccctgtgtctactaaaaatacaaaaattagctgaacgtggtggtgggtgcctgtaatcccagctactctggaggctgaggcaggagaattgcttgaacccgggagttggaggttgcagtgagccaaggtcacgccactgcactccagcctgggcaacagagcaagactccatctcaaaaaaaaagaaaaaggaaaataacatggccaaatacactgctaattaccatgaagaagaatacagcagagtaggaggataaagaataaagacaggggtgaggggagctactctagtgagagtcagaagaggccacttggcagaaggaacatttgagcagagacttaagagaagtgaaggcataagtgacatgaaagcattccaggcagaggaaacagcaaatgctgagggcctgagacaggcagagaactgcaaggacaccacggttggagctcaggcagcagggtacagtggtgggagataaggactggtggctgaggagccctgggactttgtagcccatgataaggactttagacttatgggagggggaggagaaaagtggaaaacagggagatgaggaaggagtcttatcacagtggcttgaataatgtgttaatctttacagcgtccaagagcaatgtaaaatgtaggggcagtaaaagataaacagaaaaactaaggggaaaaaaattctaaaacttcttcagaaaaattctggagcggagarcatgtgtggagcatgcatgcatgtccatgctataacttcatctacagagaaacaaacagtttcatctaaggattaactaagtatgtacttcgtttttacttccttcctcccctaaccgcacagtcttgaacttgcaagtttacttttaaggaaccttggttagactggaaataaaactttattctgtgtctactattgcaaggcacagtattagacactgtgaaaaagtaaaacatataaaatatgcatcctgctcttaagacatatttagtcatggacagaggcatggatagttcaattaggatataagaattgttataaagtagtaaattaatggtacatacaagtgctgagggttcaaggaaagagaaaaacatgaagtagaggttgtcttcaaagttttcttagagaaggaagttcagccatattttaaaggatcagcaagattttaaatgtactaatctttaagcttcaagacatagggacttggcacagagcacttagcacagagcctggcacatagtaggtactcagtcatttgttgagtgaattaaatttgtacttatttgatatgacagcaagttgagaggaaagtaagttgcgaataatgactaaaattgaaatatactgcctctgcctcactttattctatagtaagtacagtgcgctgttagagataaaaccttataatctagtagtgttctaatctgcttgtaagaacatttatctaaaaagcataagaatgaaagatttgaggtaaggcgattatattttaagaaatatagtaacaaatatatatttagaaatatatttctagaaatgttcatctagaaatatgtctagaaattctttctcatgatcattttattttgttattacccaagagtttatatttccatgtattacctacatttttggtttcttttttttctttccttattcaacttgtatgctggccgttttgctacctttctgagactttccattaaaagatgaacagaaagtcagttgaaatcacctgcttttcctgaagacttcgagtttggtatccatattatcccatggaaatttgaatatttaatatcactgaataagcctttggtccaaagtggtgatgtataataatggaattattagcctattattctgagaattaaacacattgatatcatcacctttctaaatatcagtagaagtttgaatgtttactaatataaaaatcatcttgaaagatttcttccttttctttttttctcccaggaggaagaagcagtacttttttgtctcatagcattagtaaccaagctaatgttcaccagtctgtcattagctcctggctcagcactgatcctgcaaaagaccgaattgaaatcacaagcttacttcccagtaggtctctgtctgtgaacactttggatgttttaggtccttgtcttgtttgtggaaccgatgcagaagcaatttatgttactagacatcttttttcgtagaagtactataattataagatttcagatagaacatgcaattagccttttgaaatccaacttctgtgcaaaattttagtatcagaaaatacgagatttgcaggggaaacatcagtaaactaccattaatgtcaatgcccagttttgacttttgttagcctgacactcccaaacagttgtagaatccgatagatgactgatggcaaaasattgtgaacatgtggaagaaaatcagtgggattctggtgctgatgaataggttgccttcagagtattattgacagacagcttgtggaactaattctttatttttgatgttgtgggaattaacacatcaatggtggttatgggaactaccaatgggttcctacaatttttatcagtagtatgtggcatatacaccttcctagtggcagttgccaatgttaatgattattctttttattgcaagtatttcctatgatccttccacactttatttccttaataataataaactttttcagaaagaattgagtagagcaaaaatgacaaagatgtgtagctgtgttcaatttttttttttttttttttttgaggcagagtcttgctctgctggagtgcggtggtgcaatctcggctcactgcaacctccacctcccaggttcaagcaattctcctgcctcagtctcctgagtrgctggaactacaggtgtgcgccaccacgcccagctaatttttgtaattttagtagagacrgagtttcaccatgttggccaggatggtctcgatctcttgacctcatgatccacccgcctcgacctcccaaagtgctgtgattacaggtgtgagccactgcacccggcctgaaatttttttaaggtgaaaatgttttgacaagttcctttttcagaataggtttttgagcagaactctttcagcttgttagacccaactttgcttttgtttagcttcacagcatagctgaaagttgccaaactggacattgtgcaataaagtagaattctatattgataagcaaactatttccaaactaaaaatgtgatagataaaagtgtgattaatcaaatgatatgatcagagtaaagaattttgccattttgatccttttactttgttttagccacctatagtgttaccaaccatmtttatccttgtctgcagggataataatgaactaatgtagtgttttaagataatttaatgatactatctttccaaactttgttagattttaaatgtattattgacctgagaccttaatgacaaatcactgctattagacaattgaagtgttcatttactttgtaattccaataatcatagttatggaattatggtaaggttttgcttttctgtcctaataaatatatatattttttgagatggagttttgctcttgttgctgaggctggagtgaaatggcatgatctcagctcactgcaacctccgtctcttaggttcaagcaattctcctgcctcagcctcccgagtagctgggattacaggtgctcaccaccacacccagctaatttttgtatttttagtagagatggggtttcactgtgttggccaggctggtcttgaactgacctcrtgatccacctgcctcagcctcccaaaatgctgggattacaggcttgagccactgctcccggctgatttttgtattagtagagacgacagggtttcaccatgttggccagggctggtctcgaactcctgaccacaggtaatcagcccgcctcggcctcccaaagtgctgggattacaggcgtgagccacttagtatttgtaaccataagagaaagtatattttaacagcattacatttcatgccaattgacaagttttgccaattttaataagaaactaagctttatgtaatrtaacaccgtaatttatgaatttgttcattgtcactgcctttattcatgaaactgtcaaatagagtgtctttcaagggttgcaggatcttagagatagaaagtaccttggtgatcatctccagcctaaatttcatcatcccttctatggtattcccaacaaattatcatccaacctatacttaaaaacatatggtggccaggcatggtggctcacgcctgtaatgctagcactttgggaggccgaggtgggtgaagcacctgaggtcaagagttcgagatcagcctggccaacatggcgaaaccccgtctccactaaaaatgcaaaaaaaaaattaaccgggcgtggtggcaggcatctataatcccagctacttgggaggctgaggcaggagaattgctcraacccgggaggcagaggttgcrgtgacccaagatcgtgccacttcactccagcctgggcaarrgagcarracgccatctcaaaaaatatrcatatataaggagataaagtttcccattttccaatacagtttcacatttgaacagccctaattgatacaactttatggcagggttttagtgtgtgagtgggatccaaaacactcaatcctgtaaaagggtacagtcctattgtakgttaacacactgatgatgtgagcctgtgagatgagccaatcaccagttgttatgttcgaatctgctttgtgttgggacgctttaatgtcagggtttcactaaataaatgaattttcatatactgaactgaaatttgcttctatctgtcttatctcgggagccacacacacaaaattcctctcatcacatattcaaatattcaaaattgattattatagtctctccagtgaaggtttccttctctttctttccatttttggctaaatccttcttatccttcaagactccttctaggtgtcattttctccagacagcttttattggcctccagcaatccggactaaattgcactctgcttcaaaagcccattgtgcagaacttaaattgtgcgcaaagcagtgtgttaaggagcctgtctccccctactgggccacaagatcaagaacagcgcccatgtcttcgtgtaacagtgtttaacagtatctgaaccatagtaagcaatgagtcactgttaattgaccttgttttcacaatcttgttttccctttaaaaattactgctctttgtcaaaggcctttttttttttttttgagactttaagtctcgctctgtcgcccaggcaggagtgcaatggcacgatctcagctcactgcaacctctgcctcccaggttcaagcaattctcctgtttcagcctcccgagtagcagggattacaggtgtgcgcccagctaattttttgtatttttagtagagacagggtttcaccatgttggccaggctggtcttgaactcctgacctcaagtgatccaccctcctccacctccgaaagtgctgggattataggcatgagccaccgtgctcggccagaggccttcttttaagtgtgacttccaagataaacactttttcatatattgtctaccttggtgattatgacagaaatcttgccatcctgttaataggaatgatattcctttgtaatgctgtgtcagctttctgaagtgttcacatgtgatactcctaagccacacttcctatattcggaagttaatacaaatggtttttaatccttaatatgggcctttcttgttctaagaaaaatttcatttcaatataggaaaggactaactattttctttgaatcttttgtagaagctattattttctccataattagcccagcgtgctctctccactttcatcccattgattaagaaagatgtttgagacaggatttcactctgtcacccaggctggagtgcagtggtgtgatccccagctcactacagcctcgatatcctgggcccaagtgatccttccacctcggtctcccaagtatctgggactgcaggcatgtaccaccaagcctgactaatttttgcaatttttattgagatggtgtttcactatattgcccaggctggtcttgaactcctgggctcaagcaatctacttgccttggcctcccgaagtgctaggattacaggcaagagccaccatgcccagccagaaagatgttaaatgaaatgaagtttttaggcccactgctggagtcttctcaattatcaatgaaacatgaatctctggtatttggctacagttactgaaatatttataaaacaacctaatttattgacatttcattccatttatcttatttccaaggttattgtgagaaaatgtgctgtagttatactatcaaaaatttggcataattgaaaaattcctggtcctttgtgaatagtacttttatttaattgtattgtggaaacatccttttaataatccactctagactcttgtccaagaagcatattaaattcaacagtatatagtttatattgaacctttagttaagcttatggtgtcaatagtatctagctcagactaatagaaggtctggccaggtgcagtggctcacgcctgtaatcccagcactttgggaggccaaggggggtggatcacctgagatcaggtgttcaagaccaacatggtgaaaccccgtctctactaaaaacacaaaaattagcctggcctggtggcaggcacctgtagtcccagctactcaggaggctgaggcaggagaattgcttgaacccaggaggcagaggttgcagtgagcggagatcgtgccactgcactccagcctggcaacacagcaagactccatctcaaaaaaagaaaaaatggggctgggcacggtggctcacacctgtaattccagcactttgggaggcggaggcaggcggatcacctggggtgggaagttcgagaccagcctgaccaacatggtgaaaccccatctctactaaaaaaaaaaaaaaaagaaaattagccaggcatattggcacatgcctgtaatcccagctacttgggaggctgagccaggaggattgcttgagcctgggaggcagaggtgcagtgagtgagccgagattgcaccattgcattctagcctgggtgacacagcatgactcaaaactaaattacattaatttaaatttaattaaagtattttttaaaaaatttgtagctgcaaaaaatcagaagagtttttacccctctataggggtagaataaactaaaaaatcttagccagagaagtcttagaatccatgatacaccagtagcaaggcatacacctagcacccagatttggtttcttataccatattccaataaaaggaaccagggatccttggaggaatggtgatccctgaaccggggcaagaaatatacaagatatcttggagaactgggcgcggcagctcaagcttgtaatcccgcactttgggaggccaaggcgggcggatcgcttgagctcaggagttcaaggccagcctgggtgacatagggagacctggtctcgacaaaaaatacaaaaattaggcgtgccaggcgcggtggctcacgcctgtaatgccagcactttgggaggccgagatgggcagatcatctgaggtcgggagttcaagaccagcttgaccaacatggagaaaccccttctctactaaaaatacaaaattagccaggcatggtggcgcatgcctgtaatcccagcttctcagggaggctgaggcagaagaattgcttgaacccagcaggcggaggttgcggtgagcagagatggcgccactgtactccagcctgggcaacaagagaaacttggtctcaaaaaaaaaaaaagttggacatggtggcctgcgcctgtaatcccaagttacttggatgctgaggcatcacctgagtcccgggggttgaggctgcagtgagccataatcatgtcactgcacttcaaccagggtgacacagtgagaccccatctaaaaaaaaaaaaaaaaaaaaaaaaaaagattttggaacataatgtactgccagaaaagaagaaagttcttttttttttttttttttttttttttaggtgaggtcttgctttgtcacccaggctggagtgcagtggctagatctcggctcactgcagcctcagcctcctgagctcaggcgatccttctgcctcagcctcctgagtagctgggactacagttgtgtaccaccacacctggctgatttatagagatgaggtcttgctatgttacccaggctggtcttgaactcttgggcccaagtgatcctcctgcctcagcctccagaagtactgggattaaaaagtgctgggattaaaggggtgagccaccaaactgggcagaaagttctttaaaacacacacacacacacacacacacacacacacacacacacacgccaactgaaagagctccagtggccaaaactgaaacaacttgagcaacaaaataaatacccaaagcataaaataaatatccatgaggccatactgacataacgagtttttgttttgtttatgtttttgctttttgttttttttgtaagacagtcttgctctgtcacccagactagagtgcagtagcacagtctcggctcactgcaacctccacctcctgagttcaagcgattctcctgcctcagcctcccaagtagctgggactataggcatgcgcccaccacgcccagccaattttttttatttttagtagagacgaggtttcaccatgttggccagactggtctggaactcctgacctcaagtgatccgcctgcctcggcctcccaaagtgctaggattataggtgtgagccaccacacccggccaataaatgtttgaataaataaaggagaagggataaatctgcagaatgtcaaataatttatttgaattctccactttatttattttatttatttattttttggggacagagtctggctggattctccactttcaagaagatggagcacaactccccattccttaagagtgggtggcacatagtctggtgtcttcccctaagatcgtatgaatttctggaagggtttatgttctcagggccacactggtctccagacttcttccatgtacactgccccctaattcctttctaaggtcacacaagcatgaaatcggattctacatctattgctaaaaacaagccccatttccatgaagcactgaagaattgagtaggctgaaactggaccaagatcttccatcacaataatataaaaacctgcaaatgtgatggcaggtatcaccattcccacacatccagcacccacagtaagtatttccccaaccatcatcactctccgcacctacagtccccaatgctttgcatctcgtcagttctcttcctgatcattccacctctgctttccctgctcttttatctctcgccctacttcacaggagtaagcctcctagtcctacacagagcaatttactcagctccctgaattatctaggaatttccccaaagactagagtttgtggagatactttcctttaggtttagagagcattgaggagcttaagtaccatgggttgatgacagacgtgacaggattctgggggcagtctgcccttccagatgcataatccttttggatagggcaagcagacctgtggacatattagattcctataattcatataattttagggctgaaaaggtctttatggggcacccttacgttgaagaaagtaagccctggggctctttagtgacccaccttgggtcacattgccttctacaaactctgtgcttgtagaaaatagactttcaaccaaatgttcttggaacataatctttttttttttttttttttttttgagacggagtctcgctctgtcgtccaggctggagtgcggtggcgcgatctcggctcaatgcaagctccgcctcccgggttcctgccattctcctgcctcagcctcccgagtagctaggactacaggcgcccgccaccacgccgggcaaatttttctggattttttagcagagacggggtttcaccgtgttaggcaggatgttctcgatctcctgacctcgtgatccgcccgcctcggcctcccaaagtgctgggattacaggcgtgagacaccgcgcccgtccggaacataatcttttaacgggttttcacatttggatttctagatacagtaagtagccagttattactttaacgtcagaaaaagatgtctttaatttttttgtactctgtagtagaaaaattacgaaagaaggtacttgaaaacactaactgtatatttcctagaggaaaaactggcaaaggcgatcttcacaaagggtggaccgtaccttatacatcaaacccaacgatcccatcccacactttacattcagcttaaccagaagtaaaacctcttgtcacaccgtcaccggtattccaattatggcaataacgatctccttctacggatgcggttgacagataagatctctaaaccgctgctaatcaatcggtcctgggtcaagcatttcttatctgccggattcagaaaatacagatgctggaagctcaccggcttgttcggggaaagaacgctaagcaagaataaaattttatttcaaagcgccaaaaatctggaattctgaggtccacagggaggtttcccagagcaactcagttgttcccttctgagaacgtagctccgtgaaatgcacatccctactcggtccagagaaatagatcaatggggaaaaggattgaatcaaccaagtaggctgggcgggagacagccttaacccacgggcgcgggcgagtcgtatgggcaggggcaggcgggagcgacgtggggcgacgctcacgaacgatcagagctgcgggcsacgcaacgaagcccggaggccgcaggctgcgcgctccctcgcagcagccgggcgggcaaaagcccccagtcctcggcccccgcgcaagcgacgccgggaaatgcccacatccgggaaacctgcagcggagtgcggcggcggcgacactgagtggaaggcaaaatggcggcggcggcggcggtggcctggtgttaaggggagagccaggtcctcacgacccctgggacgggccgcgctggcccgcggcagcccccccgttcgtctccccgctctgccccaccagggatacttggggttgctgggacggactctggccgcctcagcgtccgccctcaggcccgtggccgctgtccaggagctctgctctcccctccaggtaggtccggggctggcgtagcgggtgcgctcctccagtgctcgagttggcggggcggtggccgccggggcccacgcccatccccgctggcgagggtccagaggtttggactggcgggcagagccggcccgctccgggcctgacttggctggttgcattgacccgagctgagccctgccctggggaagcgagggttggccgcgcccggtgctgcaggaagagccccaggcttttcggcctcggaggtgcaggtttggctgggtagagcctgtctttctggcggcgtgtctcccaccccacccccaacacgcgagtcggcggtgtccaggagggaaggaacgggaaaggtggttctgaaggaaaattgcagtaaaagagctacagttctttggatcccagagggccttgatcctgggtataccttagagaaatcctgggagtctcttacgtctagttcagtgtgattttaggttactgttcatagttggaagaggtgggagagatggagaggtctttatggagtaggagtgtgtatataaatacagcaaatgaaggaacgacaattaagggaacagtgttttttataacctgaaatagcttgtagctcaatgaatgcctcagatgacttgatttatccccattctgacttctctgtcaatttctaagggaacaaaatttaatgtttgtcaactcatatgttaatacggcttttaaaacatgtatcatcctccagaagttattcataaatctagtgaacaataagtataatctcatgcacagaagtaatattgtataactccagttttggaaatggatttgaatgttagcgatcatgaaacttgtttgaactttatgaattatttattgaaggttaataaatttatcagtttatcagtttatcagaagtttctgataaacttaattttttatcaaatttcctccatgaggaagaaaaggtaggacattataattggagtgaatgttctgtgctacgaaaacaaagcttattatctctgacggtaaaatggggtagttgattccttaaggcagtggaggaatttgattgaacagtaaaagaagtagcattgtgttagtccaattggctgctactgcaagaaactagatcatggtccatgcttggaatggcacattctatgcctaaatattgatggaatatgccttgctgctcaccaaaaaatacttctactacatttttaatgtataatatctggctttcattgtgtaggtcgtttttatttttgttttgtttttattgcaagtccttgttctatataaatagtgttggaactgttctaaccctggttatttggttattttagatgttttatttacatcaatgggagattgttatacatcacaaaagttatttagtcattgaataacattttcgctaagtaggaacagcaatcatttttcagcatgaagatacagcgttgctttcacttttgatctgacaattattagaaagtgaactgaagaaaatgtcagtatgcagtttcctttaaagatgggaactcgctatgttgcctgcgctggattcc

SEQ ID NO: 94914 - DNA, 92834 bp, Homo sapiens
  misc_feature (1)...(92834): n = A,T,C or G
agatttgaggaggggtctgttgtgagccttctgagaaaggatttcctccttaataaaaagtgacatttagggaacatgcccttattctttggccagatgctgttgtgtattcatgtgatacttgaaactgtggctgccatctgtgactatgagtggacagtctaaggatgaaaccaatatgctgagaatgacacagtgaatgatagggaaaacccaggtcctcaatgatatgcagagtcctgaactcaccttggacttgccctgcctctttagttcttttaatatgacataaaaaatgtcttttttttgtttttttgagacagggtcttgctctgtcgcccaggctggagtgcactggcacgatcatagctcgctgtagcatcgaactcctgggctaaagcaaccctcctgcctcagcctcctaagtgattggtactacaggcatgagccaccacgcctgactaatttttgtattttaaaatatttatttatttatttatttatttatttatttatttatttattttgagatggagtctcgctctgtcagcaggctggagtgcaatggcrccatctcggctcactgcaacctccgcctcctaggttcaagcaattctcctgcctcagcctcccaagtagctggggactataggcgtgcaccaccacgcccagctaacttttgtatttttagtagagacagggtttcaccatgttggccaggatggtctccatctcttgaccttgtgatccgcccgcctcggcctcccaaagtgctgggattacaggtgggagccactgtgcctggcctattttttttaaagatggggcttctctgcattgcccaggctggtcttgaactcctggcctcaagcaaacctcccacctcagcttcccagagtgttgggattacaagcatgcaccactgcacccagacaataaatgtcattttaaaaactgttttttgttgaatgttctgcttctcaaagccagagtcatctgaactcaaacatgcagtatcatatgccaccttaactcctgccttctacccccaaaattcaccagaagtgaaagaactgaaagatttctgttaaaattttaaacatcagctggtcttggtattgtactgtaatgactatggaaagtgcttatagtattttattatatagtcacagactatttctgccacccttcacatgaaacagatcattaggtattcatgagaattatgaagacatctcttctcaatgtccctgttatttggacaaataacaaaactataaaaggaactgctgtactcctacagatgttttcattcatttggacataatagtttctgaatttaatttttataaaaaggaaaatatagccaaattctataattctcaaaagctgtcaataaaaatatattgaaaacttttcaagagaaaatcaattatacacatgatttttttaattaaaaaaataaaaaatgtagaaagtagaaatactacaggcatacctggttttgttgcactttgctttattgtgttttttacaaattggaggtgtatttgtctgttctcacactgctaataaagatatacccaagactgggtaatttatgaagaagaagagttggccgggcacggtggctcacacctgtaatcccagcactttgggagactgaggcaggtggatcacgaggtcaggagttcgagaccagtctgaccaacatgatgaaaccctgtctctactaaaaatacaaaaattacctgggtgtggtggcgtgcacctgtaatctcagctacacagaggctgaggcaggaaaatcgcttgagccctggaggcagagattgcagtgagctgagatcacatcccaaccccagtccccagcctctccctctccttgggcctccctatcccctgagacacagggatattgaaattaggccagttaataaccctacaatggcctctaggtgttcaaatgaaaggaagagtcacacgtctctcactttaaatcaaaagctagaaatgattatgcctagtgaggaaagcatgttcaaaagcccagacagtctgaaagctaggcttcttgtgccgagccgttagccaaggtgtgtatgcaaaggaaaagttcttgaggaaaattaaaagtgctactctagtgaatgcataagaaagctaattagccttaatgatgatatggagatacttttagtggtctgggtataagatctaaccagctataacattctcttaaactgaagtttattccagagcaaggcggagctctcttggattctgtgaaggctgagagagatgaagaagttgcagaagaaaagtttgatgctagcagagttcggttcatgaggtttaagaaaagaagccatctctataacataaaagaagtgcgagatgaagcagcaagtgctgatgcagaagctgcagcaagttatctggaagatctagctgggattgttgatgaaggtggctatgctgaacaacggattttccaggtagacaaaacaatcttatattgcaagaagatgccatctaagactttcataggtagagaggagaagtcaatgcatggcttcaaagcttcaaaggacaggctgactttcttgtaactggctattgcagctggtgattttaagttgaagccaatgcttatttactattctgaaaatcctagggcccttaagaattacgctaaatttactctgcttgtgctctataaatgaaataacaaagcctagatgacagctcgtctgttttcagcatggtttattgaacagtttcagcacatttttgggagtattgttcagaagacgtgattactttcaaaatattattactattgacaatgcacctggtcactcaagaagtctgatgaagctgtacaaggagattaatgttattttcacgcctgctaacacaacattcattctgcagcccatggatcaaggagtagttttgattttcaagtcatttaagaaatttcatggggctgtggctgccatagtgattcctctgatagacctgggcaaagtaaattgaaaactttatggaaaggattcaccattctagatcccactatggacattcacaattcatgggaggaggtaaaaatattgacataacaggagtttggaagaagctgattccaaccctcatggtttactttgaagggtttgagacttcagtggaggaaatacctgcagatatgttagaaatagcaagagaactagaattagaagtggaaactgaagatatgtctgaattgctgtgtctcatgataaaacttgaacggatgaagagttgcttcatatggataaacaaagtggtctttggagatggaatctcttcctggtgtagatgctgtgaacactgttaaaatatcaagaaaggatgtagaatattacataaacttagtggataaagcagtggcaaggtttgagaggatttttttattttttatttttttgagatggagtctcgctctgttgcccaggctggagggcagtggtgcgatctcagctcactacaacctctgcctcccaggttcaagcgattctgcctcagcctcctgagtagctgggactccaggtgcgtgccactatgcccagctaatttttgtagttttagtagagatggggtttcactatgttggcgaggctggtctcgaactcctgacctcgtgatctgcctgcctcggcctcccaaagtgctgggattacaggcttgagccatcacgctcggcgatttgagataattgactccaattctgaaagaagtttaacagtgggcaaaatgctatgaagcagcattacatgctacagagaaattgtgaaaggaagagtcaacctatggtgcaaacttcattgttgtctattttaaggaattgttacagccatccccaccttcagcaaccatcaccttgatcagttagcagccatcaaccctgaggtgagaccctcctccagcaaaaaagattacaacttgctgaagactcaggtgattgccagcatttttttttgcaataaagtatttttaaattaagatatgtacattgttttgttaaatataatgctattgcacgctttatagtatgaacataactttttttttttttttgagatgcagttcactcttgttgcccaggctggagtgcaatggcacgatctcggctcactgcaaccttcgcctcccaggttcaagcgatctcctgtctcagcctcccgagtagttgggattacaggcgcatgccaccacgcctggctaatttttgtatttttagtagagacagggtttcatcatattggtcaggctggtctcgaactcctgacctcaggtgatccgcctgccttggcttcctaaagtgctgggattacaggcgtgagccaccgctcccggcgaacataacttttatatttactgggaaaccaaacaattcatgtgactcacttaattttgatattccctttaagtgtcagtggtctggaaccaaacccacaatgtctctgaagtatctctatgtatttctacttagcttgttaaacagcaaacaagatgagaatttagaattttaattcccaggaccattttcttttaaatataggtccatatccataatatatattccataatataaagataatgaagaaagatattgttggaattcttctagtctgttttaggcttatggatagataaaaaggtgcaatattagttttcttctctcggaaaaaaaccagtattttccagaggatttcatggttctagaagtactacttctaaagcctgcttctctctgcagagctgcgaatgtcttttcagataagaaattctgcattccatttatcttcaggatgtatcctttgataagatttcaacagattaatgagcaactgaactgccatattttgaagtgggagaacagtttgcctgagtcaggtatccatccctttaggttctcgattggccctkggcccacggtgagtgagctctctttgcttggtgcatcatcgctccacctagttcaagttctggcggcttcctgattttgattctcttgggaaatgaggcctgctttagcctgaggctggctcaggaaggcaacctttcacctacttaaggaaaagttcacaggcaaactaaacaatatgttgggttaaaaaaagagaccaatcctactagtactgggtgagtgaaaatcttctctcttacagtacatgtagttctactacctgcactggatgctttctttcttatccttgtttagtgtctaaaacgagaaacaatggcaaactccttaaaatacagaaccactgtggattcctaagaacgttcaaaaacaataatttggagtaaactttattttttgaaaagaaatagcaaatttgcatggtgagtgcatttagaggaaaacgggttatatgctaggtcaagtgaggccaaaacaagagaaatgataatggataagctttgagtttttgaggctcttcttgccccaggcagttccaaaagccattttatttggcaggatttgacagcaatttctgcaagaacgggataactaatccagttaaaaacgaaaaagaatatgcatactatttcataatttatattgaaatttatacattacagcaataattgtgcgactgtaatttttttttttttttttttggtggaggggtgttttttcctggagggacggagctcctgcagaccctattgggctagccgctcctcccacgtcgctgccgcagatccccgctcccctcccccacccgcggtccgtccctcctggtcgaccccgttcccgcccccgccccgcgcagactgcagccaggtccggtccgcggcggctccgcggaatgacccgtagtaacctcgccccgccccgggccgccagcgccgcgctccccggcccgaattcgataggcccagccccgcacgcgccaccgctcgckggccaatgggtggcagcctctctgcataggcaacgagtgccggccgggggtgagcgtcccaggcggttccgctcaacagacgctgctgtggctgcgccgggctgcgacactgcagttgtctacgcggccggggccgggacgaggaggcgttggacggggtcgcatacgttcgtcccctcgcattgcggccccgacagctgcgccaggatccccgggcggcggcgcggggcgtgaacgctctggggctcagccaggcctgcgcgggcccgaggccggaggaacccggactccggcgtagcggtgagtgcggcgccggttgtgggagcggcgggagccggttggcggcgcggcctccgcgtgcggttcggctgggcccgaggggctccccagcctcggggcctgggaccctgtcgtcggcgccgcacctgaccgctgggtgtgcgcgcgggcggcccgcggcaccaggagcagcggcgagcagggtgggaggcggcccgctggggtccgggaagcggctgacgtggggcctcggccctgagcccacgcgagccgggagctgcagcgcgaacggcgtggggcggcgctgaccaggcagggaggatgcactgcgtgcctcccggcgctgtggggcggggtggggaggccacccccttgaattaagagggctctgccgcggccccagcagtgcggtgtccgtggaaggagactcagccctgcgatttcggaaaacccttgtttggcggggcgggaggggctgttgctgcgtggggtgagaagaaactaggtgcgtgaggtgggtcgaccttggtgattggttctgggcactatcgtggtggtgggactgggattaagactgtcgtttggggtttgagagttgcagctttgcttttccccaagtgcgttttaatcatatactgttgataggttgggtaactcggggactgcttactaccagcagtcctgtggggtaggtgttatcaggctcgtttcacagatgaggagcccgaggcacaggttttcaaatggttttcgcaggaagtctgatactagaaagtgtgctctaagctgctgtataaaagatccctcgaaaatgaaaaggctggaggaatgtctttaaaattatatggaagctagaaaggcagtaggctttgtgaacgaaattatagctgaaaagaatgacaaatagctgacatttattgagcttttattacatgccacgcactgttyggagagctttatgtacagtgtcttcacactgttaacagtcctctggggtgggggttattcccattttacagcgggagaaactgcagattggacgacttagcttgcctcagatctcagctagtaagaagctgggattcagacaggcctgtgtaaatccagagctctgaaatctaagcactatattttgctgcctctccttggtggctggctgaatagtttccacagtggattttagtctgggtggccaggagagttgtagtttgatgataccttctttcatgtttatcaacctattttgtttccccaaatkagttctgagagttaagggtgctgatgagttgctcctgaaagtgtattagaagggtattataggggacaggtggtgtgacatgggaatcttttgcacagacttgattttgttttctggcatttttctgggcagttcctcacacttggggatgagtaagccttctaattgtcgcatgcgttttctctctagacttttcctggtttctcttttgtataaaaatattggttttgtaggatgacattgggtgtggggcagagtggtccattggacctaagggtcaaggtgacaagtcacctcgtatctttggatctcagttactgaatttgtaaggctttagactcagtgacttaaagcttaaatattctgagggtctaaaatgttctccttgaaggaagaaaggaagaatgggagaaatgaagaacgcacaaattataaggggaaaatcatcctctgtctggtttggggtgagaatcagatcttaaagcctcgaggtctgtttcatttgcttttgtgtttccctgctgtttggttccagttaagtgactgtttcattcctcatttgattaattgactcacctagagccatttaatttttgtgatatgtcaggcaccttattaggtgctgggaatacagctgtgaatagagggaaaaatagacaagaagcaaatggtcatacaaacggataggtggttgcaagtttgataggtacgatgaaggaaaagtattgtgtgaatgaggattatgagcaagattgtgatgtagatggaaatctagtctagggagctgttttttgaattgatrtggtgagattttgctagaggacagtcttgaaatctgagcctgcaattatgtacataatgcaagagtttgggaagttgtcagcaacaataattcttttcattgcacagtgtatttcatactcagaatgtcatcccggctctcattgcaagatacgaaaatgagataggcaactttacaagttgtcattctgtctgccttcagggtacttaaagcttaaatagtcctctaatactttctcccactcaaaatgaactgtaagggggagtaagactctttkatgtgagatttgggcttgaatattggatttagattttttttaggaaagctaggccaagggtgataggcttttaaaacaacgagcatcataatgactcaaaagtatccattgtagcatacgcttcacagggtcatttaacttaaaagtctcatcatcttaggagatcattttttgatggctggattgggaaatatagattgttaaaaatatataaatgtctcagttgaacatgtatgaagccaattcaaataatacattgcaatatatttacttaatggccatctgcatgcaaaacaccgtcctaggggtaccatgtggcataaataaaaaagatgaacttgccaaagttactgctttcaaagagatttcagttaatgtatactaatactcaaatttaaggtttttttttttcaaagtgctagcatatctcatctgatccttttaagagccatatatgataaacagaaatactgagaaaatggagataaaaaattgtcaggatatggtgataaatagtaaatggagtgggagaaagaggtgctaagtgattactaggtttcagacctatgcaactaaagaggtatgtgtgctattcactgagctggggcttaactggtagagaactaggttctggatatgggaagggcatgactttagttttggaagtgttcagctggagctgcctttgaggcctttattgaggtactggttttgtgctgagaattggggtggccatttaccgttttgaagacctccatgtagaggcaagagctcaaaccatgggtatgggtgagattgcctgtggggaggctatagaataagaagagraggaggcctgggatggagctgggcagaggaggttgagcttgtcaaggagacaagagtggccaggaaggtcagaggacagccagaaacagatgttcctgcaaggcgatgagtcagtactgtggaatgctcctatgagagaagaattgagaaccatcattgaatttagcaacatggaggtcactggtgacctttgaaagagatgctgatctgcaggtaggggtgggatggggagcagtgggaggtgaggaaaacggagacagaaactgtttccaataggtttgatttcagcatgtttaaatgctgatgggaaggctcagtggagagggagtggttgaatatagactagaaaagggtttgtgcagagttcctaaaaggatggggttgggatgggacccaaagtacaactgaggcctgtgtctttgctgggaggaggggacaccttccacagtaacagaatacaggcctgtaacctatggagtactaagcaaatgccaaaaattgtcaagaactgttaaatttctaaaaattagcccaattttagttgactcatgacagtcttttagaaaactttgttgcaagagcattgtgtgattgatttaaaatgtggctcagtcttaatttcatccctcaatagagtatatattttcatctgacttttgattgtaatttatttattttctgaaaaaggagacattgtaaatgttaaatcctgtggtgccttccttacatgtttatttttggtttcattagaaaaaagctttcagacggtttctgttttcctgacatcataggtgccttaattcttttaatttaaagtttagcttctgttattattggaatatgtttatttacgtatttttgatgtttcccattttgaagggtaaagaattggatgattcagtagtttcaactgatctgctaatttttgtttagaattgaagatacttaaataaccaaccttttggataagtggcctccaaatacagctttctgcttgtttgtgaaggtatttgttattaaggattcattcattcatgtatttacttagtgtctgttttgcaaggtactcggaatttggaaatgattgggcgagttcctgctcttaaggagctcacagttcaccacaggaaagaggtgtatgaacaaattacagcatggtggaacagaagaaggtatatgagcaaatatattacaggatggtataatcagtgcagcagtggaatctgctaggaaatagagaaaaagtgcagagcaggcacagagtagggaaggaaaaggggagacttctcagtggagatgatagctgaactaggttttccaagatgaactggagttttcccaggtcaacagggagccaggaaatagaatgttttaccttgattttggatcctctgtgtgtgtgtgtgtgtgtgtgtgtgtgtacacagatgtgtacgcattggagatgttataacgctaccaaagaatattgttagaaaaattaaaaattgcttatcttactatcctcatgttgattgctctagctgtgaaaagctgcacattttcccctgtcctgtcatggtcaacttttctgtctcctatttgatgcagaaagtaactgaacttaattatattatttggatacaaagcctagtttttgtttttctaaatgaatggtctttggaataaggataatagccaacacctttatagtatactgtggccaaatgctgttctaatttttatctcagccttgcaaaataggtacttttttttttttgagacggagtctcgctctgtccccctggctggagtgcagtggcaygatctcggctcactgtaagctccgcttcccgggttcacgccattctcctgcctcagcctcctgagtagctgggactacaggtgcccaccaccatgcccggctaattttttgtattttcggtagagatggggtttcaccatgttagtcaggatggtcttgatcttctgaccttgtgatccgcccgcctcgccctcccaaagtactgggattacaggctgggagctactgcgcygactgcaaaataggttcttttatcattctaatttttacagctgaggaaactgaagcacagagcaatttaagtgacttgcacgattgtgtgctaaatgtgtgctggatttcatcccaggcactttggttccagagtccctgttcttaacctgggcgctgcatctcctctctggagtgacagtttgaagttcatgttaacctttgaaggcatgattgtgtagggaaaggagctgtgatgacatttaggggcagttttatgtctgttttaattacacaaagttgctgccccaaataaaactgccctgccccccccgccccccccccccccccccccccccgccccggggaaatcataaggaaattgagagaatttaactagaattttcttttttttctttttcttttttttttttgagacagagtcttgctctgtcacctatgctggagtgcagtggtgtgatctctgctcactgcaacctccgcctcccgggttcaagcaattctcctgccgcagcctcccgaggagctggaattacaagtacccaccaccacactcggctaatttttgtatttttggtagagatggggtttcaccatgttggccaggctggtctctaactcctgacctcgtgatctgcccatctcagcctcccaaagtactgggattgcagatgtgaaccaccatgcccggcctagaattttctttttggacttgaacataattcctcaggatgctttcccctttaaccttacttcgcaggaattgttattgactttttagattggaatataaaggaatttgggatcccatagtctgctaattccattttcttttcctgtcttttaactaaaatattgacgcactttctgtatgtttgaaaaatatttcataaaatttaatccacttaaagaaacccactcctttcccccaaatcttacagctaaccactgctctgaatttggtgtttattattcctatgtatttctgtacagctttattacacatgtgtgtttccttagacagtgtatagtattgttttgtgtattcttaaactttatatagatggtactgcatgtattcttgttcagcatactgtttattttatccccactcaaaatcacttakcagtgtggtttcatgaattgagtttcaactcaattcatcagtgtgggttcatgtagatttaggtcatttatttttactgtgacaagttagtacattttaggtctataccatatttatttcccctttgctctcttgatagacttttaggctgtttccattttttttgttattacaaacattattaccgttaagtattattgaacacaagtctttgttttaatttttgacactgtagttaacctgtgctcctttttctctgttcttcacatttttgtctcggccttcctctaatcgtttcattatttgagctaaggtaccattctttgtccattatacttaacagtacaaaactgtaatgggcacttttcctcgaaggctctttttagtaatctttactttagttaactttctttgcttttttttttttkaaataaaaatatcttaaaatatagaaatatcttgaacatattttacagatatatattattttacttgtaattccatgcatgactgcagggataattcacgtgtaccctttctcttgggaaacgtttctgtgttgatgtacatttgatttagctaattctgtattttagtgtttgtttcctttaaatattttcctctaaatgtagtgcacttttttcattgcagtttggtgggtaggaacatgagctcagagttaagattgcttggattggaatccgggctctactttttagctgtgtgtctttgggcagcgtatttaatttctatgtctcaatttcttcatctgtaaaatggagataatagaaatctacccgtagattgttgtgagattcaaatgaggtgtctggcatagtcattactcaatacatattagctatttttattagttttattttttgttagagtatgcagtattttctaagcctactcagtttgtggtgttgccttcttttttgaagcagcattttaacacagacatctatgcctcaaggaaatgtgtgatgttttataactgttagtggagattgggaagagatactgtaaactgtagcaaaccataagttgaggtacattaactagattgttatattttaatatcaataatttaggatttggttgggcatggtggcttatgcctttaatcccagcactttgggaggccgaggagggcggatcacctgaggtcaggagtttgagtccagcctggccaatgtggcatgagtccagcctggccaatgtggtgaaatcccgtctctactaaaaatacaaattagctgggtgtggtagcgggtgcctgtaatcccagctacttgggaggctgagacaggagaattgcttgaacctgggaagtggaggttgcagtgagccaagatcatgccattgcactccagcctgggcaacagagggagacgctgtctcaaaaaaaaaaaaaaaattaggatttatcgtgtttcaatttttttgaaatacgtataaagcacwttgaaagtgagttgacatggtgaaattctcagataattaccaagggtctactcttgttagttttaaataccttttgtaatatgaccctgataatgattcagatggtgtttctaagtatattatcctatgtcatcaaccttgtgttgttcagtggagaaggaaccattgccatccatgtatgtaaagcttcataggtaaatttgagcgagtgacttaacctttctcagccttccatttcaatttctgtaacataaagatttcaattcttacctcacaaggttatcatgacttatgttagttgcttccttcatctctctggctcccctgtcttctcttgtaacttcctttttttctgttttccctatgtatattctttcttcctctttatcccttctctgcccttcacaagtagttttttggtaaatggtaacaagacattctgaaccagtgtgtgagtgaacccattatattaataaaaatacacattatttaaaggggactaggaaatgttaattctgtaaggacaagaggatttaggccatatgaagttacagaggagatgctgtaaatgttaaatgagcagtataaaggacagagaggtcatgttttgccacagtagccagggaatggtcagctgagcaaaatgagactaatgttagatttgaagaaagatttgtgaggaaggtattcacataggatgtccagtgggcagtggagtttggaagattggcaaataaaactgagccatcaactgcttgggaggactcaggaagctgtgaggataaatcacatcccatggggaagaaaggcacatggacttggaggacaaaagcaattaagacctagcgtaacctctttatttattgattaaactctgaaagtagttgttgaatgaattaaaccttctaggaatagaaagggagaactagcagctagcaaatggagagaattgagtggctctgagttgttgcaggaggagctttgaaggtctggcccgagttgtttgtaaccctgccgttgagactggtggtgtggcattgtctgtgccatttagtctgactggacttctggtttttttttttttttggtctgtaatcctttcttgcttttgggggatggagagggatctgcttcatcactgttctttttacctccttttccccctcctttacttgactcaggatttttgttacctgtgccatatttatttcttaggtgtctttgactttatcagttagctttgtgcatttccccatgtattcattgatgtgtttactacctggaatttaatggggtgtttgcatgagtctcttcctcttttgacatctcaataagcaagattctcatggaaaccatctcagaggcagtgggcagtaaatagatggagtgaaagatgaggcagaactgtttctctgcattctatattgagatgtacaattgtttaacaaataattacaaaagaaaatgagtgccatgagagagtgccctaagggrtcagcggatgggtagagaagttcaggctggggctagggccagtggaggtttgggtatcagagaatgcctaatcaatttagatgctaagagataactaggctttgaatgtatgcagaagaataaaggacattccaggtagagctaacagggcaaaatgagcaaaggcagagaagacaggtaagggagacaaagaagtggatggaattgatttgtttgtagtgtgcgaagtagagagttggaaggtgagagttgaaaagtaagctgacttcaagttgtggagagtcttaagtacttggcagacgagtttggaattgttttttattccttcttttttttccccttttggacaatgaggagggaattgagattcttgaagagaggattgatgtgaaatacgggttataagggagtggcaacgtcacactggcaacatgaatgaaggatgcattgatggaggagggggagaggggactagagacagaggaatagttaaggatacagttgaattctgccaggtgacaggagtaaggacctgaactgataaagtaacacgtgagaaagggcaggaggcaggggatgacagaggaagcagaaccatcgggacttggcaactgactggatctttgcagggcaagggaagggaatattaccaaatgctttttaagttttgagtaagttctagaaatgggaagagtcagctttccatttgagttgggaaaggtgaaaagcagagtgacagtagaagatgtggaaaggagaattcagttaaaaaaatttatttttaaaaatgcgaagtgggatagctgggatctcctcaaagaaagccagatgaggggtcatctgggtaggcgatggtgagatcagggagtggcggaaagtgaacaaagttctgggcttagatgtttatagaatgaggtgagaagtcagtgaaagatgtgtaaagtgcttatcactaggggcccagtaggcattgtctagggaggcctcagctaaggctgggtctcacaaacatgtggcattggtcctggctgtataactctccagctggcagccttgtgagtaggagtgaagaaaatgcagtgaatctgcagggagcggttgtgttttagagctctaggatagcaagtgctcgggagtcctccaggaaggacatggttgtcacagaaacattggttcctgggactaggctttcaggggacaagagaagacacaagggagttggtggccaagatggagtgggagagcaggtctagtgggtgaggggttgtggggttactaacagcctattctcattctgttaatttttaaggcttgaattagttttctaatgataggagtcttgttgctttgggaccacagatgtgaatgttattattattatttttgcttctctgctttatctgtggcattactgctcttgtggcattccccccsacccccgactcccttgtttttggtgaacataatagtcaccgtaaaaaagatgtataattctagggaaaaacttaagtagggcaaatgctcaacagggaaaagttcataatttagaatacaggtgtgcctaaggttataaaatagataatagtactaagacaattaattttttgttttattttgagacggagtttcgctcttgttgctcaggctggagtgcagtggcacgatcttggctcactgcaatctccgtctcctgggttcaagtgattctcctgcctcagcctctcgagtagctgggattacaggtgcccaccaccacgcccggctaattttttgtatttttagtagagacagggttttaccatgttggccaggctggtcttgaactcctgacctcaggtgatcctcctgcctcggtcttccaaactgctgggattacaggtgctcctggccgacagttacatattttttatagaaagaaagtaaaagtatcttaggaaaatttaaataaattattattcttaacatctgtcatccatccatctgtttgtctatcggtgtgatggatgctcccaccaggtactttgctagtggacaccaaggatagaatgatgaataagacaaatacggcccttccctggtgcatagagtgggaaggtgaacattaagcagttccacagtaattatttaattacagttgcagtaggtcctgtgaaggcaaagttgtggggtgccgagggtggggaaccagagtaggctgtcttgagaggcttctctgaggaagtggcatccaactgatctaggagaagggggatggtagtggggcggtgtggtggtggggcaactgggccgctttctaggcagaggcttgaagcaatgtggggtggggtgggatggtgacttggctttggggaaaatccacaagaagggcaggagtttgtgcagaggtcttctgagatgaagctggatgcaaaaataaatgggccacagcatgcatgagacagaaataaaaataaagccgtctcttagaagcaatccattgagagtagactgggaagatgagggaacttggaggcttgactgtgccaactagttagcaatatctgtatcaagtcagtatgcttctttggtcctcagttactacaaaaagtttaaattttattattacaaaatttgcaaacagttaactttttatgatttgaattttatgattagcaatgttacagtttaccaaaattatcttcagcagtattaaaacatctataaatatatataacaatatacctgaccatatattatgttgattttggtattgttcgcctattaaggccaatgggaaacttttcagctagattggatattatttcataattccatagagttgtatgttttgaacagaaatatttttagtgtcttctctaagtttactattcaatttcttgtttaaaagatcataaattgacctagtgtttcaggcatgtcaatactgttgctatataaatttgtagaaattataatgaatttatatatttgctttaagtttttcttctaagaatgtgtgtttgatgagaaagtttggaaaatacgtaaaagcataaattctacattctagatatagccagtgctgaggtgctttcggtcctgatacctgtttgtgtgtatgttaacaaaagtggaaatatattgtgtgtaaatatttaacctacttctcatttatcatatcatgagcaattcccatgttattgaatgtttttgaaaatatttttagtggttgtataataatctactatatgtacataatgtactttaccatttcccaattattagatttgcatattttcattacccattattataaatagcaaatggaagttctcaagtaaatttgtttttcttcattaaatattcacagaagtggaattgtttggtcaaaaggtatgaaaaatttaaaggctcttaataaaaattacaattgcttcccagagaggttgtacttatatatctgtgccctttagtttgagtgtgtctttccattgcacctgtacttggatttatttttttatttttatttttttttgagacggagtctcactctgtcacccaggctggagtgcagtgacgtgatcttggctcactgcaacctccatctcccggattcaggtgattctcaatgcctcagcctcccgagtagctgggattacaggtgcgcaccaccacacccggctcatttttttgtatttttagtagagaccaggcttcactatgttggccagactggtcttgaactcctgacctcaggtgatccgtctgcctcggtctcccaaggtgctgggattacaggcgtgggccactgtgcccggccttgtacttccatttatatattgaaaaccagaagagagatgttgtttcatatgaataatattttgtataattaaaaaaatttcttggctgggcacagtggctaacgtctataatcccaggacttcgggaggctgaggaggaaggatcacttgcacccaggagtttgagaccagcctgggcagtatagggagacttggtctctataaaaataataaaaaatactaactgagttgggtgctgtggttccggctgcttgggaggattatttgagcctgggagttcaaggctgcagtgaaaactgtgatcaagccactgcactccaacatgtgacagagcaagagaccctgtctgaaaaaaaaaaaaattagcaacccgagtatttattttagttaaaccagtcttaatctagacctgatttaaataaaaagcaataattttgcttattggatatatcctgctgaaggatttggagaaagaatagaaattttatagatttacagtttttaaattacattggctcactactgtaatcccagtactcaggaggcagagatgggaggattgcttgaggccaggagttttgagacagcctgggcaacatagkgataacccgtctctaccaacaaaaaaaaaagatataaaagtaaaaatagaattgaagaattaaaaatcttcatttatgtgaaaatttgaatggagaggtgaagttaggaataattgtaaaaatttagcttttgatttacttttttttgcgttgtgtataacctgctaatgttaaggataatatatacaaagtgatcagaacagtgcctggcacgtattaaatgctcagtaaatgtacctattgttattgttactttaaaaatgtctccttccagctctctgaagattagctcatataatacagtgtctctcaaagtttttatcactgataaaactttatcactgatcttatcactgataaaatcaagaagattggggacggaaggaatgggatttttgtttttgaataaaaacctttggagtggtgggttggagggaggaatctcatatctattcgtcatgattcagatcaggataataatgagttgatctgtgtagtgccagttgaaatcttgatttttattcaatgaaataaaaaaattcattggtttggcttttcactgattgatttatatcccattctgtattccttttggttcctggaaaagaataggaataatttctgtaaatttgaccttattggtattaactttcatatggcaattttagaaagaagtgcctatggaagatgacttattggtgaggcttctttcctctttaattgcatgacgttatagcgcagaaatgatcacatctatgaacctagatggccttactgattgctgcttgacgggttgttgaatgagctgatattgaccagagtttctacccctcctcccctccccttttgggttgtccagttcagtgtcataagcacagacataattccttagcttattgctgggttttttttgatgatgtttctttttgtttttccctgttttaaaattttattcataaaatcagccaacatttattgaacatatactaggtaatactttgtaggtttcttgggattcatatttcaaagatgcatcattagagtgtttacctcgttgaagtagatagaaagtaaaacagtaaacatacaatccatagttaaaagtgctaatgtagatgtatgtgcaaagtgttttgggttcttagaggactgcaagtagatattagaagacttcataaaagaggtgacatttgagctagagtttggactgtttcaccagtataaaagtattgggattaataagcaggggaaggagcaatagtgtgtgatttgtaaatcataggagcagctttgattctggtacccattccctaccctcatgtgggatagcttttctcaacagatgtttgagcaagagctagttattgctttatggttttttttgttgttgttgtttgtttgtttttttgtttttttttgagacagaatctcagtcctaggctgaagtgccatggcacaatcatggctcactgcagcctcaacttccccagctcaagtgatcctcctacctcagcctcccaagtagctgggactacaggcgtgtgccaccatggccagccaattaaaaacatttttttttgtagacactagatctattttgtccaggctggtcttgaacgcctggactcaggcattcctcctgcctcagttacccaaactgttgggattacaggcatgagcaaccatacctggtcctactttatgactttaaaatattttctttatgcctatttaaattatagaatataaaatagtatttataaaagtatacatttattcatacccgctatgtatcacatactcggctagattctaggaaagcagagaaaaaaaaaaagtccttgcttcaagaagctcacagtctgttgtggggagacagaaaagcaaagttaaaatacagttgtaataagttacgttaatggtatgcctgaagtgttttggaagctcataggaaggacatctaacccagccttgatggaggaggggagataaacgatggaggtaaaaatagatggagagagttcattgaaaatctatattcctttacttctggatagagcatagtttttctgagttaggaggggattggagatgggacccaggggacataccaagcataaaggcatgggacaagaacacacatggggaatgcttggggaactgaaagggtgtgttacaggataagtcaattaacagtagagatcaggcagggggaggcctgatagattgagaaagatggtggagagctcaaggggattggagttctggatgaggtcaaaggattgaagtgaaagagttggtggaataggactggttatggttaagagtagttttggagttttgtacttgagagatggttttgtacttagattgtttagagggtgttttttaaaagttagttttgtgattttccttgtaatgaagaggtggagcagatgatagcccagatggaaagttccatgagggcaggatcagttgaatactcagggcctgtttatgtaaatctgaactttggtattgagaatgaaaagcatagcacattcgtagatttacttttttggtgagaaacatctatattggcatttgttgtttttattagatactaacctcagtgacggctacatatacacttatacctttataaatacctagttcagaaatgattttgtaggcatgtaacagtttctgttctttgcattgatgtttctggggagaatggtggacatagtgtaaaactggcatatgtaatgcctatatattatatactacatcatgtgttagattacatgctagaaatttggatggaacactacccagaattgtgagtcactatttgggaattgcccttgatgcatggataatttacccgtagacaattgggagctgtgtatttaagttaataaaatttctttgtattacatgatgccagagtacaggcatgttaattataggtgatcacagtttttgtttcttgttattaatttcaaatagctttatgaaataattatatttgctgtctttcttagataagtcaagaacataatgtgtttcttttgagctccttcagggagagtaagtttaatttattcttccactagaaagaaagatactgtgctttattcactgctgcacacccagtgcccagcgtataggagacactcacatttgttgaatgaatgaatcagtctctgcatccctgccacctagcacagtaatggacatgagatactgagtaagcatttattaaattgagttgaaagatttgaatatattaccagaaaatttttggaaggccaaaaatctcatatcagaatgaccagtatatacttattaatggaagctcaggaattcctgaagaatagcttttctgttggtaratatgtactaactggttgagtaatatatgctaatgtaatttaaaaaattatgtgattgtgaaggcaggaaagcgatggattgtttcaggccaggcccactgcttgctgtactttaatgtcattgctgcttatcgccttctctgcagccttgttgacactcctgamaacaagtgtttgtctttggcttctagggcactgtttcctgttcctttacctttcttgttggttcttctggcatctgcccttaatcctttatcctacaattgaatatactgtttctgaggaattctgtgttctatgaatagagtcaatgatgactgtgacctctgcatcttcagctgtttggagccccagccctgtatttctaacaatatagtgaatctctcttctggtctttcccacaaacttaacatccagccctatatttatgcgctcatatttgtgtctgttcttcttgtattcctcgttacacgccaccattctttcattctggaaatgtagactttaattttcagagcccttactctatacatcctacctgacaggtcctactaattttacctcagagaagcctgtacagttggtcctgtttcttctgtgtctactgccttaaattctgcacttcatcacttgggctgtggtaataaccacatacctggaatccctttcggtttattttctgtgttgacccaagtaatcattcttaaaaaaaacaacaacacacatttaggactgggaacagtgactcacacctgtaatttcgacactttgggaggccaaggcgggtrgatcacctgaggtcaggagttcaagactatcctggtcaacatgggtgaaaccctgtctctacaaaaaataccaaaattagccgggcatggtggcgggcgcttgtaatcccagctacgtgggaggctgaggcaggagaattgctggaacccaggaggtggagattgcagtgagcctagatggtgccactatactccagcctgggggacagagcgagactgtctcaaaaaaataaaataaaataaaaaacaaatttagttaaatgctttacttgaaaaccgatctcatgctatctacaacattttcattgctaactccccccrtatatttcctgtgttccagcgatctcaggctacttgtgattactcactgtatgctcacccatgcctccctgttaggcaggagtgaaggaggaataagagcctggagggatttattcagctttgtctgtgggtaattatactcatcctgcatcttgaaagatgagtttattttgacagtcctcttagctgcttctgtctctctccaattccataccccattccaagttttggacagaagagtatgattggaccagcacattcatgtttttgatacaggcttcactggtcacaggtctgctggatacctgtggatgcacacatttgccgtagtctgcggtgttggagatggggacagaacagtatcacatatgtgaaacagagccagtgcttcccttcccaacagtcgtaggccaggcaatgtggactgtgggttgacatcactggagactgtttcagaatcagaataaagaccaataataaaccttttttttttttttctatttatggaatatgggagctgtggaagagaggtattactaggctggttgtttgcttcagggatctgcttctcatctttccaggacttaattcagctactacctctgttaaaatttttctttgatgctgtgcaacttactgaataagattttacctgctgatctgtgatgtcactattgccatatacaaaagtcccatgactatttctggttttaaaattctgtattaacaattcgtgttttgatatggaatagggcaaatatgcattaaatatgctgtttctcaaagktttttcttctagataaatgttagaattaatatatcacataagcatacaaaacaaacacgtaagaaaaatcctagtaggattttcattgggattgcatttggtttatgggttaattttggcagaattacatttatcctttctactcaggagcaagtctgtcttttcatatattcagggtttttttgtgtgtgtctatcagtagcattttacatacacagacacccatatgtaaatatgaatgttatattacatgaagtattttaaacttgcgtttgctattgtgactatatttccgtttcaatttctaactggtgattaataatatataaaaaaactgtcaatttttggccgggcgcggtggctcatgcctgtaatcccagcactttgggaggccaaggtgggcggatcacgagatcaggagatcaagaccatcctggctaacacggtgaaaccctgtctctactaaaaataaaaaaaaaattagccaggcgtggtggtgggtgcctggagtcccagctactcaggaggctgagacaggagaatggcgtgaacccgggaggcggagcttrcagtgagcagagttcacgccactgcactccagcctgggtgacagagcgagactctgtctcccaaaaaaaaaaaaaacaaaaaaaaacctgtctatttttattatttacttggtatcgaagtatttttgtgaattctccctctggttggatatttttcaaatgattccttcagattttcttgtcagrcaggcacttatctgcacacaataatgattctgtctttttcagtattcataactgtcgtttrttttttcattgcattggctaaagtgcagtgctgttcagaagacatgccttgagagccgtaaatgtaagccatatatgtagttttacatttctagtaggcaattgatttcattacattgtttaatgtaatatattcaaaatcttatttcagtgtatatgttcaatataaaatttattaattaactattttatgttctttttttactactaggtctttggaatcccatgtgtattttacacttagatcacatctcagtttggactagccacgtttcaggtgtgcagtggcacttgcggttaccgcattggacagcatagagttagagccttcttgatatataataattatgatcatagttggccttgttgtcccttacttggttggaatttgcttttcagtatgatgtttaatgttgatttctaataaatatactgtttttaagtttaagcaattttgtttctgaataagatgttcctttaaaacttagtaattgatattcactccccgccccacccctgagatggagtttcactcttgtcgcccaggctggagtgcaatggtgcgatcttggtttactgcaacctccgcttccygggttcaagcgattctcctgcctcaccctcctaagtagctgggattacaggcatgcgccaccacccctagctaattttgtatttttagtagagatggggtttcaccatgttggctaggctggtcatgaactgacgtcaggtggtccacctgcccaaagtgctgggattataggtgtgagccattgcgcccggcctcacttttcttaaatacttaagaaaatgtatggtgatgctcacacctttcccctcctacttatgcctgttaaatatagaggatggtagtaataaagaattctcatggtgaagcatcttttcactcagagtaaacaaaccatgcttggttatggtgtatcattcttttaactcaactggattagatgtgctgacattttaggattttttccctcatattctttaaagagattgtcctatgtggtatgtcacgttttggaatcagcattatatcagctcttgtaaactaggtaacaaaacttcagatcattctggcttaacaaaattgttttaaaacttaaaggaatatatgcacatgattgaggactttttaaagtaatttcttagcaaaatgtatttgtggaatgtaaattttctaagtccttgaaagtctgaaaatttctttattctacttgcaattgattgggaaattagctgagagtagaattctaggttaaaactttcccttaaaacttttaaggccttgttcatagttgcctaccttcctgtgtttctgagacatctgatgccattatgattcttacttctttataacagygatctccaagctttttggcactagggacccagtttcgtggaagacagtttttccatggacaggggtcgaggaggcagtggggtgggggatagttttgggatgaaactgywccacctcagatcatcaggcattagattctcataaggagcggacaatctagaacccttgcatgccgaattcctgctcctgtgagaatctgatgcagctgctgttctgacaggaggcagagctcaggcggtaatacttgctcacctgctgttgcctacctgctgtcaggtctgtggcctgggggttgagaattcctgccttacaggaagggtgaccatatatcctgatttgtctggaatacctccagatcactgtttttttttttttttttttttgaagacagattctcgctctgtcgcccaggctggctggagtgcagtggcatgatcttggcttactgcaagctctgcctcctggcttcaagtgattccgctrcctcagcctcctgagtagctgggattacaggcagatgccaccatgcctggctaatttttggtatttttagtagcaatggggtttcrctgtgttagccaggatgggctcgatctcctgaccttgtgatctgcctgccttggctttccaaagtgctgggattacaggcatgagccaccacacctggcccaaatcacactttttaatagtacctccttttattctgatatgtatccttctttgttgatcagttatagaatcaccttatttgtaggtggtttgctttctgttttttttttttttctttttttctttttttgagacaaagttttgctcttgttgcccaggctggagtatagtggcaggatcttggctcactgcaacctccccctcccgggttcaagcgattctactgtgtcagtcagcctctctagtagctgggattacaggcatgcgccactatgcctggctaattttgtatttttagtagagatgggtttctccttattggtcatgctggtctcgaactcccgacctcaggtgatctgcctgcctcggcctcccaaagtgctgagattacaggcgtgagccaccrtgcccagccagccttttgtttttttaggaagatttgaggatattcttatactctgagctttgagaatttacgtggctctgtctagaagtcagttattttttccctcattcatctgcccagtcctttcaaacygaagactagtatttatcagctctgggatattatattgcagtgtgctttaggaatttctgcttgcaaaatgcttcaggaatttttgcctctttgttctttttttctttttatttctggaactccttgtaatggaacttgaatctcttggattaatttaacaccttattttttaaaatgagaattaaattttctatattctrccccttgcttttgctcttctttrtctggaaaagagtctccacctcattttctgacacttgtattgactccttaatttcagctgctattaatttcaaagaactttttcttatttttattccttctgttaatatatagcattgcattcttgtttcatagatggcaatagcctctcttatgcctttgagaatattacatagacatattttaaaatttcccacatttcctacattgtctgtttccactgaggcactttttgtctgctrtttgtctctttctttgatagtgatggtttttcacaaatatctggtgattaagaactttatcttctgtctggattttgaatttttaaatggttttcctgtttctagtttctttttccacaaataaattctcaacatttggcaccaggtttaatattatgaaacagatccgagtatgtcatccccctgctaataaaagttagaagacttttaagagatctggataatgtttcaaccacttagggcagcaaacattcacagtggcagtgaggcatttgtcttctagggccactgcaacaaatcaccacagactgggaggcttagaacaacagaaatttattctattaatgttaatagagaccagaagttcaaatcagtgttactgggttgaaatcaaagtatcagcagagctttgaaggctccagggaagaacctgttccttgcctctttcagttctagtggctgctggcattccctattatcagtccaatctttcaggccagcatcttcaaatctctctgctccatcttcaygtcaccatctccttcatgtgtgtccaatctccttctgcctctctatttataaggacatttgtgagggcatttagggaccactgggtaatctagggtctttttccaaataaggtaacatttgtagatcctagggattagggcctgataaccttgaggtcctttattcagcttactacaactacttagagtcttctgaaatttctcttttcttgtacagttcccttcgcgtttacaaataattgttattaytgcctgcagttattgtctgcttgaacaaaaatacatgcatcaactcagtttatagtgatttccttgaccttgtcttctccaccctagacaaaaggctgcaattgcctgttttcctaatgcagctgatgcacttctcatagtttttgccahgttaaagtgatttgtcaggctctaccactgactaggaattttcttttttttcagtactatggtgtcattcttagaatgcaaagtgtcgggtctggagctgagtaaggcatttaataaatatttgttgaagagatttttaacatttattgagggccaattacatacctagtaggacctgtcaccttgggccatttaataaagtagggtaaagtaagcatggcacataagtttccccagggcatatttgtcaaaagggattgctgggtcataggagtctacattttcagcttttgctagatgctgccaaattgctctcttaactggctgtacttccgtaagagtgccaagatctatcttgtttgccatatctttgccaacacttgtgaatttttttcattaaaaaaattttaatgtaggaaatgatactgttttaatttgtatttccttgataattaatgaggttaaccatttttaataggtaataaacaatgtggaattttctgttaatatacatagcctgctttctcctgttgctcttttttatttatagaaattctacaactatggatatgaattatatatagcactgttctcttttacatgtgaggaaactggcacaagaaattattaataacaagaagatttctaagttatttcccccctggatgaatagatgcatgaccttgtctggagtcatagctaataagaaacagcagggattttgaacccagtagtatctgagtttaaggtctgtccttttttttttgagacagagtctcgctctgtcacccaggctggagtgcagtggcatgatctcggcttaacgcaacctctgcctcctgggttcaagtgattctcctgcctcagcctccagagtagctgggactatatgtgcaygccaccacacctggctaatttttgtaattttagtggagttggggtttcatcttgttggtcaggctggtcttgaactcctgacctcaggtgatccacccgtgtcagcctcccaaagtgttgggattacaggcgtgagccaccatgcctgactttaaaaaaaaaagtttatttattattttactttaagttctgggatacatgtgcagaacgtgcaggtttacatgtatacgtaggtacacacgtggcwtgttggtttgctgcacctttcaacccatcatctaagttttaagccccacatgcattaggtatttgtcctaatgttctccctccccttaccccacccacctacaggcccaagtgtatgatgttcccctccctatatccatgtgttctcattcttcaactcccacttatgagtgagagaacgtgtggtgtttcttttctgttcctgtgttagtttgctgagaatggtggcttccagcttcatccatgtccctgcgaaggacatgaactcattcttttttatggctgcaaggtctgtccgtttttacaaaaattaataacaaattaaaagttaatgaagcagtggtatgttgaattaagtgattcaaaaaaacttagcttttagctctacttgttaatatattcttaaaaataactatataatgactgctaacctgtttgcttcgcaggtgatagagaaaatcattgaaaaaatttgaaagtgttttttaaaaacaatgtattaatatcaccacatatacatcttaatacttattctttatcatcatcatgagtaaatgaacgcagcctttatagtatactttttgagttttggaaataccttattttttataatagagtttattttttagagcagttttaggtgtacagmaaaattgagaggaaggtgcagagatttctcatataccccttcccctacacaggcatagcctccctctttatcaacatccccctacctccccagagtgctacattggttataactgatgaacctacattgacacatcgttatcacccagagtccatagtttacattagggttcactcttagtactgtaccctccgcaggttttaacaaatatatgatgacatgtatctaccgttataatacatacagaatagctttattgccctaaaagtccttttgtgctctgcctattcatcctcctctgtgctctaacctctggcaaccatggatccttttaccatctccatagctttgccttttccaatatgtcatatagttggaatcatacagtacatagcattttcagactgtctcctttcactttgtaatatgcatttaagtttccttcatgtcttgtcatggcttgatggctcatttcttttcaacactgactcattttccattgtctggatgtaccacagtttatatatccattactttgttgaaagatatgttgattgcttccagcttttggcaattatgaatcaaactgctatggacatgcatgtacaggtgtttttgtagacatattttcaactcttttgggtaaataccaagcactgtggttgctggatcatatatttggagtatgtttagttttatatgacactgtcaaacttccgtagtggctgtaccattttgcattcccaccagcaatgaatgagagttgctccacatccttgcaagcattgggtggtgttagtgttttgggttttgggcattcttactggtgtgtagtgtgtgtactatatgtttttgaagaaaagttacatgataaaaattttgtttgctagcgtgataggttggtgtttccagaaaaactcaccggaaacttttcatgtgaggtttagaagtaaaatasttccaggaaaaagttggcattcggctctgattaactagaatatgagtagtaatgcttgtcttttttatgtttgttttgacaggttttgacacaagggcgcatatcttcaaagcacctagtacctcctaccattgtcaactggtaaaatatttaattttttattacaatagatttcttttatttgttataaaataaatattaagttaaaaccaattatggctaaattgaccaaaaaattgtaattctcattttatgattatatatggaagatagttttatatttactttaattctgtataaatcaattgggacattaaaccatgtcattgagcagtattgtctatcttcctttccttaacttgaatttcactaagtatctgcaagggatttgaactcagtggcctctttattttggatagtttagcatgaattagaccattttaatatgtgatggtcatttaaaatttgtatgaatgttactgtaaatttctaactggacattttagtagagattgtagtttcaagggctttttgtcaacccatagaaggttctgcatggttattacagttgtcatggggcataagaaatatagcacaattttattctttctgtgtcatctgaagtgaattagagtttatgaaattttagggcaaaaatttaaggacgaaggtttttagcgttctgtgaaatgaaaaaattgagtaggactgctgtagggaatagtctatgttggtaaagtgctttgatgatgacgtaaaggcagtaagcattttatccattagaatcatgatagttgacatccttcttttcagaatctcatttcgaagtcttttttcatatcagttgaatttattaatcttaacatttttaactgattttaaaaggaaatcacacaagtaatatgtttattattaaaaactgtaagcaatgtaggagcatctaagtaaacaggaaactcctatgttaccctggttcttttgctagggattatcccttattttcatagagtgtatctttccagacgctttgtttgcgacgctttgtttgcgtatccaagattgccatcttttaatgaagtagatgtgatggaaaaaggaatatactttgtccactttaatagtacgcctcactttgttttagacatgtctgtgcctgcgtctctttgagggatatacgtgatcaaattaagagtgcttttgaagtgactaggtaaacccattgtaacacagtactcctctacaaatttcttttagtagttaatgggttatgggaactccaaactttgaattcttagctaagaatgcatcaagagagtttagcagatttacaataaaattgaaattgcaaagataattatgacatattaaatgatagattttaaataggtagacatttatagaaatgactgtaattactgttgaggatcagctaggtttgngtaggtgaagaagtggttttggagcttcagtgcatttatgtgtgctcagtagggtacttaggatatttgaggagggaaaaggccgtcagaaactgatgtgggagggtggtgcacaggaagaagtactatggtacagtgacaaagataactttgtcataattttgcctaaaaagagaaataagwctcgtagtcatgttatataggttaactgtgcgatgaagtaaagggaatgtcatgaactacttgggaaacccagtgtcttgaatcccgaaacttagaactcaaccttttcacgtttgggaattgcttatgttcagaagtcccatgatttaagagataatgtaaaaatggaagttaattcacatttgtacgtgtcctttgtgtgattgtcggattgaaacattttaaacttcttaagaaatgtagcgaagcaaatttggatttgtatgtgaaagtgacctagatgagaagtatggaaggagacggagacagcagcaagtttgctcctcccttggtttcagaggaaaatggtttttaagagctgggccagatgtttctcatagctacttaaggtggattccttttttctgtgtcttctgtttttaagtgtaatctggtttttgagcacttgcagaaaagctgcagaggccagggaatgacacagcagagaatggaggtgagagggaagacaactggtgatcttagttgctttgattttgaaatatgttgttcaggaatagcttttcttagtggtaaaataattgggaatttgtaggaagaagaaaatatgttgtaaagaatttaaagataaaaaagcaagtaatatttgaatacaacacaagactattgactaaaggaagtaatcggatgtttaaaccttatttttagctacttaacctttacatagtacaaatgaagacaatatgttaattgtgatgcaggttatttattctgtatatttccacaacatacttttaagttctaattatatgttattttccttttcttaactttgtttttttagctggtccatgcagactacagataagaaactgggcttttgggggtgggaaggggagtggaggaagagaaaaggaaacatctaagtaatcttactgaatgatatataaatcgttgaaattaaagaaaatatattctgggtagacttagcttgcaaaattattttaagctattgtacctcttataaatggaataagcattttaaaatcatcttgaaaatcttcagaacctttaattcttttacattctcaaaggttaaacataaccggaagagctgtcttctctcaaatatgcatactttgttcattagatttacttttgctaactttttttttgtatgtttggaactgttatatttttcctctggcctttgaattttctttaattttattttttatttcaccctgggggaaagagaggtgggtasatttgtttgtttgtttgtttatttttgagacagagtcttggtctgtggcccaggctgaggtgcagtggcgcaatcttggctcactgcaacctctgcctcccagactctggtgattcttgtgcctcagcctcccaagtagctgggattacaggtgcgtaccaccacacctggctaatttttatattttttaatagagacggggtttctccatgttggccaggctgaccttgaactcctggcctcaagtgatctgcccacttcagyctcccaaagtgttgggattacaggcgtgagccattgtacctggccgaaaagaggtatatttaaaagtgaatttgttacttcaactaacacaaccttcacttaaaaattaggctgtctgttcactctccttagtacaggttcatgtaatgccaaatgtagtacgtagctggattgagttggaattatgaagatcctcaaatattcatgagccaggttgatgtcattaagtaatccaatagttcatgttctcctgaaatacttatatagctggctttctcattaatcattttgtaggaaatgattggaataaataaggagtagtactgaaaagagtaaagaatcctattcagtattgtcttaatcagttttgggaaccctaggcatcagtagaatatagtcttaaaatcgatctagttgaactgcatcaatattaatggtgaacaaattaagatttagtgacctgctcaagatctcttagtaattggcagcagagctcagtctagtctagtgtatgtgtttatgcacatatgcatgtgtgtatatgtatttaaaatccctgttgtgtatctaactgaaaaagatatatattcctttgcctgatttctgtttcctgttgatttttatctagaagagggataaaagctgttttttaaagaaatagtgggtcttgatcagttttggggaaattgaggggactgtatttatagtttagggagagtactcaagagtcctactgttatttccgctatcatactaataggactgaaacaattttaaaattacactggataactgaaacttaaaaagttggctttgttaaactgctttttcatgtagatatattcatgggaaagacttgctataataaatgttcctccctctctcctttccaatgtttatctttaatgccaacatttcattttctgaggttaaaataaatataggctttatagttttcttaaaaataaaataccaaattattatttcctcataaaacttcctagttgtaaagtggaactttttatctaatccagatagtaatatgactaaaccttctaataatgtttttaattgatttcctgtccagaatcttttcgacaattttatttttgtattaaggaggttcttgcatggattaatgatctcgatttcagccctgtagtcattgcgatgtcatacattgcaactgtgtgggcatagttgaaatctttgaagttgttgaaagattgtgttagtatttgaggatttggagaggaaaaattctttgtctttactaaatacataagaaccactgtattacacataataagttagtctgtgtgttgttgatatttgtaagaatttaaaacaactgtcctacttttaggtctgctttttttcgggagggaggcagcaggatatatagtaagtaaatgttttaaaaccattctcttgaactaggtatctaggtatgtatttttattatgtgtttagctttggatgcctgagaagcaaacatgtttgtgagaaccagggtgcccctctaaaaaagaaactctttcccgatagtaaataatagtctctggttgcactttccattataactctgagagattaattctgggtaggaaatagttctttctgcccttcttgaccctggtttcctatttcataatacatgatttgcgtcattcatctgggactcttaagtctctgtagagtgtgtatgactgtcacctaacttttgtggaaaggagactctcaaaagtagtgtattaaaggatacttttttctccccaacaataagrtattaactatagaatttattaagagagtatagggtcattaaaaagtttggacatgccttggagagacatgtaggttaatatcctaccttacctgctagctgtaagtgcctttggggacaatctatttgaaattgggttttgtgagaattaaatgagataacataaaaagttcccttcactgtgcttgtttgcctgcactcagaattgtttcccatttattgcaagcttggtgaaaaattccagccacatttcatactagcaaatacggattccttgatatccagcattgtgcaagccactcatttatacttcattagagataaaatgctaagccatattattattattgttatttgcagatatgaacagttgtatagtattggtgcctgagtgtggtaggctgaaagaaaaatacagaggaggaaatcagattgagtggtgggcaggattaactgagaagtaaattgtggcatatcaagatgcaccgtctgcagtattttctccttttctgtcctctcttccccctgtcctcatcctctgctgcctttgactttgtgggagcatttctaagtgttggggctctctgcctgctctgcaagttgagttttcagattccttttcatgatggtggtggatgtgaggggcataaaatgtctgcttgctctgtyagtagggtgtgaatataataccattgttgacttcttccctccttagacagtgtacatgtcttagattctgagagtgactcctgttttctttgttcagtccatgagttttgtggaggttaatttcacaggtctgccaattttgggttgagttaccatgttgtatctctcttgcgcctaagagattcttgaaaccccagatctaagcaggtagaaccatttgatacgttagtctgaaagtgatccctgtggcaacctacttttttcctgtttttctcttaggaaaacacgtcatctctgatagaagattttcttccttctcttttcttttctctttttcttccttctctcttctcttcttttctctcctctcccttcccccgctttccgcctcctttccctctccttcccttcccacctctccccatccctcctctgcctcttctcacctcacagggttgttttttctcacagggtttctttctttctgactttgtcttttcacaaagtcttgctctgttgctcaggctggagtgctttggtgtgatcacagcacaccacaacctcaacctctgggctggagagatcctcccacctcagcctccattgtagctgggactacagtcatgagccaccgctcccggcaagaagctttcatatgagcatttgtagcaatttttgttttgaaaaattgggagttgttacagggcatttgactatgatattaataatattatttaatagcaatttttaacataaaattttattttaacatccacttcataccttttggaagtatatcatttgaaagtgatttcctggctgatggttaagctccgttactttacttacatttgtttcataacacaagatctgaataacacaaaatcctgtctggtctccttttccttcagtctttccaagtcacctgtgttcttcctctcaaataatagaggtcatacagagaagagatcttccttgtgcttgatcattctgatttaaaacaattgctaattaaaatataagatgtaaataactctttgatctaatgcaactgaccattggcatagaacattttaaaaaacacatttcaagtgtttgaacctagctatttatcacacaattttatatttcaagattttgtttgctcatctttattgtataagtagtaataggtcattttcttttaatgctgttaaacttaattcatcttgttattttaattagcagttgtgagagtttagtgaagttgggagttgttaaattcttcatggtgaaagattaatggacttagacctgcatttaaatattcagggataatttcttaaaaaccttgacttgcctatatctttttctgtagtcaggcatgaagccaggcatgcccgtgtatacattcttctcagttggcaaggtatcatagaagttcttctaggtcaatgcatgtacatgtagcttacttttaatggctgcataatagtctgttcaatgggtatatatgtttttcaggcattctttgattaatgaatctttagatcattttctatttttggttttttgccactgaaacagtactgccatgtctcccaggtgtgtgtgtgtgtstktccaagttttatsttcagactatrttactactagttgcagttaactactcatccccaaatctgtaaatatgtcttcctgtgaccctgacactactctgtcgtgattcttagtgatttcaatatcgttctaacactgtggtcttattatttcatactccagcctgcctttgctattccttttccatgaccattcattctgccactctcctagatgactattttatactttctccttaattttctaataccttcctttctgcctccctcacatccaatgattttgcttattactctgagaaaatagaagcacccagaagaaaatcttctgcaagctcctattcctgcacatctgtgtccctgtttctcccaccctctctcctcctccagaggtgtggctctcttctgcataatactttcctctgctggttcatagctatcagtctgcagacaagctctactatttatgttaaaaacaaaagaacctcttttgtcctggcctgttaccattactttgttctttagagctctttctacttactgtctttctgccctttcttgaaccctcttcatttgagctttggtccttaacacttaagctcttttcaagtttaaggtcagtggagaccttcacattatcaaaaccagtgtttaactctcaggcttcctcttttatttcctcttttttggcttccctgttcatactctgtgcccattttccttgtgttgcttgacttttattttaatttataggcgctctttgtatattttgtcagcattttttcctggacacttgttttccttttgattcttttaaagttgtgtttcgtcatacagaaatgttaactcctctggattttgtaggaaaataactctataagaatcaatgagaattttgaaaaatgtgggtagtgaaggtcttaccagatatttaaagcagaagttctcaagcattagtgtacaaaaacctgcatggttgcattttaaaaatgaatctgtcacaggagttttcaatttttaggtattggggcagtaaggaacatagggaggcatatctgaggaatcttcattttaaatgacctctaaggtaattctgatatgattggtccatgggccacatttaagaaacattgcactttgggaggccgaggcgggcggatcacgaggtaggagatcgagaccatcccggctaacacagtgaaaccctgtctctactaaagatacaaaaacaaaattagccgggcgcagtggcgggcgcctgtagtcccagctactcgggaggctgaggcaggagaatggcgtgaacccgggaggcggagcttgcagtgagccgagattgcgccactgcactccagcctgggcaaaagagtgagactctgtctcaaaaaacaaaaacaaacaaacgaaaacaaaacaaaaaaagaagcattgctgtaaatttatatttggtataaaggggtattagcaaagtagtaggcaaatacatggcaggaacagaatggtgtttagaaacacattcaagtgtgaatgagaaattattaatgaagaggacattttgtctatttgagaaaagagtggtttatttaaaaatgctttaggcagtttatctgagaggaaagaatttagctttcaccgtcatacgatatagaaaaataaacactgttgaattaaagatctagatgtaaaaattaggtaaacactggaaaaaatacaggagacygatagtttaacctttggatagctgaggccttttaaaactagattggaaacctagaagctgtgaaagaaaaattgacagatttagctgttcaagtttacttttacttttgraagataatgttctaacacggtgaaatcccatctctactaaaaaatacaaaaattagctgggcgtggtggcaggcgactgtcgtcccagctactcaggaggctgaggcaggagaatcgcttgaacctgggaggcagagcttgcagtgagccgagatcgcatcactgctctccagccaggcaayggacgggactctctctcaaaaaagaataaaaaaataaataaataaaaagagaaagataatgttacaggacaggggtcctgatctaaacctgaagggaaggttctcggatcttgcgcaagaaagaattcagggcgagtccatagtgcaaaatagaggcaagtttattaagaacataaagtggcgcaagaatagctactccatagacagagtaggatgctcctgaaagtaagaggaggaacgcgcccaccctgggtacagtgctggtatacatgggaagatgtgctctgctacagggtttgtgataaaggaataattttcttaattactatattaagataacattgcaaaaatcaatgttatctttaaagcaaaattaggaatgcctttgttctscagatatcgggatatctggacactcccaagtctggatctgttttttaaacattattaatttgttcccttaactggaaacacccggaggctcggaatgcctaattttctgggaatgcagcccagcaagtcccagcctcattttcctagccctcaccaaagacggagtcgctctggttcaaacgcctctgacagtaatactcattctaaggtgtagcaacataaagtatctatgactagttctaaagattttttagagccacctagcaaataagatgcggttgtccaaatttgttactttacttaatttatctagaacattttagaaaaattaaatggcttaattgaatgtggctggtatcactaggctgcatttgacgcccttgaatacttgctctgtggctctcccctcccttggcttttgcaacactgtcctctccattttcttattggtttcctcagtggtactttctccttctcggccccatggattggtttcttttcaaagttttctgtccttgagcttgatcttgtagatttcctatgtgttctgtttgggcattctcatccttctctttatggctccaaaatgtgtgcctctagctctggcctctctgaagtttcacagtttgtgtatatttggatgactcacaggaatcttaaacccgtattttcaagactgtatttattttctttctaccaaccatscaaccactgaccacctattttacttcttgtatttctgtcttggtggaaggcaccaagatcattttctctccttgtattgttacagctctaattcatgacttaattctatattgtattcagatacagaattcgttgttgggaaggactggggaaacagctgtaacatttgccaccctcagaagctgctggtcctgtgtcacaccaccttagcctcttgatygaggaaggtaaagaattactttcactgatttttatctaatttctttgccttttgtttctgctgccttcacattgtcttctacagatagttattttctaaacctgcatttgtgtacattagaatgcaaactaagttcttttcaaagggcacaacagttcaacttcgtctcctcccggccctgctcttctggtttattttttgttgcttgaacaaaagacaaactttttggtgcttggtcaatctgtgtggtgccataacttctaaagctccatccctactcccactcccctacaccatcttcacttgtcctcagccttttaagatcacaaaaaattgccatttgatccaagaagatttctcagaaaatgccagaactagtctctaccttttactgtactcttcctgaagcaccattaacacttgattgatacttacctttaggttatatgatcaatttgagttaactttttgtatggtgtaaggaagggttacaacttttgcttgttagttatttcagtaccatttgttgaaaagactgttctttccccattaaattttctcaccaccccattgaaattcagttgtccataatataaggatttatttctggattcttaaattgactccattgatctatctgtctgtccttttgccagtaccacaccatcttaattacttttcctttatagtaaattttaaaattaagacatataagtcatccaagtttgttcttctttttcaagattgtttggctgttctgggtgcttttaatatccatgtgaattttaaaatcagcttacttatttctgtctaaaagccagcttttatwcagctgagatcttttttaagctaaccttagatttaatgaactagttatttaggtccaaaagaaaaggctgggcatggtgrcccacgcctgtaatcccagcactttgggaggccaaggtgggcggatcacaaggtcaagagatcgagaccatcctggccaacatggtgaaaccccatctttactaaaaatacaaaaattagctgggcgtgatggagcacgcctgtagtctcagctactcgggaggctgaggcaggagaatcacttgaacccggaggcgaaggttgtagtgarccgagatcgcgccactgcactccagcctgggtgacagagtgagactcggtctcaaaaaaaaaaaaaaaaaaaaaaaaaatggaactcaaatattgttgaggtagcaaatattctatcatctgaaacctcagtggtaaacacaatacccaaatttaacatatttttgttacttgttaaatacatgcgtgtaaatatattcacttaagtaaactaagtggacaaaattaggtaagtcttttttcatatccaacttatttaacttgatacactttccagctttcaacataattgcaaatttttataatcttgtaagataatgttatgtaattcaacttgtcagtattattctagtgctattagctatattaattacataaagacattgrtgtaaggggactcaaaaattcataggtttgggtagaaaatgagaactagacagtgatttcatcactataaatttagttgttacttagcgtcccctgaggctaatgtatggcagatccctgtagccataaattgcattctgggctttaagggattaaaatataattcaaatccttcaataaaatcataccattcacaccattacctttgaaaataaatacttggaattctagtacataccttagatcttgtttgtacatgccattcaatttattataatgctttaaaaaagatattgatgcaggattcttgctccttagttcagctaaatccaggttcttgtctcatgaccagaaaaaaattaggcatgtggacacattgaaggatgaggagggcggaatttattaagcaaaaggaaagctcagcaaagagaggggtcctgcaggcaggtttctacctcacaaattgaataccagggccaccacacaggagctgaagagtgcagacttctcctctgcatgaggcacaaattcctggtggctccaccctagggcattattcagaaagaatcagtcaggaaacggtgggcaaactgggacagactttctccctctgggtcacgggtttcaacctggaccagcagtccagtctttcagccttcaggttgctttaggcttgaaggtgaggtttcgccggggactctaccctatctgcctaggtatttgtctgcctccagcctctatcaatatggtactacaaatagaaggaagaaaaaaaagtcaaatcacaccttaggaaattacagcctagtagcatcagtaaaaatggtactgttagtcatgtcatgaaatagacgtaaaattgaaggttgattttctttttttttttgagatgaggtctggcttcgtggcccaggccggagtgcagtggcrtgatcttaacttatcgcacttttcatctcctggtctcaagtcatcctcccacttgattccgcctcttgagtagctggtactacaagtgtgtgccaccatacctggctaacttttgtagtttttgtagagacagggcttcgtcatgtttcccaggctggtctcaaacttctgagctcaagtgatccatttgtcctggcctcccaaagtcctgggattacagttgtgagccaccatgctggcctgtttttcaattattgattgctttcaagttggaaagtgcattgtgaaacactcaaagatgttgctgggattatttagttcttttgatactatataaataaatgacagagtaacaccatagttatatgattggaactcaagaaatattaaatgataggattgaaaagagttatatgagtcatttgtccagaatttataaaatttttttctgtatcccaatggaataaatttaaactatgtatattctctgaaatagtcttccagtttgcccaacatgcttgctctcctgactagatattagctaaaaattaacaaaacagtcttttctcctgttactgtgtggtaaagatgtaaaaccctttttgccagcagggctgccctctactggactatttaaggtattcagtgagcaggtcaatatgactattttacaagaaggtaacacagtgggtataaatgtaaacatcccatatcccaaacaaactgaagttccctgaatagttaaaaaaaaaagccctttaataaacttttaccattaaaacaattatggtcggctgggcgcggtggctcacgcctgtaatcccagtactttgggaggccgaggcgggcggatcacctgaggtcaggagttcgagaccagcctcaacatggagaaaccccgtctctactaaaaatacaaaattagccgggcgtgatggtgcatgcctgtaatcccagctactcgggagtctgaggcaggagaattgcttgaacctgggaggcggaggttgcagtgagccgagatcgcaccattgcactccagcctgggcaacaagagcgaaactccatctcaaaaaacaaaacaaaacaaaacaaaaaaacaattatggtcattttgagaactggtagtgaagtttatatggtcttagtctccatttcaaccttggaggcagatctgtggcaatgagaatagtaatgtataggaacggtgggtctgctctgatgtcagtcttttatgatgatttgtatattaatacaaatcacgtttttgtgagtccattcatgctgtggatgttttcttaggcattagcataggtcatagtggacacatactgaataggtcatatctgttaaggctcttgctacaaagcatcaaaacttttcagaactatttcctctgtgaaaattcattttaagtagcaagttgtttttttctgtggttcattcccatgcctgagatttgcagtaatgtagaactagtttaccatcactgctgaaacactcatagaaggttccaaattcctggtccagggaaagagcaaaagcctgactcacataaataaacaactgaggttgcaagtttaaggaacttttttgatgaagtcaaggagtctttggatggttcgagttcactctactgcctgcttctttgttttcataataggaacatgtcccacagcctttagtaggatgtcagaattttcttgatgttgccagcaggatcctgtgtcccaggaaactacagtggaataaggggggtctgaggtgcttgctttggggagacctctagagtaagtcctttgctgccagcagcagttaagggaggtagctgtgacattgtcttcagcttctgccatcttgttaggtcccaggtgagattttgaaaaggattgttcaggggtggtaagagctcaaacaggcctgcctcagcctcacgataagccactgcatctggctaatttttttatatatgttttttgagacagggtcttgctttgttgcccaagctggagtgcagtggcaggatcacagctcattgcagcctcgatctccctaggctgaggtgatcctcccatctcagtctcccgagtagcagggactacaagtgtgcaccaccacaccctgctaatttttctcttttttgtagagatgaggttttactatattgccccggctggtcttgaactgctgggctcaagcaatccgcctgccttggcctcccaaagtgctgggattacaggcatgagccaccatgtctggccatgatattatttttaattcaaaaacaaacatgcaaaattaaattttagtgagagaacttagttggataacatctttcttctgggttattagggtatgtttattctttgcaactctgatgttctaggtgtagcaagaccgtttgttttcattttgccattttcctgtacagaaagctttaatgtctccccatgacctttatggcaaaaaccaaattccctcgaccagtctttggattactacacaatacattgtcaaagaaaatagcctggaatggtgaacagagcctgaggctcagttgggagtcctgacttctcatcagctgtgcatgagcaaatttggaggtgttccttaacttgtaaaatcgatttggatttttggtattttaagcatgatttcctttagttctttttttttttttccagagtgctagaattcagtcttttagttctttgaacatatttataatagctgctttgctgtcttgtctactaagtctgacatctgggccttcaaggacaatttctgctgcctgcttttcccttctttctgtgtgtcatacttttctgtttatttgcatgcctcatgattttgtgttgtaaactgggcattttagatagtattttgtagcaactcggaatactgattttccctcccctcttccagggctgctgcttgttgtgttgtttccttatttgttaactgacttggctgagctattacactgaggtttgtttattctgcacagtgtaccctcagatgtttctcctcaagagggtacacttgggcacgcacatagtcaccctggactgcccttcttgagagatgatagccgattttcagcagggctttctttaactctcagatctccttgttaagcttctgctttcattggtatcaccacccagcaactattcttcactaattgctaactgattgctttattgttttggacaaagctttgggccataaatttccccacttgtgatccagttaaattaagatgccctttgtataggggttgtgtttgatggcagtctttgaggcttgtcatgtcaaaaaggaggattcttaggtatctctttccctggttctctgtgaaacttctacagtagttggttagtctttcacttgctgctgtcacagaactaccagcctcattttttttttttttttagatggaatcttgctctgttgctgggctggagtgcagtggcgctatctctgctcactgcaatctccgcctcccaggttcaagcgattctcctgcctcagcctcccgagtagctgggactacaggcgtgtaccatcacgcccagctaatttttgtatttttagtagagacggggtttcactgtgttggccaggatggtctcgatctcctgattttgtgttctgtcctccctggcctcccaaagtactgggcagcctcatcataattgcttaccaccaatgtctgtgttgtttttgacagtgccattaggcatgaacttttccattctttgttctaaatatagtcggtcttagaaattgctaaggggctctgtgttcttacagcctgcttctccagcctgtgcagaacctttgtgccattgttctggagctggggctggggacagcagcttgattttcttatagttatatctgttctgtgagtggtctactaggccatcaatgtacccatcagtcttctctgtttggagcttcttggcctgcatggaacctctgctttacaagaggtgaggcaaagatgatctgtgcttggtgtccttggcctgatgcatctggggtagagcttctgccctaagaatggggactggatgaaagagaaaggattcttcagttctctcatctatctacacttgcctggaatagaatttctgcaacacagagctaggggtaggaggtgaaaaatgctggctgcttgcgtcacttgggaagaaatcgtagtcctggatttggagctgggtagggttaactagttactagttagcttcagttttgtttcttcaagaatgatggccggatgtggtggctaacacctgtaatcccagcactttgggaggctcaggtgggagaattgcttgaagccaggagtttgagaccagctggggcagcatcatgagagcctgtctctacaaaaaaaattttgaaaaattagctgagtgtggtcacacatgcctgtagtcccaactgtttgggaggctgaggagagagaatcgcttgagtccaagagtttgaggctgcagtgagctataatcttgtactgtactctatyctgggtgagatcctgtctttaaaaaaaaaaaaaaaaaggtattattacccacctgccacacaatggctgttcccctctgcccggagtgctctttcttacccaaataggcacatggtacgctctctcttccttatgagtctctgttcagatatcacttagctgtagcacctctccaacgttgccccagtcactttctattttccttacctgggtttattttcctcataacatttatcaccatctggcacgtacacatgcatgcatgcatacctacatatttgcttgtctacctctcccagtgaacgtgtaggttgcacgagagcgggaacttaggccgttttgtttactgttactttcgcagtgcttagaacgatatctaacatagtggattttcaataaatctgatgaatgcaaagtacagaatgaccaaagtatactgctttcttgcgtcatagtttaacctaacttgaaaactatctgtagagccattgtggaaaatgaattttttgtgtttgcaaactccagttgcttgttgctgactagagtgagaatggggctcacagggaaggaatgtggtgattatttggcagtggctgctggggctgtgagagaggatggatgtgttgtatttgtaaagtacttgccatccctaatgcagtgagatgctaaagcacaggaaatgggtaaatttttggtcttcccccaaccctctttctgacttgctccctttttactactgggaaatgtttgtggatacttaaggttttggttggaacagccgcctgtttacagtatgatgtggaaacttttcttgtaattccgttgttaatagatattgtacaaatgagtctcttagaaatatcaagacattgtaggggaccagtgtggtagctgctgcctgatagaaaaaaaaaaatcttcatttgccgatgtaacttttctttaaattattttaaaatgattttgaactaacgcctttctttttcttcctcctagattctcgctgaagtctgttaaytctactttttgagtacttatgaataaccacgtgtcttcaaaaccatctaccatgaagctaaaacataccatcaaccctattcttttatattttatacattttctaatatcactttatactattttaacatacattccgttttattttttctccgagtcaagacaagaaaaatcaaaccgaattaaagcaaagcctgtaaattcaaaacctgattctgcatacagatctgttaatagtttggatggtttggcttcagtattataccctggatgtgatactttagataaagtttttacatatgcaaaaaacaaatttaagaacaaaagactcttgggaacacgtgaagttttaaatgaggaagatgaagtacaaccaaatggaaaaatttttaaaaaggtaagatgatctttcattgcctttgaattctttcgaataaaatatcctgttagaaatgaagtaaagggcaagcacagcctgcctccattagaattcgctgttgaaggagaagcagtgtaggaagggggctagactaccttctaatttcttcctgtacttaccagcactgatatgttctgagttttcagaaggacatcgcaacccagtggtgtggagctcttccccagtgtctaccagggtttggaatgtctagggcagttttgagtatgaaaccatactccctgtctctagagcagctgggtgctggaaatggctccaggttttggggtgggacctgctgtgttaaatgtggcttagatgtgggttgcagtgagtgcttcatgtctttgtactttggctgtggcagttgcatggttcttaaaacatttcttttcagaaatatggagaaacctgccattgttgatttgaaacaacgggcaagatgttcttagaggcagtgtaacagcgattaagagcctggactccagacccagactataggtctgaatcttggctttgccacttaactggctttctgaccctggaaaagtaggttaactaattcgcctcagtttctttttctgtaatatgaagataatgatcattactgacactcaagagccaagctgttctaagagctttacatatatcatcttaagactcacagttaccctatgagttagttgttattattttcactttacagatgacagcactgaggcacagatagttaggtaacctaccccagggacactacagctagggaagctgggactggaatccaggccttctggctccagaactcataccctccattcttcactgatcacagctttcatgcttgtgaggattgagtgtgtgtgtatatatctgcaatgtgcttagaacaatttgtggcacttaatgtaaatgctctagcttttattattagattactattatcttgagaattcaatgaggaaaattatagtagaaaattcaatgaggaaaattagatcatggaatagtgtgtttcactggtagtatagaaatggcgtgagaatgccgtttatgaacttggatatgtgacttccttatgagcagttcttgaaactctagtaagttaaaaattgaagataaagtattttttagagggggtacagtgaagtgatgtgtagttggttgataatttggttaggtaataggtttaatatcttttaaccatttccagctactttgatccccaactggctttttttcctgtcagttacaaggaaaccgtcaactcttgaaggagagtccaaataactgcaactatggaatgaaaaactcagagctcctcttttactggagggccagagggatgttgcttaacctcctctrtatatggcccattaattttgccacttaaacaaatttcatacatcattttcctcaaaacatgaaggagatgccaagcaagttgatgtcagtaattcctagaaactaaaaacattttaactygacaacagaatatgtaaatttcctcacgtttaaatagagtagttgtgtatcttgttttatctgaaaccatcctgatttatacttgttgctgtgacattaatagtgcccccttacagtctcaaaagtgccctagtttggatagttatgtggtcaccttatttttaagacatattccctatttcttttgcagacttagaaaaaactgaatttttttctatttaagatctcgctgaagttaatagcacatttctagaaattgaaatcatgagttaagcatgtttgatttttcttttccagcctatggattgtaatttccaaaacattttatcataatgaagtttgcttttgtcatatttacatatctggcactgcctttttttttttctttttttttgagatggagtttcactcttgttgcccaggctggagtgcaatggtgccgtctcagctcaccgcaacgtccgccttctgggttcaagtgattgtcctggctcagcctcccgagtagttgggattacaggcatgcgccaccacgtccggctaattttgtgtttttagtagagacaaggtttctccatgttggtcaggctggtctygaactcccagcctcaggtgatccgcccacctcggcctcccaaagtgctgggattacaggcatgagccacagcgcccaaccagcacagctttttatggcactctgttcttgagtctgtttttgagaaatggggtagttatgagaaggtactgaaaacagtacatttttatgtgcaaaagttttctacttttctatctgcttatagattcatttttttgtctttgatatgctatttgaattcaaaggttggattctcttttagtctaagcatatatacagaagtcttatgtttcaggaagcttcgtttttctccggtatcccacacatattttattcattttaatgtggctagtattgtctttcagtcgtcattcggtatgtacagcagcaaactagttctcaattgtgtaaaaagaagaaaagcttatgtggtgaatatgaaatttcttcctaattcgtgtatcagtataactggacaaaataaaatcctagagctatgatagttgtttcctaaatgtgcgtgtgtaagtgtatgtggctctttcctgcttatcttaaccatagtgcctttgtattcaatgattattcaacaaagtatgaagtatttgaactcataaaagttaggtgagacagactgttttttagcaactttttctgtctatagttcattactgtgaagttttatttagttagtaaaaggaggttttgaatttctatatgtcagaagatctgcctactagcatttgctatgaaattggcatttgtggttcatcaaactttgttcagaaggctgtgtctagactgtgtcttgggaacatgttatagttttctttaggttcattgggaaagtagaattaatttttagattttgcatataataaatgaaacaagtagtttctcttggccatactcaagaagaaagtgtgcagtgtcgctggttagctgaggctttagtttctgttcattctgtgttgcagctgtggcagtgatctgcagactgcagagtgggtatctcagctgcatgttaaacatgctaggcctttttcgttttcccctctcttggtttcttgttacacccattgcattgcatcagtagcagcatctgcctagggtgttgaaaaggggaactttcacaactggtgggttaagctgtgtactttctgctattagtgcctgctagctgatcaagctcagtgaagtgtgtcttcattaaatagtttccatatttgaagataatcttcaactggaaaagaaaacgaatgttgtagcaatatttaaaatattttttgagtaagacttttggggattaaccccagaatgttgtatctgatatggttgaaggaaagatgcacaagccttatttcaaattaatgaactttgaagctttgtttccatcttatcccaacagtctattttgaggtcctgaggggaggatgagtggatgaaaaaaggcagtggcgatgaccctgctctcgttgtgtccaaggtagagtagccaccagcttcactacgaccagattcttccttgggggacagaaaaacaaaaggcacttggttgcttggcaggccttttcagggtccttttaagtttcatatggttttataaaactgtagcagagttaagagctggaacctgtgtcagcatcacctgattccagtgttcccagcagtaaatgcattgcactaacgtcgtcttgaaatgaacagtgaaatgatttcaggacaacyttaaaatacatgtatacctgaaatagaacaaagctgcaaagactaaaaatagaaacagaaaagagtacaagctggctcatatactttgtgagccatcagaaacacttgattttttcttagatattttataaaaataagaagagaatgagggattatgtaatatggtgcttagagaagacttcactatgacattccttctaaattgatccaaaaagataatagaaacactcatttatgtccttgtaagttgacttagctttcttttcctctttcttaatgccgtcttttgtgttatttcttagtcacatttttttaccctgtttgtgtatgtgtataaaacttattttctgatttattaggacatttgcatcatgctatatgtaacaaattatggtcagtctcttggctgggatttgtgggttggttattatattactcttctcttagtttccccttccaaactgtccctctcctttcatcctatttattaaaggcactgctgcataccaaattgttgaagccaaaaaatcaggggtgtctgatttacatcccttacagcctccccccgccttttttttagcaggcctccttgcttccacacttgcccccaactgtaattcactcacacacagcataaaaatgatttttcacaattgttaatcaggccaccttactcacctgcttaataagacccggacttctttctacagtgcagttgaagcattgtgattttatgcttaatctctggaatgagtttgcctgggttcatattctagtcccattacttattagttacatgattttgaacaagttatatttactctacatctccatattctcatgtgtaaaatagggataataatagtaacagttttttacaggtatggtaagagtttaataagttaacacttgccgtgtccttagcatgtagtaagcactaataaaggttagttaccctcrttatcattatcatgattattacaactatccagatctcttgaatatttttactctgtggctcccctcagaataattttttcatagtgatcttcagttgcagagagaatggttaaatgaagccaggtgtactttactgaagaagacaggaatgtgtgtaattttgaaatatttctaaatagtgaaagtaaaacaagtcctagtgcttaaagaggttttcagtaggagacaagattaccacctgtaagtagagagaaggaagggtggaaggtgtgtgtgtacgtgtgtgtgtgtgtgtgtgtgtgtgtgtgtgtgtgtgtgtgtattttgagacagggtctcactcttgcccaggctggagtgtagtggtatgatcatagctctctgcagccttgagttcctggggtcaggtgatccttttgcctcagcctcctaggtagctgggacaacaggcatgtactgcacgtctggctaatttttacacttttttagacatggggtcttgctgtgttgcccaggctggtctcgaattcctggcctcaaatgagttgcctgtctcagccttccaaagtgttgagattacaggcatgagccagtgcacctgcccagaggaggctatttgaatagagagaaggtttcagaggtatttcagagggtgagaaaacgaatagaccagggatgtatgataggattgcttcagggtgttgaggtcctagatttaataaggttggctgttctgcagcagtgttcaatgatattggcaaggaataaatagtttaatcttgtcttgggctagccatagggacaaagttaggattagaaacttttccagcacaaatcagatacaatatagagtgggtagtgtcctctaaatgtaatatttatgaaaaacataattactagatgattcagtggtttaaagaattaaaatcatgagattcagatttcgttttatattttattttttacatatgtggaaatcttacgctcatttgattcctttgccacatggtggcatcattgcatgagtttacatatttagattatatatcaaacaccttttcagaacacacatagtctttgaaatttataaatcctgtcacttacatattagaatctggaaggtagtgcattcttaacctttagagtgtaaaattcttaataattataatccagttcctgcacattttggccaagttgtcatctgtcttctaaccctcacagagctccttttgaagtcattggagctccctgtgctgagcatttcatgggggtaaagagcaaggtgagagtttgggaccagtaaagtaaataagtaccatcttaaatgcagttgctttatccatcaaaataaaaatttatttcttaaatgcgtaattgcatgggacactagatggcagcatttatccttttccgtttttatccaacctcttctagaaatttcttaaatgtttacatttataaaatgaacatggtcagatgattttaaggtgtttgagatgtatattactgacacagccatgtttgggaattaattacctatatatttttgcagagagaggagctttttatacagtccgtatgtaattagggatttatggttttgtctaagttgaggaaaatttctaaagacaatatgttaaaaaacttcaaaagggagtttttactaatgcatatttggtattaccagcacttacgataaacagataaaatattgaaaacctggcggtgccagtaagcatttaaggcttgaatagagggactttgaataatataactagtccacctggttatgtaaacagaaacttgtttactttgcttttgcttatccagagtttggtatggcaattcaagttcagcaatcataaagatttctgttagcttggatagagaaagtttctgtgaatcattttataccgtctgatactgacatttaggaattcctaaatagagagaaattaaaattttggcatctgcggtacttggtactaggctaaatattaagttaacacctacatcatttaaatagatgaaatttataagtagattattagtgtatgaccatttggccaggcagttgacctttacgagcctatcaaactctcaatatttttgaaaaccaaaaataaagccaaaaaaccccccagttacaatataagatttgagttgttatagaagatgtcacaaaatagctaatttttaaaatagatttttcactcaaactcagtttctggctttttattaaaaaaataattctatgcaaacgtaactttctggttcatcataacatttggacgatattctggtttcttctgtaaattattattttgattacattaaaaaawttttttttgttttatcaggttattcttggacagtataattggctttcctatgaagatgtctttgttcgagcctttaattttggaaatggattacagatgttgggtcagaaaccaaagaccaacatcgccatcttctgtgagaccagggccgagtggatgatagctgcacaggcgtgttttatgtataattttcagcgtatgtagactttcttatcttctggaagaatgaacttaactgatatttattgaaatactttactctgaagaggttaaaattctgatgttaattttcacccagtgtccagttagtggagaactctgttgtgacttggaatttttggtttattttggaaaataaatcaattatatgacaaattgtaccaatcagtgttgcagtgaggcttgaacctcttcatgggagactttcaggtcttgagaactagacctacacttaggggccgttgttccaataccatttctcaggaatcctctttagaagttactgtcaattttgttctgtcacctctatcagtaacaacagttgacctccgaaacacttccatactgaaacctggtgaacttcaaggtgcaggttaaacaatagagttttcatattgtaattatctgaatggtaattgtggtggctcagtctgtgagatagttctggaagcataagttcagaggtctcggtgccaaaatgtgacagtaatttgtggatgtttagtctcatccttcagatgaaacagaaaatacactttcaccagatttcttgctgtaaattcctccaccttttctttttcttttttttgagatggagtctcactctgtcgccaggctggagtgcagtggcacagtctcaggttactgcagcctctgcctcccgggttcaagcaattctcctgccttagcctctcgagtagctgggactgcaggcgcatgccgccatgcccggctaattttttgtatttttagtagagatggggtttcaccctgttggccaggatggtcttgatctcctgaccttgtgatccgcccacctcggcctcccagagtgctgggaatataaacgtgagccaccgtgctaggcctcctacaccttttcttttaaacaaacattccatttttgttgtcacaggtttggatttacattgtttcttttgaggagctttaaaagaattattttcaaagtcattttgtgtatcttttttgagttaggcagaaagtaaataaaaatctacactattcatgttatgtaatttcagcatttctgagaatgtttgtctttagatatttttgcttgagaataaacggtactgccacttgtttgtgctcttttcttgacatacacygtaaatctgacattcagtgtgycatcctatttgtatatgttctttttcacattgtaaagccaagtggccaacaattaagaatttgaagtcttagaaatcagttataattccttcacaatgtggtagtcccagagtaacatctgtaagtgaaacaaaataaaaatttaaatatcttcatctttaaaaattggaaatcttggggcatttaggggaggatgagtaggtgtaatgttgattagtatgataagataactttaaaaaacataacacttatagactgtggatttaacagtttagggctcctaatgcgttattatgattcatctccacattcagagactttacatttgtagttaaatgtttgaatatttgactggctgctgcttttccttttagttgttacattatatgccactctaggaggtccagccattgttcatgcattaaatgaaacagaggtgaccaacatcattactagtaaagaactcttacaaacaaagttgaaggtgaggackctagttactttctaactgtctgatactttagaattttcagtgtcatgagccctattattgatacttagttcttttatgacttttaagtccttaatctttgtggacttttatgaatatcatactttattttttcctttagaaaataaaaagtagattttgtatatattcatgtataagtaatccagagttataaattgttaagatgcctatgtttaaattgaagaaattacgactactttttctcttattgtgctcatctattttctagtttacttttagtaaatttgtaattttgaagggttatattttaaactagtaatttttattttacttctgaagcattaagtaattacaagttttcagaattgtttgraagttaaaaagggagacttttaattatattacagtaaaaagaggtttctttggtctctagacaactcccagaaatatctgggctattctatatgggggaaggaggagaaaattcacatgtaaacttgttcaaaaagaaaattttgaacaagtttgcatgtgaattttctcctccttcccccatatatttttatgtagtctcttgaaaatatgaggggcttctggtttctctacagtttaggcaacctgtgtttacatgcccgttttataaggcagtacccttcttgatcagggttttaccaaaggccaagggtacacacagtgaatctaatgctataaaataataatttaaattcagaccaatacttaatcatctgtaaaaagtgatattatgccagtgtaccctttcttctttcttttttgaggcaagaaattacttaatgattcaccgaatatggtaaactagtattcttattcgctaagctgcttgaaaaataatgaacgtgatgaatgttggtgtatttctaggatatagtttctttggtcccacgcctgcggcacatcatcactgttgatggaaagccaccracctggtccgagttccccaagggcatcattgtgcataccatggctgcagtggaggccctgggagccaaggccagcatgggtatgttacacttttctaattccttacctgtgctttctggtgaccacattctccagaatkatgccaaagttttgattctgaggttagctcaaatgacacatcagttttctaacatcagttaggaaaacaggtccctctaggtatactktcatcttgtctttaaagaaagttttaaggaaaaatataaacattaattattaatgttttaaaggtagtatttatttgaaatttaaaatattttacwttcagttttcatttcttttttatggtgatagttttgggtggtttaaagttagtttataaataatgacatttatcttgtcctatgtgaattacctgtaagtgttaacagagtggctaaacctggaggcctccttttactccctgttccagttcttccctttcctgaggtgaaaaccttaccctccaactagcacacctaggcatggtgactctacaagttcctattctcaaaaaagcgtcagaaaatgttagctagtgtactagtgtttagagatactgcaaaagctgctgggatgctgggactgcatttcctctgtagttggaaacctagtaattagatgtaagcattcactcaactcaaattttaggcacctggaatttgagtggtagtgggatatttagatgcagatatattgtggacagtggtgtgtaaaagtctagtactcgagttatgtttggacttagagatttggaagctagaagcagttaggttttaattatagctgtgggagtagggggtgaggtcaccaacagggaatggtggcttcagaggctactaaggactagtcagagaggaaagaagaaaatatctagtagtatgtggttcctggaagccaagggaaaggagatcttggtgagtcatcagcaggatcaggggctgcatgcagaggtcagatgacacaaggattgtaatttccaagaagtggtggtgttggagaagggtgctgtgcattgaaggagtgaagggctgatttggaagtaaagacttccaagtgtaaacattatttaagaaatgtatcttgactgacaggagaggaagggtattctattgggagtacatttaaataattttttcacactcatttagaagttcacatgtagagtagttctgggagtggttcagacatatcagcaatgccaaccatgacctatttctctttgttcttctgctgtgccacctctatagcttctcagctgttgtccttaggctggtactcttctgatttcaaatggttcacrtcgtgttttaatgcaggactctgagtgtaaccaagttagtcaccattctgaagcagtgaatagtttttagcaaacacctagatactcwagtccaaagctacctttatttcttagttgaattactgggataatcttgtctccctgataccttttttccccttgtaaagttagttagccacacagcagccaaagtgatcttttttttcacagataataacatactcctgttcaaaacaacattgctttacatccagaacgtaatccagagttcttcccgtggcctttgaggtcctrtgtgtggtccctgatagccacttgaccattgtttcttgccactcttcctcttgctcactctgttccagccacactccttgctggtctttagatatgctgagcacattcctacctttgggtctttgcatttgcttatttccttctaattagaacactcttctcccagttccagggtttccatggctcccttcctcactttattcaggcctttgctaaacgaaactctacagagacggtctccaggcttttccatccaaatagcrtctattgtcatcttctcaccttgtcttgcttcagttttcttcataggttaatctgtttgtatatctcaatagaatatatctcccatacgtgcagggacttgatctattttgttgatctcagtataactaatatttgttgaattgagttaaattaactcaatttgattgagttatttatttgatgataatgaaaagaaattgttgatacagctgaatctcatgaaagtgtatgtgtgtgttttttctcttcaatgcagaaaaccaacctcatagcaaaccattgccctcagatattgcagtaatcatgtacacaagtggatccacaggacttccaaagggagtcatgatctcacatagtaacattattgctggtataactgggatggcagaaaggattccagaactagggtatgtcatagtaaagtaacattgagtagttaagtatttatgtctgttataatgttagcatttgtgtcattttattaatatatggctaaattagtccctcagagtctgtttgtagtaggcatttccttaaaaaataaaaaaggacattaaaattaatggcaaaatagttatagttgtgaggttgaaaatatatcatatagatatattttaaaaagtacagaacttaaatttgtatagttgtaaatcctttgttttaatcagcttgtatttgctgctgtagttttttttatatctaaatacaattcaggtgaacaggtaacttaatttatccactaagtatttgttgagcttcagtattcggtctctgatttttcttgttaatacaaactccagtggtagcagtggaaggtagagtggagtgggaaagagactgatggaggaaaccagatggaagtttgagggactgtcaaggaaacattgccagagatgcaattggtattctgatgaccgatagggtacagtggttggatatttttgatgcttttatgcacagaaattacaaacatacacgcacacacacactcacgtaattgctatggtactgaacttggggatggaggaatgtctcttacgtatgcatacatttcagaaaaaattaagtgcaacaattttcttacaggtttgcctcagttaccttctatattttggttatgggggcagctcttgaagtatatacaaatacttacacattttctgtatattaagatctaatttattacgtaatccaattcccacaacaagagtcttatctgtaaaatttctggcagatagttgtggattctactttaactcttctggttggcaacccactagatgtaaagaccatttcctccttggatgatttcttctgttcttcaraagaaccctgtattattatttgtttaagccactgtttcttgtgcctcagtactttgcttcagcaacgcttataattcctgagtgcttttaagtaggacgggaaacagcattccttcctgcaagtgtgcgcctccttgcttttgggttgagctgtaattctttttccctcccatccccagcatctgcctatcctctgttttcacctgtctctctctctctctctctcacaaacacatacacacttgaccagcaaattgatgccctggggcccttccatgtgccttcaagcttgctcccattatagggcacttttggcatagacgacacctgacttttgtttctgacgtctcccttttcttttagagaggaagatgtctacattggatatttgcctctggcccatgttctagaattaagtgctgagcttgtctgtctttctcacggatgccgcattggttactcttcaccacagactttagcagatcaggtaagttcartgtctgtgacttgaaatactaaaaaatcatagtgaattgtaatgcatttttttcagtcagtatgacagtatattgcgagagcgatggttcattttaaaatgagctttagccttttaagtgcttcttagactrtaagtacattaaaataatttataataggctttttgatctaagaataccattgaattttaaaaataaggatcactttatatggatcactttttcttattttgtagtcttcaaaaattaaaaaaggaagcaaaggggatacatccatgttgaaaccaacactgatggcagcagttccggtaagaagtgaccyttatttaatattgagtattaaagaagtatcacccgctacaaagcattagtgctagtgaaaaatatattgttgacaaggtagtttatgtaggatttattccttattgattataaatattgccttaggcgctatgggatttcttcagtcttgttttagcttgctttcttatttactaagcactcaacttaatttcagcttctgtgtgtaattatcaacttgtttgcctaaataccttcttgttaaaataaaaattattttcatgatatctgttggtgaattcattgacacttgaagcctattgagagctaggagggaaagtgtgagatcacctccttttaagcaagctgtatagttacctcctgagtcctcagggaaagtctggcctaaacaccaaacaaagtgacagagaagctggtgcagctttgaatgacttaagaggggctgttcatccttacataatataggggcctgggaataagacaagggaaatggggcagcagtgattttctggctccttataacataggctgagtttgtttggaaatgatgggaattattgtcgggtacctaaatgcttacgtcaagaataattacatagttacttcaaagtcaaatataaataatcagtagtttcgtagtttctttctataattatagtttctttagtatccaacttaaattcttagttcacttaaaaatgacgtayaatttaaagttgtggaggaaacattattttaagtcattaaagtatacttcacagtaatggacctagcaagcaaaatgcagcacagacaaggaaaacttcctggtgcaatatcgaaagtcaaatagccaaacaaaaacycccaaacgttgcatggtctttttgtgagcaaagaatgtggtactgtatatttttataagataaagttaggacattttgaaaaaccatttcagacggttgttcgtttattttgtgagtaggttttagttcagaattagtaagataagcaaagcaatataaagaatatcttacaatttatatgagtatctagatatatttctgcttttaaaaattatttttgtggaaactttatttttaaactaattgtggttcgattttaaaagtttgatcttgataggatacatctttttgaaaaattcacaaaaggttttttccttcttgctgaatcacatccacagttgaagagtacttcttttaaaatgvcttaatattgctagaaatgttaatctaatgctaagtgaatatgtaaggcagctgttattattaactatgttaaactcatttttatacatttaggaaatcatggatcggatctacaaaaatgtcatgaataaagtcagtgaaatgagtagttttcaacgtaatctgtttattctggcctataattacaaaatggaacagatttcaaaaggacgtaatactccactgtgcracaggtaagtaaagactctctacctccttctttctcctcttgataatttaatcatttagttcacattaatagcccaattaattgagatagttataagaaagaaatatatttcataaagtcaagagaactctttaaaaaaaatccatcccaggccaggcgcggtggctcatgcctgtaatcccagcactttgggaggccgaggcaggtggatcatgaggtcaggagatcgagaccatcctggctaacacagtgaaaccccgtctctactaaaaacacaaaaagaaattagcggggcttggtggcgggcgcctgtaatcccagctactcaggaggctgaggcaggagaatggtgcgaacccaggaggcggagcttgcagtgagccaagattgcgccactgcacgatctgtctgcctgggcgacagagcgagaatccgtctcaaaaaaaaaaaaaaatccatcctggctgaacacggtggctcactcctgtaatcccagtgctttgggaggccaaggcgggcagatcacctgaggtcaggaattcaagaccagcctggccaacgtgacaaaaccacatctctactaaaattacaaaaattagccagagtggtggcatgtgcctgtagtctcagctgttagggaggctgaagcaggagaattgcttgaactccctcgggaggcagaggttgcagtgagccgagatcgtgccactgcactccagcctgggtgacagagtgcgagactcttgtctcaaaaaaaaaaaaaaaaaaaaaatccatcttgacatgggaggattgcttgaggccaggaaatcaagaccagcctgggcaacatagcaagattccttctctgcttagctgggcatggtgtcatatatctgtaatcccagctacttcagggactgaagtaggaggattgtttgggcccccagtgggaggattatttgggcctgggagcaatgactgcaccactgcacaccaccctgggtgaaagtgagactctgtctctttaaaagacaagcaaacaaaaaacctttgtaatagtatgagcagtttaaaaaacctgcaatgtcattaaaagtgtgttttcacttaagattttgctatttgtgagtttatattttctgtgaacacttagggagttttaattattttgagaaatagtttctcttttgcttttatatttatttcagtatgaatataattaaatgttttgtatttaaagctttaaatgatcagttttgttccagcttgtatttgtgtagtgttaatagagtacatagatttatgatttgatcataaaatagcttagaagttagaaaatggaagtatgacattcaaagtattttttatggtaatattaatatagttttcagatgcttcacataatttagaactttgtaagtttttttcctgccttacgttagttatttcttcagtgagttgtaaagtcggccctctgtatcaacaggttccacatctttagattcaaccaaccgtggatcaaaagtattctggggaaaaaacaataaaatataacagtggaaaagaaaatacagtataacaactatttacaatgaatttatattgtattaggtattataagtaatctagagataatttaaagtattttggaggatgtgtgtaggctttatgcaaatactatgccgttttatataagggacttaggcatctgagggttttggtatccagaggactggatgccaagggataactgtaaaagctgatttgaaaagtctgttaataccatttttaaaaaattgtcaccgtgtagtcttcaccttttgcaaagatttttttttttaagtactacctctcctttttgatcaaggcagtatgcaatctttgtattagtgtattttcagaaacatcaattagatgtttaacttgtttccttttttaaatgcttcacagataatttactagattatttttaacaaacaattcaaagcttgaattagtgaaacttcaaaaacagattgtggtatacaaattatacacatttctaataaagtacattaaagcaaaaattaatttgattttaatacatttcataaagatgatagaattgttcagtattaatatatgataaatattttatgtaaataatgatataaaagtggccataagcaagggttttcctgtcactatacaaaactaaacctgacaattcaaattcgaatatcacttgaaaagctcttaagaggaaataataaattctttaccttgttgaacttcaaaaaattaacatttggggctcaagagactctccaaattggctgtgtgaccttggataagtaacttaatctcaaaatctctcatatcaaaactgggggattagtttaagtgatttggaaaatcccattcagttttaaaatcctgtggttctctaatttttttctttagctttgttttccggaaagttcgaagcttgctagggggaaatattcgtctcctgttgtgtggtggcgctccactttctgcaaccacgcagcgattcatgaacatctgtttctgctgtcctgttggtcagggatacgggctcactgaatctgctggggctggaacaatttccgaaggtagtgttctccatggtcagaggctggagtgtgatgccagacgtttttttggggtatgggatattttctgcaaatatataggagaagagtagtaaggtgtttgtgaggcagaataatggtggattccaagtactatgatcatygatatcaatttttagaatgtattagatgcatctggagtcaataatttatctggagaagtttttatatcaaactgataggtaatattaaaaaccacttagcattttggaagagaaactttagtaacaaacactgactgttttgtgtacatttattttctcacatcagtgattaaatttctttttatgtagaaaacttaaggtgcttttgtttatttgtgtaggtgagtatattaaggctcaggttcagaaatgtttatgaggatttctgtaagtgttagagaaggaactaagttctggtctagggaatattattaccagagtttatcatgtggttgtgtttgaggaggagatctaccaactaatcagcagttctgagatgaatcgcatagggcctcatgcgtcccttttatgggagaaagttattttgctttccggtacaggatacagctgtgcttctcctactttgtatttgccatatacggatagatacaaaacctcatgactgatttttccctatttattttgagtggctctgtataccattttcatgtattacttcatttttctgtttttcagttatgttctctgttttcrtatatttttggaagctagttctaagtcatgttttgtaggaaataagcaatcttaaatacatgcataggggatttctttcttctgaggatccttaatttcttctatttttaagattcaaattgaatgattaatcagtaacagtttatgttttaaataaaagtctttaaaatgttaaatatcagcctttcatttctgatatttggtctttgaagaggaaacataatgcaatagtaattcataatagtggagggttctttcctcacatccttgaaagccaccagtcttattcttcagcctggctcttgagctattgctgtattaattttaaatagggtgtgatagcataagctgatggaagcctgcagagatctcactttgaaatggtgatacattacatgggaaaagattagagaggtgttttatactgcacatcggtgaggcctaataagaaagtagaatagacgtaaaccattgytttcatcatcctttaagacagggatttcaractcaagaaccaggcagctacctatttaaatgagtcaagtgggccctaatgtaagacaatgtgatgggtaaggattgattctgagggaacaggagcaggcatgccctctctaacagaggccgtcagttctgctgtacctgaaatgtgggcccattgttgctggcgattccacacttacatctaaaatttcctgattttttaagaatgacaataactaatttaaaaaaaaaaaaaaaacctcaatgtaggccaaaaaatacgactctacaggcctcacggcctgtgcttcaccaatatgtgacttctgcttttaaggaatagytggggatayctcagccttaggataaataatcatttttggtaatttagaaaaatgaagcagtgtattagctactgttctcaaatatcctttttttcatttaattcctagtgtgggactacaatactggcagagtgggagcaccattagtttgctgtgaaatcaaattaaaaaactgggaggaaggtaataaactattttaaccacagagcattaatttttaaagtattaaacttgaaaattagtgcttcactttcttgctttagaatgtaaacacccataagtgctcatttttgtcctttgtgatagacgtgttttatctcgaactatatgaatgcatttatttttcttgtttcaaagatgtttctgaagaactattattgttttcattttacttattacgtagatgcaagtaagaattatggcaaaaacttgagaaatgtactawtaagtgaataatgtcaataaattaggagtgatcataactttattttgcagaagtaaaattataaaatttattttatgaaattgtggatttttgaatgatttttttcttttttttctgagggcttcaaccttgtattattagaaggaaattttcactgcaattccatagaagtctgtttattctcatgccatttaaaataatggtcacttaaaaatttatttgatcctgttaaaatatacaaattatctgtgttttattgggatgcacctttcctctacattaagtaaagataaagattctggccgggcgcagtggctcactcctgtaatcccagcactttgggaggccaagacgggcggatcatggggtcaggagttcgagaccagcctgaccaacatggtgaaaccgtctctactaaaaatacaaaaattagccaggcgtggtggtgcgtgcctgtaattccagctactcgggaggctgaggcaggagaatcacttgaacccgggaggtggaggttgcagtgagccaagattgcgccactgcactctagcctgggtgacagagcgaaactctcatctccaaaataaataaataaagaaagattctaaggcttggatgtcttttagctatctttagcagaattagtgggaatatttaataaatttaggcttggagtcattttgaaattatctataagaataaatcttaatatgtagtaactcactttttttttttttttttttttgacacggagttttgctcttgttgcccaggctggagtgcagtgtcaatggtttcggctcactgcaacctccacctcctgggttcaagtgattctcctgcctcagcctccctaatagctgggatttcaggtgtgcgccaccatgcccgactaattttttgtatttttagtagaggtggggtttcaccatgttggccaggctgacctcaaactcctgacctcaggcgatccaccctccttggcctcccaaagtgttgtgattacagacatgagccactggcccagcagtaactcattcttatatagggatttgttctattaattgcatgacttaatacttctgtcagtttatcaatatgatatttaagatgttgcagaatctttcaaataatttgtctcttgtatttataattttatacaacaaatggaagatgttgggttttagagtttaatttttttctcagaatagaagtttgaaaacataaatacttatggtttagcaactgagattttgtgcctactgttaaattgataaactttgttcattcatagtgtctgccttttttcctttgggaagttctaattggattaaaataagatgactgtttagaaactagtagtttcaaattttcatgtgttgtatttaactcaactattaactcaattattattttattaggtggatactttaatactgataagccacaccccaggggtgaaattcttattgggggccaaagtgtgacaatggggtactacaaaaatgaagcaaaaacaaaagctgatttctytgaagatgaaaatggacaaaggtggctctgtactggggatattggagagtttgaacccgatggatgcttaaagattattggtaagtcatctaatatttttttgaaaatgaatgtttctgaaatagtttacacaagaagcacaatatatttagaggaggcgctgaataatataaatctttatgtaatcttagtttgggttgttgcatcactcctggaatataaaatattacggactgtggaatttatgaggcctgacatgttatgagttctcaaagatggttcagcagcagtggtattttaaattactcttagataaccttcagtcattgtttcctgcctgtgtttctgacatctagagattagtggatggagctctcacagtctgaactgcacccttgccttgcccaggagaatagaggaaagccaggcagctcaagtactatgactcatatgggttgaaaaataccttattctgcttctccttttaggttctttttttttaaaagttaatggcatttcagttagccgtgtgtggtgtctttgtcgggcacctgtaatcccagctacttgggaggccgaggcaggagaatggcatgaacccgggaggcagagcttgcagcaagcggagatcgcgacactgcactccaacctgggcaacagagcaagactctgtctaaaaaaaaaaaaaaagttaatggcatttctatccctgtcttgctaactagaaacctgggaggagactcaagactgttctcttcagtcagcttcccatgcctattttatatcccactagtttattttatgagctatgtctcaaaatcatactcttctctctttgtctctcttacttgatcattggtcaggcctgtaccttctgccaccctctcccaataatttctctgttgccatgtttacccccttaaacacaccctctcactgccaccatgtaattactaaacatggatcttactggcsacaaccatttaatgtctcctagaagctcagttcagggtgcccctgttaacattgttcccctcttcaccttcatcgtcagttgttttcctcctcctccttgatgcagctgaaattagagctgatgttcttctggcttttgccagtgttgttgcacctgacctctcacttttcccttaggactcggctcaagcagctgagcatagtgactcaggcctgtaatcccagctactcgggaggctgaggtgggagtatcacaggagcccaggaggccgtgattgtgccactgcactccagtatgagcaacagagtgagaccctgtctcaaaatctcaaaaccaaccaaccawccaaccctcagctcaggcctcacttgcaagaattttttccaaatccccaggttggagagtcttaacacttagcgctaccattgtagtaccaaygtattgaagtaatacgtttttgcattatgcatgtctccagataggttgtgaacttgcagatggcattgaatatcttcttcacctgcctggtactaatggataccagaaataaacctgttcagaagaacatacttgaagccctgctaatggagtccattaagtagaagttaattgtttttctttctttctttttttgagatgtagtcttgctctgtcgcccaggctggagtgcagtggcaccatctcagctcactgcaacctctgtctcctgggttcacgcaattctcctgcctcagcctcctgagtagctgggattacrggtgtgcgccaccacgcccagctagttttcgtatttttagtagagtcggggtttcaccatgttggccaggctggtctcgaactcctgacctcaagtgatgtgcccgcctcggcctcccgaagtgctgggattacaggcatgagccactggacctggcctgtttttcttttaaaagcatgtatttagcagtacaaaaattagggcctaattttaatatgtgcttttaatttcagcataaccattaatgcttaattttgcaaagttttaaataatttgatagcaaattacttagagaatggccagtatttatatatgtattaaatgttactaatattattactcattgttttcccctctccacctttctttgttttgcagatcgtaaaaaggaccttgtaaaactacaggcaggggaatatgtttctcttgggaaagtagaggcagctttgaagaatcttccactagtagataacatttgtgcatatgcaaacaggtaagaacgtggaattcatactacttttacttaaaatatttgatgtccatagacatttcctacctgtatggaccttctttgtaaaaatgttccgagaactcttcctatctgttacttgtgggaatggcctccttctcattgcmgccattagctgactcttttccttgtaaggcttcccctgatctttctctctgtccctgttttctgctttacgtctcactgcagtgtcccatggagggaggtgaagaaaataaaaccttccttcctgctgccttggtacccctacctacctgtccctcagcaggggaagcttcacagaactactccagaggaatggggagtaaagaagtggcagtgaggagtgtgctgcttacttactcctgctctacacttgagcctgctcggcactccaggcaggtcttggggctcctatgtaagctgtgttaagctgcagcctaaacacacagcctccccacctcatgatgatgaagaggcagctgggracctgtctacgacagttgacatgaattattatgggaaaataaaatctgttatcaggaaaactaatttagaaacagatgttgggggtacagcccaagttagaaatgaattgcatttatttataaatgattctggtctttagccatttagtattttctttagtgatgatacagatctggatttattcatgtgatagtaaccagaagcatcttcttcctgatgttactattttatggccttcaaaaaagtatttgccttcgttgggcatagtcagagttcctctatcaatacaaattctgatgataacaaaagaaaaaaaagaatatattcacatcattttgattcgttgctgaatttttaagatagtttttaatttatgttaaattttagttttttaaaacacatgctatgaaatactgatagggtttaaaggtgaatattctaatatttgtaactttcttttaaaatgtgtacatggcagtattcataacagtttttcatagttgaaattcatcatgaaatgtcagattgaagtttatttagcaacgarctctgccaaagcattggaaaatattatgaatcaaacagtaaaactggcggttgcatgaaatggatatgccagtgccaagtatggcacatgcattttaaaaaaaatgaggagttatttactacttgtcactgtaataataactgcagtcaacacagttyaccattttgttccttatctgttatcctttctatatttcagttatcattcttatgtcattggatttgttgtgccaaatcaaaaggaactaactgaactagctcgaaagaaaggacttaaagggacttsggaggagctgtgtaacagttgtgaaatggaaaatgaggtacttaaagtgctttccgaagctgctatttcaggtgagtattcggttaaactgatactaaaaactgagatgggaagagagtacttacatgcwttcaacctgttttaaggtttagggttcattactttctgctcagaaaccatttctaccgttagtatatggaagagtaaacttatcagtcccccattcaagccttgctacacaaattaaccactcccaccaaactgatgtacatgtatcttgaatgttcttktctctgcaacctttgctttctgggttaccctttctcttatgtcagctgttcttcaaggccttgctcagttttctggccacactagcccatagtgatcaggccaaaactccttttgaaactttatacaatgttagagtactggtagttggttgtactaatagtttcataaccatttttggtggggtgaggagtgcccaagactagtttaatattgttggtctaataaaaacatctgtgtcttttgagttgttgtgtcaagcataaaacaagcgtgaattattttttattttatttatttttttaagagacagggtctcttctgttgcccgaaccagaatgcagtggcagtcatagcttactgcagccttgaactcccaggctcaagcgattcttcccttcagcctcccaagtagccgggactaccagtgcatgccactatgcctagctaattaaaaaaaatttttttgttgttttgttttgttgttgagatgaggcctcactatgttggccaggccagtcttgaactcctaggctgcagcgatcctcccaacttagcttcctgagtacctgggactacaagcatgtgtcaccatgccaggctccagcatttactttttagtctcttcacatttcagtaatgtcagattccacacagtcttttaagtcagccctgtggtacatgccttattggttttgctcatagtgtatattcctttggaaaccactcctgaaatatttttaatctttgaagactgaaaccttgtgtattatttctatgtttacttttacaggttagagttaatacatctttttttactcccaaggcactttatgtctttaattttgcatatttctttcttttattgtagtaaaaatctcataacgttcaatttactatcttaacattttaagtgtacaattcagtaatgttaagtgtatttacattattgcacaactgatctttataactatttcatcttgcaaaacggagacactatacccattacactaattccccttccctctctcccccttccctccacctttttactttatgtttctaaaattttgattacttgwggtacttcatacatgtggaatcatacggtatttattcttttgtgactgtcttatttagtgtatcttcagggtttattcatattgtaccatgtgataggatttttcttttttaggttgcgtaatactccattgtatgtatattgcacattttctttatccattcatctgtgtttggacatttgggttgtttctaccttttgggtattgtgaataatgctgtgatgaacayagatgtgcaaatatggctttgagattctgctttgaattattttggatatatacccagaaatgagattgttagatcctatggcaattattaatactatatttaattttttcaggaaactccatactgtgttccttaatgactattgatttacattcccaccaacggtattaagggtttccatttctccacatcctcaccaacatttgtatatttttttctamtatccattctaacagatgtgaagtgatatctcattgtggttttgatttgcatttctctttttattagttatgttgggcatcttatatatacttgttggccatttacatatcttctgcagaaaattgtcgattcaagtcctttgcccattttaaaatcagaattctgcaccctcccccccccaccccacccccgtagttaagttgtacaagtttcttacaaattctgaacatgtattagtctgttctcacactgctataaagacatacctgagactgggtaatttataaaggaaagaggtttaattgactcacagttctgcatggctcggggaggcctcagaaaacttactgtacatttgtggcagaaggggagagagggaagcaaagggacatcttacatggcggcaggcgagagagcaaatgaagagagagagagagaaagcgaagggggaagagcccctaaaaccatcagatcttgtgaggtctcactcaccatcacgagaacaacatggagaaaccgcacccatgatccagtcacctcccaccaggttccccccttgacatgtcgggattatggggaatataatttgagatgagatttgggtggggacccagaactaaaccttatcaggacattgcatttatttgtgtcttttaaaatttcttttagtaacattttgtagttttcagggtacaagtctttcacctccttggttaggtttattcctaagtatttcctcctttttgatgctacattaaatggtattttcttaatttctttttcagaacagttattgttagtgtatagacatgcaattgatttttcgtgttgattttttttatcctgcaactttgctggaatctttattagttatgaaggttgtgtgtgtgtctttagagttttctacatataacttttctttttgatcttctgattgttctattcataaatgaaagtggagtattgaagtctcctactattattgtattgctttctatttcttcccctagttatgtcagtgtttgcttcatatatttagaaacactcaagttacgcgtatatttgtaattgttatatcatcctggagaattgactcttttatcattatattgtaattaatgtccttctttgtctattgtgacaatttttgtcttaaagtctgttttatttaagtatggccatcccctttaggttcttattttcatggaatatctatttccatccttcastttaggttacgcatgcccttggatctaatgtatgtttcttgtggatggcatatacttgagtcttgttttatattcagttggtcaatctgtatcttttaattgggcatttaatttacatttcaggtcattattgatatgaaagacttttcatacctatttccattttgttaactattttctgtatatcttgtagcttttcctctcttgctgccttcttttgttttgttgattttttgtgtgtataattacattctttgattcccttgtcttttatctttgtgtatgttctatagacattttctttgtggttgtcaatacagttacataaaacatcttaaaattattaacagtatattttagtttgataacagcttaatcttccgtctcatataaaaacttgactcctttgtaactctgctcctccctcaaaaaagacctttttattgtgtagtcattaatatagattcataattactttttatgtctttgttttttaaattctatacagatttaaatgtgacttatacacctatatcaaattactttcagaattctgtatttgcctatgtatttacctttaccaaggagtattgtagtttcttatggttttgtgttactgtttgttttcattttgctttaacttgaagtactcctatcattattttttgtaggactggtctagtggtgataaaccccctctactgttgtttatcaaggagtcttaatttttcccttattttcgaaggacaggtttaggttacagtattcttggttgacaattttttttctttcagtattttgaatactactattttctaacctgccagttttctgctgataaatgatagttcaatgagagcttctttgtatgtgatgagtcatttttctcttgctgctttcaagattttttgtgacttttgacagcttgattacgagtgtgttttggtgtagttctcttcctagtggagtgttttgagctgcttgaatttatactcccatttctcttctcagatacaggaaggttttggccatgatttcttcaaataggctttctgctcctttctgtcttctttttctgaactcctataatgagcatttttccacttgatggtgtcccattcattccttaggttctcttcatttttacatttttcctctcttagtaatttcagaagtcctgtcttggagttcatagattcttttttctacctggtcaagttgctgtcgatcctctagtgaatttttcaatccatttattgtatttggttccagaatttctatttggttcttcattttaaaaaaatttctttcatttatactttcattttgttcatgcgttgttttcttgttttttttcaggtgtctgtctgtactctcttgtaattcattgagcattcttatgacggttattttgaatttggtaattcatctatttccatgtctttctggggtttatttctggagatttaatttgatcttttgatagcctgtgtttttctatttctttgtatgtctttatttttgttgggatgtcagcatttgaaaaatcagctacctttctctgtcttacagtctgcttttgtattgagaggactttgtccagtcagccctactacggattctagagccagccatcttaagccttttccgaggctgtgtcctttttgagtttgtggggtacaatctaattgaagaggtttgctggtttctactcaggagctccctctggtgtctgtctgtgatattgtggcctcactggtgctgtagttggccatggtactggagctctacctagtgtctgtgatactgcagcctctggtkcatgttaatctttgttcttgacagctcccaacctggtgccctgttcctgttatttagattcaggaaagacagaagcaagtttcttgcaccccagaagtcagaatattggatgtgtgttccactcctcttagggatttcttccctattactttgtactgtgctgaggggagggtctctggcaagcgaatgccttgcatttttctaccagcctttgatgcggttggtttccttctgtcccggagtgtaggaacttcttaagtggtttctgggtttcttacacaggcaataaataggcccatatagcattgttaaatccatgtttctgtaggggaaggagggactgcgttttcctatattgtcatcttgctgacatcactccttaacacatttctttcatgtatcatatggctagctgtttacccatttccctttgttagattgcatgctacttgaaagcagaaacttgtcatttttttgcatttttaaaagaatgtttagtaaagcactttacatgtagtaatagttttttaatatttgttgaacgaatgcttagaaaaataagtcagtcctactgacgacatacggtttttcaaaactacatctgccccttaatctcctttamatgttttcctttcttcccttcctttctcccttcatttgctgctatcatgaatctccttagtattaggcaatatgttagtaacacaatagtgagcaagcattctgtatccacatagcttgtagggaatatcctggttcaatgacataatttgtcttaaactttattattttttaatttctgaagtaaatgtgctctgcataataaattcaaggaaaacaaataggcataaaggaaaaggtgaatttccccatttcctttctcctggataccaggctctagaggtgtggagtttatagcttggtatgtatccttctcctcacatctaggtgcatataagtttatgcagcctgtgctggaacttgtcttttttttttttttttttaacctaacaataggcatttatgcagcatataatgaagtttcagtcagtgacagacacagactgcatatatgacagtggtcacgtaagattataatgtatttttactgccttttctatgtttagatacacttaaatacacaaatacttaactattgtgttacaattacctatggtattcagtacaataacgtgctgtgygggtgtgtagcctaggagccgtaggctagataatgcagcctagatgtatatatagtaggctataccatcgacattcgtgtaagatrtgctatgatgttcccatgatggcaaaactgccaagtgtgtgatgcatttctcagaacatatccctgtcattaagagatgcgtgactatattggataccctattagatacctgtctaaatgtaattttttttttttttaaatgagrtggggtttcgctctgttgcccaggctggagtgcagtagcacgatcatagctcamtgcatcttcagatctcctgggctcaagtcatcctcccacctcagcctcctgagtaactggtactacaagcgtatgccactatacccagcttatattttttatttctattaaaaaatatttttaagttacttattttagagacaaggtctcgctatgttaccgaggctggccttgaattcctggcctcaagcgatcctcctgcctgagctttcagagttactgggattacaggcatgagccatcatgcctggctctaactcgttttcaatgacagaatatrtattctattttgttcctatatcatattttatttaactcattttcctcttgatggggacttgttaaatagtttattgttttacttatgtttgtattttgaggaatagattctttagaagtgacattcatggttcacttgttggttgtgcattttgatggatacgcaaaaagtggggaagttacaccatttgctaagaacttaaataccttttcttcttttntttttttttaatcatcttagcaagtctggaaaagtttgaaattccagtaaaaattcgtttgagtcctgaaccgtggacccctgaaactggtctggtgacagatgccttcaagctgaaacgcaaagagcttaaaacacattaccaggcggacattgarcgaatgtatggaagaaaataattattctcttctggcatcagtttgctacagtgagctcagatcaaataggaaaatacttgaaatgcatgtctcaagctgcaaggcaaactccattcctcatattaaactattacttctcatgacgtcaccatttttaactgacaggattagtaaaacattaagacagcaaacttgtgtctgtctcttctttcattttccccgccaccaacttactttaccacctatgactgtacttgtcagtatgagaatttttctgaatcatattggggaagcagtgattttaaaacctcaagtttttaaacatgatttatatgttctgtataatgttcagtttgtaactttttaaaagtttggatgtatagagggataaataggaaatataagaattggttatttgggggcttttttacttactgtatttaaaaatacaagggtattgatatgaaattatgtaaatttcaaatgcttatgaatcaaatcattgttgaacaaaagatttgttgctgtgtaattattgtcttgtatgcatttgagagaaataaatatacccatacttatgttttaagaagttgagatcttgtgaatatatgcctgtcagtgtcttctttatatatttattttttattagaaaaaatgaagtttggttggtgatgcatgaaacaaaatagcaagagagggttatagtttaatagtaagggagataacacagcatgtgtagcaccagttgataattggtctctagtagcttactgtcaaaatgttcaatgaagtcttctgttcatctgttgaaactaggaaaatacccaaacttaaatggaagaattctgaaagagaggatagaatttaaagaacaagagtatataaagttattctttgaatatttcrttgactatatgtacattgagttatctatatttgtaaacaaattagtcatggaaaattattctatyycaaagtctccttttagtctagataatcattatttcattttaaaattagtgtttttcmtagtttgcactgatgcgtgtatggatgtgtgtgagtcagtggtagcttatttaaaaagcaccttatcctttctcccataacctttgtacactaaaaaatgaaagaatttagaatgtatttgatgatagcattctcactaagacacatgagaatttaactttataaccgcgtgagttaagatttaattcataggttttgatgtcattgttgaagttatttgtaattcagaaaccttgcttgtgtgatacatagtaagtctcttcatttattactgcttgtctgttgttatatctggattatcaaaagcaatagtgcaccaattaagatgtgctcaaatcaggacttaaatcataggcaccacatttttcatgtcagactagttactttgttgattctcagttactgtaggcatcaaaaggcaaaaatcaaaaaaaaaaamacaaaaaammcaaaaaaaaagatgaacctaggtctgtgtaaagtaaggggagtgttaggagcagccaggactgtgtagtgtgtgtttggttgcatcacaaacatcgtatgtggagacattgcaatacagtgttttttgttttcaacttttcttgtattcttgtatatttgtattatgttttgaatgcttttctcttttcataattaaatattaatgtttgggataactgccaagaagaagtaaaaatattgaatggaacttctatatgaggatgctgtgatctaaaaattaaatctcagtgggcggagagaatttgtttctgatgccttgtctttagaataattgtttgctttcagatgattaaaaaaaggagattgtatctaggaaaaaagtgtgaatgcttcaaaggagagatactgataattgtgacttgaaatagtgtcagatgaattatgtagctgatcactgatggaaccatctaatgaggcaggcttaaactctatttagtttcgtttgttttctcatatgaagtttataattcctttcagtcctaaaatgtcagatgccaggtgtcaaatgccacagtagaaacgtgaaattaagtagagtccccttttaaacaaatttctctgtaagcaaaactatctttagtgacttaaaaaataatatcctctaaaattaccctttcaagaggaaaaaactgttcaatgaaaaaaccactcaattatgactcatataagaaatactggtttaaccaggagatatttggggagcaaaattttaaggaatttcaaattgctaaatctaatacaaatatctgacaataagatacagatctaaaagaatggttcttaagaactattgtttactgggaataaactaagctctatgaagaattcgtaagcattacatgttccagtaagtttagcaacttagagccaagactggtggccacctccatttatttccccactgctcctccactgacatccttcttagcagaaacttcatgaaaaagtttttgctgacacagaacaaacctgaaagtagtatctactttctaaatactactttgcttttcagtagtggatttgatatttataatgttctctaaagcttgcaactttttcagcaacgtttaaaaatagattaacctggaataacttacttgtttgctgctaaaatactcaagattttgccatttttaaacaaccagtccctgtgatacaactttgaaaaaacttttaaaaatctctgatgtrtgggctctttttttcccataagaattatgtacatctgtgatgttttacagggggatccgcttttaaacagtgtacatattggaccacactgaaatgtcatatatcctttctctacttaaaattggttatttactgtgagttcatttccgatgtgttcttggttgttgctgttttctgcctgaagacgtgtatcataaagagctacatggtatggactatttatttgtaatttgacataaagtttgaagaataaagatctataaaagttgaagtttctgatattaaagctcttaatatattggcttttttttttttttttttttggttttggtttttaagaaaagctgttcctgtaaaagtgaaactttcattgacattcctgaaatacttgaagaaggagtttggggaattttccatcctgacctaacaacctaaccaaaggaaaactttttattctagaaattctgttaataatctatttcctagcctttttatattctaactttcccctaacccttcccgaattcctcctttccattcctcctttttggttctgactgcccagaagatatactgtcagcattttaaattccaaaatattcatacagcataaaatcttgaatagaggtggtaaattgaaatttggcatcaaaattaatggggtagaatctacaatgtggcagaaatatctaaactttgtgccaacatttaatccaataattgtgggaggaagagttgtatcatgctgtgtttcagaaactaacctccctcacccaccccatctttgactgccagtcaatatttgtgggtatatgtaactttatcatagcatacttttgtctctgtgtgtaatcctgtaacaaaaccagttaaagctttctttacataaacatttggcatctttgtgtgttttgcattaacttagacagttgtgcctaatttctcttcattaactttgctcaggttattcttttaaacattggtaacaatatttctaccacaccaaatatgcaaatgattttaggatgaggctggtctatagtgtcatggaatggtttttatggcataacgtgaaaccggttatatgcagatctatagtctgatttatgtaataatattatcttcaatctgataaaatctgcctctgatttcctcctaattagttggtccacatgcaagcatatagtctgcaaggrcctgtccatttcagaatcgcctctgtaaaccagatgccttaacatggtgcatgcatggcccccagaggaggtgttcagtaactggttttgagtgaatttgaagtgttaacgaaattattataacagtgcatacgtatcctctaatgttacatgcctatttctggtttggattttccaaaatgcttttcagcaaacccttccccattagtgtctttatttagtgattttgaattgtgttccctttggtgggattcattcaaaagcaacttcctgcatttggtgatttttttcttagattcattctcatttgtttgtgaagaaaggttgttctgtgtgggttttttgttattctataaaaaagtgacttttctgcgtggattacttttatagaaacaaggtttgtctcccatatgaatgttttgatgctgaaagtttttccatgttagtgcacttacagtttttctctctggaatgtaccctctcatgttgagagagcgaagagctatagctacaggttttcccacaccgtctgcctttgtaggtttcttcccagtgtgagttctttcgtgtttaatccaggcgagctacaagggaaaaattctccacattgaccacatttgtggagtttctccagtattaattctttactggttactaaacgacgctttttgcttaagatttcccctccttctttatattcgtaggtttttggttttttaacttacatgaactctcacatgttgaacaaaggaggagcagtctttagagattttagatactttatgttcacaggatttctcacctgtatgatttttctcatgttgattaaggcagtagttctcaaactttctggtttcaggacctctttatgttctgaaataaattattgagaactccagaatgtttgtttatgtggcttatatctatcagtatttctttgtaaagggtttgtattttatcatgaaacatgtagaagtaaatcattcactttgatttttcttcatgaccataatcatattaagaatacaaaaggtataagagagtggcacaggatgagggtttattaggagggctgtatgtatgccttccccacccctgactcccaagaaaaaagattatagctatcagaagaacatagctttgcaagatttgttctgtgataaaggcaaaattccacatttttcctcaaaatagaaatgaaaaacaactatgttgtccaaataatttgatgccccaactttcaaaatgtttatgtatagaagcctatagctccaacgcgctgcctagccctgccactttgtcaaccccatggccatattctgggccctgttatcgctcagaaggcccttgtctggaatctgggaaaaggaggatgttgaagacttaaaagtcctaatgcctttaatgggggcctggaaggatggggcttcaggcctggcgggaaaggaatggtgttgtgtgggaaggtgctcacatataaaacatccagctctaacaacccagcaatgtgctgtcctcaaagctcccaaccccgctgtgagtcaccccatctgaggacctccatgagtggccagggcacagtcccttattctgctagatgctctgcctgccctgtataatacctctctgctcagccttagcactaacgccatcctcactccagtcctctcttggtttgaatgttttggatgtcttgagagcattggggcaagaactccgagaattttttttctgttttcttttttttttttttttgagacagtgtctcactctgtggccgagactggagtacagtggtacgatctcagctcactacaacctccatctcccggttcaagtgattctcctgcctcagcctcctgagtagctgggattacaggcacctgccaccacacccagctaatgttatatttttagtagagacgggatttcaccatgttagctaggctgttctcgaactccggacctcaggtgatccacccgccttggcctcccaaagtgctgggattacaggcgtgagccaccgctcccggccttagaattcttttaaacgtttccacaaatgtaagaaaagatggctttttggtagccatggtcaaaaatagccacccaaatctgtttttaccctgttcagcacatcagcagttcacctcatgtaggaaagtgagatgcaccagaggcttaaaaaagttcctatggtttgcccactaattccacatctaggaatctgaccttagaaaatactcaagagacgcgggttgagatttcttcaggaagaccttcattgtgaagttgtttatagcaatccatcaattggaaacaagtgcactaaagtaagatatcaggtaaatattagacactatccacttgatcatagaggcacaaaaaatgtttatacagctttttatattgtgaggaggacttcatactatgaattttatgggggaagaaagtaggaatcaaaatttagtaggcactttatgtcataatgtgtgtgtgtgtgtgttgtgtatatatttcatagagaaaagtctagaaagaaatgtgcaatcattggccaaaaattgtaattgacatttttctcttcatactttcaaaattctttacattggctttacttactcctacaataaaaagtcaagcttgtgtaaagaagcctagcttaaaatatggaccataagctttaaaattttttatcttagcaaaattatcaattgttaagaaaaaatatttgaagctatcttaagtgttctagtaaagaagaaactagaaacccttttattttctaatcccattcatatttatatattttttgaaagctcccttcaactatacccttgtttatcaatcttgttctgtttgttccagctttataacgtgatatatgggtatctgtgcctgtcttctgtatgtgcattttttttctggtaattctgcccatgttctgcatatctttattttcatgttcttaatccttttatttactgcttcatgactcaattttaatttttctgtaactgaattatgtaggaccttggcccctaaatagctcttttcaagaagattttcttcttgtgtgtccaatagatttgctatgccctttctcctcctcctgttaaatgtaaaactttattagtatcaatatctgatatagtttggttgtgtccccacccaaatctcatcttgaattgtatctcctacaattcccacatgttgcgggagggacctggtgggagatcattgaatcatgggggcagttcccccatactgttatcgtgatagtgaataagtctcacgagatctgatgatttataaggggtttcccctttcacttggctctcattctctcttgcctcccaccatataagatgtgccttttgccttccaccatgattgtgaggcctccctagccatgtggaactgagagtccatgaaacttatttttctttgtaaattacccagtctccagtatgtctttatcagcagcgtgaaaatggactaatacaatatcatattgtatatttttctgtagatcatccattttaaaaagaggagatgatttgctaatttttaaaaacagctcctataagaaaagggaaattcagaaagatgcttttcttctatcttttccctgaaagttgcccagttcttctttgccttttggttgttttattggctgattctagctctgggtctggtgtcagtgttgacctgtgatccctcatcagggccagtgctgagacctgtggatgattgcaccagacgtcctttacagaccaggcttgagtctccctgctattgtgatttttttttaagcttatttggaatgttagacaaacaggtgtaaaaataccatattagtttttgaaagatttgcttatttagcataacatgaatttatgctcattataaaatttctagtaatttggagatatagactaaaaatggaaatcctccctatatacacagggtttttagaaaacatataatgaattaaattttgtctctcctcccaaatgtatatgttgaagtcctgatctctagtacctcagaatgtcagtaaatttggagatagggccttgaataaggtgattaagttaatatgaggtcattaatgtggcccctaatccaatatgactagagtccttgcacaaggagatcaggacacagatctccacagagtgaagagtgtgggatgccaacccaaaaagagaggtctcaaaagataccagccctgctgacaccttgatcttgtccttctagccaacagaattgtgagaaagtgaatttctgttgctcaaaccacctagtctgtgattttgttatggcagccctagcacactaatacagaccgcagttagatcctggtctagattctataacttgccttttttattgtgagcatacattggacatcttcctgtgtcagtacatatataatggacctgattcataaataaccttgttaacggcgaggcaatattccacagaatgggtgtatcacaatgtaaaccattctctcattgttaggcacttaggttatttcagtttttaccattagaatcagtgtgacaacacaaagcttttactcccatttttgtgcttaagaggaagctcatctacaggacagctttctaacaggaatggctaggtagatcaaaccttagcagttttgtaaactatccaattgttatttggttttgagtgtgtgtgtgtgtgtgtgtgtatgtacatatatatctcctgacttctcagataaatttaaattcctgaggaatgggtgttttagtgattctttgtatcctccaagtctagtgtcatatgactttcttctaagagattctgagtgaatgttgggtatactatcattttcattaattagccttttatcatcaattagctaaaatgtgggaaagaaggggaaacatggtgtgtagtgtgacccaggcaggtcccgtccctctgagcctttgtagacactgtgttagttttcttttctcccttttttttctttttgaaataaggtcttgctttgtcacccaggctggaatgcagtggtgtgatcatggctcaag

SEQ ID NO: 94915 - DNA, 23195 bp, Homo sapiens
tatagcacataggctaaaaaaactgaatagctttgaaggtgctagactctgccaagtgaagatgttccacgatctcagccatcactccaatttatttgttcttgatcctgaagaactaaagagcaaggcctccttgcagacatgtcttcagtcaaatcttcagagagtctatacggagaatgggtctcctatttacttctccatttgggaaatgtcactcaaatatcataaattaaacttcccactgaattttgtctattttcaaaaatatacctgtagactttcagcttctgagaatgggaagctcacataaaaatagccaggatttcagagtctctgagcctaccctggctcagaaggctgcccaacaacaacaacaacaacaacacagccaggatttttgtaaaaaattgataaataatacaaattaacacatccatcaggcctagaaaatccaagaaggatatatgaaatccaaaaatgatatataaaaatctataccaagatacatcacaccaaggctacagaatgtcaaagtaaaagagagaaatctgaaaaacatctagataaaaccactgtcctccagaaatgcttcaatggcagcttagataagttagtttccagagcatgagccaacctattttattttgcaaaaatactaccatctctcaaattaatacacttttggttttctttaataattacaagaaactgatatcaagtgttaattaatatatagatgcagtaaaatgcttcagcaaacaataaaattttgttttacttttagttttattttccagagaagttagattttgagggtatccattacttaatagaccaaacgacgagaaagaaggcagagaaaaataaaatgtaaactttgattgactttccacttttatgtagaaaacatgattgattttctccagattattttttccatttttcagagtgtgtagttcattactcgtcagatttagtttctgaaagattctgaaatttcctttaatcttttaaaagctaaaggttgactctcatttacaagaatgaagaagtcttgcaggtttaggtgacatgagcttgtgggaataacactagaagtatccaatgttatccaagaaacatggaggatccaagaaatgtggatttcattctcagttctagactcaagtagctacgaaacttggtagagaagccactctaccttaggagccacagttatttcatatcctataattctataccccaggccacactgaccttggaataaatctagatctcaataacggacatgcacagtagttccctggctccaatcctcacccactagtgcagaacgttaaatctttgaattattcctaggaataccaagaggcaatccatatgtgctcacgaatctactgattttaattcccttttatttacaccttctgccttcttccctatttttagactctctttaggggtctgtagctgaagcttccaaatcaaaacttaaatatcttccccttgacttcaatgctatagttcagggactggtttggacattaggtgacatctctggagacctcagggcaccaaagtaggtgtagctccctcattgagttcctctctgtcacctggtcccagagcagtgctgccttgagctccctatgctcagagagagaacagttgcactgctctttaagagtttgtttcccatagcctccacattcgtaagagtgccgcttcaattctgggagggtaaaaaaaaaagaaaggaaggaaagagtaggcgtctgttaacatatagttgtgaagcaacccgagccagacacttcttatgaaccttctttttatggtgacccatgctacttaggctactaatatgccttaaggggttaagagagttcctactcaaagaaatgactatgtaacttacccagagatcatcctgtttgaacatttccataaaatcatagtgtgtagtgttccaggaccaggtccaaccttaccgtattggatttaaggggtctaggaaatgcaccaagcaaaatgattccctgaagtctcccgattcaagatttagtctttcaaattttgtgtatattccagtctttggtaaaagtgctaagaatcctgggcctcatctggaaagaattcttatctgttagctggctgttgaaaagacaatgcagaaatgggctgtagtttggagcaacagaaagaaaaacaagtagagggcaaaagtgtgtcatttttttcatccctctcattatgtaagttttttgtttttaactttttttttttaactttttttttttttttttttttttgagatggagtcttgctctgtcacccaggctggagtggagtgcagtggtgcaatcttggctcactgcaacctccgtctcccgggttcaagtgcttctcctgcctcagcctcctgagtagctgggattacaggcacttgccaccacactcgcctaattttttgtatttttggtagagacagagtttcaccgtgttggccaggatggtctcgaactcttgaccacgtgatccacctgccttggcctcccaaagtgctgggattacaggcatgagccaccacgcctggcctcattatgtaactttttaattcatgctttctttatcatttcaataatattaatttgggctgctaggggttgaattacatccctccaaaagatatgttgatgtcctaaccttcagtacctcagaatgtggctgtatttggaaacaggaccatagcagatgtaactagttaatatgacaccatactggtgggtggggggcttaacccaatatgactgtcgtccctgtaagaagacagccatgtgaaaacacagagacacagggagcgtgccaagtgaagatggaggattggagtgatgcacctaatgagccgagaaatgccaaagattgccagaaaacctccagcagctaggaagaggtaggaaggattccctgcaggtctcagagggagcatggctctgccgacacctggatttcagacttctatcctctaaactatggataaaaaaattgtattttattttatttttattttttattttttattttttataagcacccagtttgtggtacaagtactttgtaacagcagccataggaaactaatacaagggcctgttatgtgtcagatctcattccagtagctttggattagggtcaaataagatgtggtctcattcccaggaaaatgccagataggatttttctttcaacatttggttaagagacttgcagtgttagaagggcttttaaaacctcaatgtacataaccctgagataaatgaaagaattgagctgaagaaagtgtatctttgatagagtgatataggtgagacaccccttatcttcttcctctagcagtcttgagatgacagctttggagactgaaaaaatagcttgtgttaataataaaaaggaagcagcaatcactagaagtcagcatgagttcaccaagaactggacctgtcaaggtcagcccatcaactttgacagggaagtcagattggcagaagaaaaggtagtaaagtgtgatgagattttattgagacaccggataaatttccttacgatgtccttgtgaacaggatggagtggttgagttggaaattagtaatcagttgtatctcaactgatgattaattaatggggctatgccaatctgggttaaggtttccagtggaatgtcacagagtgtttgtaaaagtgctgccttattcaacatttttatcagtgacttggaaaagtcaaatgttatcaaatttgtgtctgatggaccagataactccacctgtatttggatatgtgcattttgttctggatgccctatttaggaaaggcagagggaagcgagatgttttgaagacagcgaccaagttggtgacctgaaggaaagtggcaactatgtaacacaagaaattagtgaggtatttgggaatattcagcctaaacaatagaaatccaagaaagacatgacagccaagagataatgtgctttacttggattaaagggtggtgaccaatggttcatatgacaggaaggcaatctcagcttggcatacaaagaactttcaggatgtgaatttttcaaagaaaaaattctagcaatcaaatttgaaagttagcaaatctccatggattgatttataaatctagtaaaaattctagcaaatacttttaaggaattaggttattccaactataggagaatagagacccataaaaggtaaatcaattttgaaaaagaagagcaaaacagttactcttgcctaaacaatgataagatgtaccgcaaaactgtattgataaaacctgatggatctggtgcagccataggtaaataagtcaatggaacagaagaaagagtttagtgacagacagcactccaatcaattgcaaaatgaatgactattcaatgggtgttgttgaggaaactgatgcatgaatgatagaggaaaaacgagttggaaaatttacataacatacaaagatggattcaggaactaagtgagaaagataagctctaaggcaaatggaagaaaatgtaaaactacatacctacaatttgatggggtggcaggaatttaataagacttccaaagcacaaagcattcgggggaaattatacaagtgtctattttaaaattgaggattttgagtgataacatataaaaagttatcagatttctgacaggttgggaaaagttatttgcaatgtcaatgctataaggttaatatctaggcaatatgaggaataccacaagtaaatatttaggatatacaagcaaacccacaagaaaaaggtaggaaacctatttggaaaacagtcctatcaaaatggacccatgagactttggtttcctcatttatccattcaataaatatttattgagtgcctattatacaccaacactcttctaggccctggggatacagcagacaaaattctctgacctcatggaatttaaattccaaaatgttctttcccaccaataggaaaaagaaattagtttctactaagtgaattttccctttaaattacaattacataattttaaagtcggaaggatctttaaggtgcctttattttaaattcatacttttgtatggtgacaaatggtagctcaggggcatagaggttgacaccttcccagcatttagactataagctcgacggttaagtggattcagaatggcagagactaaatcccgacttttcttctacagcctatgttggcaacgggtctgagcttcagtttattcatcagtataatggcaccaatgatgagacttcacataaaattggtataaatataaatatggtattttgaaacagaactgcatcggacacatggtaaaaactcaatgttagctatttttatttctatactttgattatgatatgattctacaattattttcctgtacaccatacttcaaaaatggtaacctctctgggttaccaatcaagtaactaattttttaaagtaatcatcaaaaaaggaagttatatactctttattatattataccctaaaagtttatgaaatgtgtctcatggattaaccatttaccctcatgtgtgaaatctcaactcaggattttagggctggaagggatgtgacagacgatcttgccaagcccggcccttcttctacaaggacgtcttcagagatctggaggaggaaagggccttgccctgagttcgctgagccagaacaataggacttcttctgtagttgtgaaacttgtcagttgttgaagtcaggttaatgtcatctggctggctttttaaaagggtgtgaagtgagaacatgaataattgtcacttgattagagacctagactcagagttaggttactccatgtatgaagtaaccccatatagttacttcatacatggagtaaccatatagttactccatgtatgaaaaattgcaagactgttgactgtcattctttggtttagtgggtggagccagctgtcctcattagataaaggttgtttattcaacccaagtataaatggaaaaaaaagatgygccctctgtcactgagggttgactgactggagagctcaagtgcagcaaagagaagtgtcagagcatgagcgccaagtccagaaccatagggattattggagctcctttctcaaagggacaggtaaggaaaaaagtctttctttgaattcctggaatttagttgaaaattttggacttcaaaatttgtaaggtgttattgtctagttagttcagttttctgatacaatctggccaggaaatgcatattttaaagtcctctcaccattttccaacattgtataattatagtcacatatccacttacttttgtggctcgtgatctcagccaaggctaaattcatttgaacctacagaatgttttctcatattttttaggagaaaatatttttctttgaattgaaatggactctttctgcattgtagctactcattgaggtttagttgctcttgttgtttttgatgttactgtgtgtatgtagaggaagagagaattttaagaaatacatttgtttagttatgtaattaatgcctagaaaaatttaatagtttggtggtaaccttcaggcttcttataatttggataacctaaatattattgtttcatgcaactttgtgaataattcatgttatgttagggttttaatgtttctatgaaactgttcattcatggactaggtagaatcctttatgtgcctcacttggaaggggaaaaaaagaacaaaaaaagaaagaaaatcctactgcgggttggcaactctaaaaggattttaatggatttatgaaacycccagatttccttacagccacgagctgtgaatccacacatgccagcaacattgaatacacttttttttctgcctgggcacacttattctagtaaagagagtgtgatgacagaacaccttagacttcaacacgcatctgtgcttaaagaggataaaaaacaaagaacaaaatcaaacaagacaatgtatgagttgaaactactaaggttgattttctccaggtttctcaggatctgggcagcgttttgcttcctcttaatttggaacccttgctgtgtactctgactttttactgcaaaacaaattgagagaggccagaggttagaggcccaaactgcatttggactgtcagtaaatactactttgcttcccctggaaatcctccaaaagtctctcccaaacacagggacattttgctgacacagaaatgttccttttaaaatccacactgttctcacccactcttgaacaggttataataaatatataatttaaaaacctcacaaaagggaagcaagtgtcctccttctaccaccctcctcccattaaaacatggtcatgagaatggagttcattgtctcatgattgtaaggactaagagagagagattttttacactaagtcatagagtagagaggataaaatggccaacatataagtatttgtcctcacctaaaggaggtacaagtttgacaaataagcaaaaggaaaggattagagggcagatgactaaaatgttgagtctgagaaagggcttcatccctgtctcacctccttgaaaggcttgcaaggcagcgaacaaacaataaggtaggtattatttttaccttacagttgggttaaaaaaaagcccagagaggtttggtaatgtgctcaacgtcacacagccttgactgcataattccagacaagataatctgattccaatgcctatgcccttgatttgcactgatgtctcttcagactattcaactccaaaggcgaccttatacttgtggccatttagggattgggcccagcttagaaagtcggtggagctgacaaagcaatttccaaagtgggcagatagagcaagcaagaggaaagcccaatcatgagaagccatttgaataaaacaaataaaaaagaattctagaaaatttaatggctgtgttatagcaaatatagtgtcaactaaggggtctatgagctttgttctaaaatatgaaagggagaagggtaaaaaagccaaggagttttatcaaactgagtattgagtatctactatatgtcagctctacactacaaaatatagtgccccacatgtaaagcaagctggactgaaatctaacaatgaggaaaagacaaaaacagacacaaaactaaaggcaaaacatgaaccaagcagcaccctattggggttgaaagaaggagaaatcatgtttacttgattggggagaggcaggtgtgtcaagcaaaaagggagtaaagaagcaaaatgtgtcaggcagaggatagggcgggtcccttgctgccagggacaggaatttaacatcaaggatttgcctggcacccagggcaagtcttctgttcctttgaatggggaaaaaatacttgcttactttgatgccacagccccaatcctaaagatagacacacgtgtcttttaacacattgtctcatctgacaacatgtaataatcttctgcatctaaaagctctgttggaaattaaaatcagaaagatacagaaaggaactgtgcctttagacctctaattgttcaggggactgaggaagacttgccccttggaggaagagtgttagtttccctaatgtcaaaacggcaagggtagaacttcccatcatactgttaagcaggccaaaacttgaaattactgggttggtctttgtttgtagttttcagctcccagatgatgactttttctgttgcctgctttctccccaagagctctagcttacttatgtgagtacatgcacgtaggtctctttcatgtcacactctttcgatgcttttgcccaatcgttcccttggtttgcagagtttctccatcactctgtcttgttttcctaactacctactcatgtcgcaagactcagcttaaacagcatttatttcttgcagcctttactgacayaccctgtccccaacagtgttaagggcatcctgtttttgttactaggacattttatatcatcactgaagcagctatgtattgaaactggagttaaatgcccatatctcctatcagcttatgagggactcaaagtcaaaagccttttcattattggatctcatctaccagactgcttttgcacaaactacttgttcactgtgttgataacatggtttgacgggaagaggggatgtaggttttggaatccaaagacctgaatatgaacataggctctgccacttattagctgtgtgccagtctgaaaaccatataacctttgtgattctagttctttctrtttggcataaaagtcattcagtctaccttgctgtgaagattaaaagagatgatgtaaattcctggctctgtaggagctcaaaaaatgatagttacagttcaactgattaaataatgaaaagggttcctgctgtgagcatctgatggtcatgataatgtctgaagtactttattttttaattgttcagccaygaggaggggtggaagaaggccctacagtattgagaaaggctggtctgcttgagaaacttaaagaacaaggtaatttttaagttgaaaaatgatcagcctgatttcctccccactctgaaggaaagagcaggcccctgtgaacctggagtgtgtctggaatatttacatcagaattgcggtactggttacaacccgagaaacacatcctacaaaagcagcagggcatggggagaatgctcaggaaacattgctggatgtacatcctcactcagatattttgtctttccagccaaactacagtataagataaattgtgtgtgcaagaacgggggttggggtggatggtaggggagccgggggaacagcaaatggaaggcaaggtgcagcaggaagtatgctacyagcaagaggacccctatttgtgaaataaaataaaataaaacagtaataatgataataacaacagcgcctagtgtgggcgcagtgtgtatatatacatacatatacataagcatgcaaatgcaaatttacgtatatttttaaagtatgggctcaattttctgttacctttacatataagattctgataaagtgttggtcaggatgtggagaaactggaaccctcatatatttctgatgggaatgcaaatgatacagccactttgaaagtaggtgggcagtttctcaggtaaacatatatttacattttgacccagcagttctactcctgggtgcagagaagtacaactacaaacattcaagtacaagtctttgtgtggatatgttttcatttctcttgggtaagagatttgtgcttgaatgtttgggggcagccatatttataataaccaaaaaatggaaacagcaaaatgcccatcaactggtagatggttaaacaaaaagtgtcacatccatgcaacgagatagtattcaacaataaaaaggaatggactggtcgggcacggtggctgaggcctgtaatcctatcactttgggaagccaaggtgggtggactgtctgagctcaggagttcaagaccagcctgggcaacacagtgaaaccccttctctagtaaaaatacaaaaaaaaatagctgggcgtggtggcatgagcctgtagtcccagctacttgggaggctgaggcaggagaatggcttgaacccggaggcagaggttgcagtgagctgagattgcgccactgcaccccaacctgggcgacagagcgagactccatctccaaaaaaaaaaaaaaaagaaaaaggaatggaccgcaaacacaggcaaaaacatggtagatctcaaaagcagcatgataagacaagaaagactacatgtatgattccactgatacgacattctggaaagacaaaagcatagcaaaagaaagcagatcagcagttcctggggttgggggcaagaattacctctaaaggggcaggatggaatttttcaaactcattgacccgcacagttaaaattagtgagttttagtgaacaagaattacacttcgtaaatctttaaaaaaaaaaaaaaaaagacaaatacagacacccagtagagaacagaatgcttgggtaatggacttgtcccttaactgacaagcataatttggtcacgtgttgtatcaggtgaaatttcttggaggcgttactaaatcagattcacacagacatgtaacaaataccatatttaatggcyaattagttcagaacaccgaactgaatcacagttttacatgacactctctacttttcaagcctaattcaaggccttttagggagcacacccagtccttaggaatttggggttacctgcaatttttccttactaaaaagaataactaaaaagctttatttccgaagcttccaaagtgttaggctcagtgctaagtacatattcacatattcttatttatttatgataataccactatgaggcaggttcaatggatactttgtgtgtctgtgtgtgtgtgtatctccagatgaaaatacaccagtgctttctaaattttctgagaatacatatatataccgatatatatgtatttaattattatcaaaatgaagcatgcttactatagaaaggtaaaaagcacataagcagagagagacagagagacagagacagagacagtggcattccctattaagcccaaaccagaagattatcactgttacattttggtgtctagtttaactggatggattcaagaagtgttcactgagagcccagtatacagccgcaccagtgtgtgatactggtaacatgacgtcaagcaaaagcagacatgggtctaccttcccaagatttacagacctttcaggtttttcctttryttatacttgtgaatatatgcctattttatacaattgagatcatcctacacagactgatttataatctactttttaatttagtaactcaaaactttttaattttagagtgtgatgtgaaggattatggggacctgccctttgctgacatccctaatgacagtccctttcaaattgtgaagaatccaaggtctgtgggawaagcaagcgagcagctggctggcaaggtggcasaagtcaagaagaayggaagaatcascctggtgctgggcggagaccacaggtcttgttgaataactgtgtctatgggaatctggcacaaaggaagtaaccaaggccataagaagagagaaaatttagaaatatagacagaaaakcattgacctatattttatatcaaattttctgcctttaaaaaaattttataggttacttttattatagaaacagacttcgctcaatttgaagtcttacaatatctgtattttgacctagtacagcagaaaatgtatgaaatatgaatggatttcatctaaatattcatcacaagcttacatttctaaataagtatgtgaggcaattcatagcttatttgttcttaattgccgataatatatacaactcatataggtcaacaatttcaaagcatgtgtttttcattataaaagtaatgatcataacatttttgaaagcatcagacacacacacacaagaaaaaaaatgtggtaattgtacttctctagcaaccatttcaaccagaattgaaaatctggcacatttctttcatggcatcttttttttccttgtacatgatgactttgtttaacgtgtgtgtgtgtgtgtatgtgtgtgtgtgagagagagagagagagagacagatgtctatgttgtgttctcactctacagtgcaaatttccttgttgcttcatgggatgtgcataagcatcataagcatcagttttttaattgctgcatgatttttcatcaaggggttacatcgctatatacgtacatattgcggcatattcaggttgcattataattttcaccattacaaataatgtggcaaagaccatttttgtgcatgagcctctttaaatatttactcccaaggcctaggataattttaccagaaaggcctgattagatctaaaagtagaaacacttctatggctcttgagcagtcaatgacttcaggtctccttggcttcctcttctaaagccaaactgtcaccaaggcctctgtatcaaaactgcaattgggaaactgaggctcgctttctttgttaagtggaaattttaggaatggcacatggcaaaagacaagaaacctaaagggaaaacaaacgtccactgaataatccatacctgaacgttaaggcattattgcttccacttcgagaatctaaaagctcatgattctctgaatgatacttaaacattcacaaatgggagaatacaggcattgtatagtactagcttggtgcaaaagtaattgcagtttttaaatggcaaaaccgcaatacttttgcaccaacctaataaatcctaacttttaacttctgtgcaagatatcatttatgtcttccattccagcaaaatgtctggagcttgaagtatttgggatgaactttgttcctggttgagtgggtaactagatgcattgaatagaatgagtgaacacacgccatacgctggctgaagaacttgagtaagaacatgtaagaacttctgagtgatgctctcaaattataaaagctggattttaagaaaaattgaaagactttgtcataattcacttgagagaattaagtatttaccaagagagatgagtgtacagaaaatgatccaaatttaactctgagaattgaacagtgtctcatgctaaggaatttcttgtgtggctagtatttttatactcatttatttttttggctacgctctaatcgtggttttcttacaaggtggattttgggaaaaaaaatcacagtttttttagtaatgcaatcgatgtaaatataactagttagtgagcattaagtgtaagttatgctttctctattgttttaactaattggcatctccaattcagaacctatcagaaatatcagacactgtgactcaaaggaaaaccaagtgggagcattgagtgaataatatgatgtatgtagtgacactgcaaacctgatgttcacacaaaattttttccccaaaagtttggcaattggaagcatctctggccatgccagggtccaccctgatcttggagtcatctrggtggatgctcacactgrtatcaacactccactgacaaccacaagtgkaaacttgcwtggacaacctgtatctttcctcctgaaggaactaaaaggaaaggtaaaagactggttggtactctagtgcaatagaatactttttagtagacattcaggaggtggaagggaaatgagaaactccatgttatcttattcttggtrtaatctcaaatcattttctctgcagccaataagcaaagggttggttgataaaaggcagtgaggctctctatctctgccttgcaaactgacttaatatatattttctctgctaattcttaaactatccttttagtaggtggggcagagagtaatcatttataaacaggtcagtggaggttcagaggttaaccaacttgcccaagatatatgccaagcctatagtgaagcaagggctagcaccaggtctcctcattccttcctctttccactacatgccacacagttctgcattcttactgagtagtccttctatatcatagaggcttttcaaaaaagaaattttaaaatttcagatataatggtttatgaactaatgtatttactgggagaagcacctatctaaatcataagagaaagaactatctccctgctccctagaaactccttttctaaaagatggaaaataaaatggcagattaagatttaatattacagcttataactttgttgatatgccatagtttgttgatatgccatagtatatcaataaaaagtttttattgatacaattataatatttggtccttatgatgatacaagaggttaaaacctccttatgttaaatgctcagaaataatgtcttttgaactaatgaccaagggatgggtttataaacttgcaaagtatctgcctagtacatgggaaaaactaaacgtcctggaggacaaagcagatatcatcatattatcacattaagaataaccaaaggacaggccacaaatttccctcagctgctctaggccatcctctggattaaggacttactgagaaagggaagtaaagaaggaagctaccaaagtaatgggagcacaatcgtttctttatagaggagccctgggaaagaagggcccagcaggactggggcacaaagtaggtaaatgccaactggttcaaggcaaagtcaaagcaatcaaggggaggcacacatcctcttcttaattgtgtattatttttacatgatttcttctgtatttatattctaaatataagatatacgcaatccaatatgtgtctttacctttgaatgtaggatttgttcaagagaatcatacataaccaagtgaaaacattgtaattttagattcccgatgtgccaggattctcctgggtgactccctgtatatctgccaaggatattgtgtatattggcttgagagacgtggaccctggggaacagtaagcttattccttgatgtgatttgcctccatttttgtccctttgtgtgctagatatgctttactgaccaactctatgagagaaaattaaacatcaagacacacacacacacacatgcccacacacatatatttatatacatgtacatacayatgtatgtatccaggcaattaaatctcaattgacttgctgttaaaaataaatacaaataaaactatattgagttaggttcatagaacctaaatgttttatatattttactatatttatatttcccttaaaaggagacaggcgggcacagtcagccttattaattataattatcttaatttctcttttatagctacattttgaaaactctaggcattaaatacttttcaatgactgaagtggacagactaggaattggcaaggtgatggaagaaacactcagctatctactaggaaggtaggattcttttgtgtgtgcacacatgtgtgtgcaacagaaaaggttgctactgacaaccaaagttattaataaagtctttacatgaaataatgggttgctactttttataaaacaagttaacagattattatctatgaaatgtgaagccatcaaccttaaactgaaatcctttcccacttcttaaaagaaagaaaaggccaattcatctaagttttgatgttgacggactggacccatctttcacaccagctactggcacaccagtcgtgggaggtctgacatacagagaaggtctctacatcacagaagaaatctacaaaacaggtagttaacaatctgaggtaatagagaagcaagtgtacacttgactaatatatatttatacctccttgacctgaaaaccaagtcccagytgacactttcagaatgtccatcagtcacatgatgcaataactaaagtgttttccatcggttactacctttttctgttagtggataatctttcaagtctgtctgtactactttcaaaatgtcaactattttataaattacattattacaatttgttgttgtagggctactctcaggattagatataatggaagtgaacccatccctggggaagacaccagaagaagtaastygaacagtgaacacagcagttgcaataaccttggcttgtttcggacttgctcgggagggtaatcacaagcctattgactaccttaacccacctaagtaaatgtggaaacatccgatataaatctcatagttaatggcataattagaaagctaatcattttcttaagcatagagttatccttctaaagacttgttctttcagaaaaatgtttttccaattaktataaactctacaaattccctcttggtgtaaaattcaagatgtggaaattctaacttttttgaaatttaaaagcttatattttctaacttggcaaaagacttatccttagaaagagaagtgtacattgatttccaattaaaaatttgctrgcattaaaaataagcacacttacataagcccccatacatagagtgggactcttggaatcaggagacaaagctaccacatgtggaaaggtactatgtgtccatgtcattcaaaaaatgtgattttttataataaactctttataacaagattatattgtgtctacatatttctaaatacatgcaacacacacacacacacacacacacacacacacaccccacattcataaaaacgtcctgcttaaaactactaagtttttaatgttaaaatacaaaacatttgaaaagtcacagtgaaatcaatcatccccaaaacactgtgaggccttgaaactatttaaactccctggctctggtttcttcaactgtaaaatgggtaataataggtttgggcaatctacaagttcattgggctagatgtccatgttttactttttctaaacctcaaacatgattttggttaatactttaaaagcatggttgctattcaagtagcttttgggaggtggaagatattcctggctggatgtggtggctcacacctgtaatcccagcactttgggaggacaaagagcttgagtccaggagtttgtgaccagcctggcaacatggtgaaaccccatcactacaaaaaatacacacacacacacacacacacacacacacacactagctgggcatggtggtgaacatctgtagtcccagctactcagaaggctaaggcgggaggactgcttgagcccaggagacggaagttgcagtgagcttagatcacgccactgcactccagcctgggcaacagaatgagaccctgaaaaaaaaaaaaaaaaaccaaccatattccccaaaatctattcaggagccacataaatcaaattgctagtttgtttttaataataattactaattcagctgaggatgtcatctaaaattacctatggcttccaacgtttcacccttcacttactgcaattacagtatatctcattagctatatcctaaaaactcatcttggctctggagtgtagtaaggaaaatggaaaaaacaaaccagagtaaacggtaatcaaaacaagggaagcaaagtttttctcctcccagtaatttatgtgaaaaccccagggggtcctgtaaaaaaggtaggctccatgaatggatttctcctgtgtttttgttttaacagctatatgatagtccctacaatctgatttttcaaatgtaacacagaatttaaaaactgtttcctctaataactcctaggcctttgaaagataaacattttattgaattacttttagatgggagcaattataatggatctcactctaagatatattctctaatacagtagccacatgtggtcatttaaattaaagcttaataaaattaaaaaattcagttccacatttcaaatgcttcctagataaatgtagctgctaactagtgtattgaatagcacaggtaaagaacatttccatcattgcagaaagtcatactggacagagccactctaaacttactattaattttcaaaaagaaaaacttttaggatgtgataaacataaaggcatttttttcccctctgctgtattctaaacccaaataaagtttttgtcttctattagtctctgattaaaaacatatttaaaagcctatccagggaaattatattcccatgtttttaagctagagagggaaaactgaatttgtaataaattaattagaatgtttatgtccttgagaaagtgattatattgattttcatttcctctattgtttgtataatactagtgtcacaattttatcctcattctaggatcaaaaagcaataaattcctcaaggcagcaagaatacattgacgctatgctaagattaacacttgaaataatctctagcatgttttctgggtaattttaagaatgagtctgcaggggccgggcacagtggctcacgcctgtaatcccagcactttgggaggctgaggcgggggatcacgaggtcaggagattgagaccatcctggctaacacagtgaaaccccgtctctactaatactaaaaatacaaaaaattagccaggcgtggtggcaggcgcctgtagtcccagctacaagggaggctgaggcaggagaatggcgtgaacccgggaggtggagcttgtagtgagcccagagtatgccactgcactccagcctgggtgacagtacgagactccgtctcaaaaaaaaaaaaaaagaaaagagtaagtctgcaaaaattacttttaccattatataaatttttagctggacttgcatggccagtaatgatttagtgatggcaattacatgagctacaaagaaaataaagttctaggaggaatgtatttagaaatatgaatttgaaatacagttggttaaattcactagttctttttaaaagaatctgtaactcttaattcctaggccaatgtcagtcaccaactgtagtgtaggaaccacagagtaccccatttccaactgaccccagccagcacaccacctggcacacagccgacactcattccaatggagtcgggaaacaatcacacggtttattcattcagcagactttactcattagttttcaagtctttcgcaatgccaattcccccaaaattaacaatgtctctcaaaatccaagaaataaaatgtgtactgtatttacaaatataaaatttaaaaattttaagattataaaaattgaagaattacatcatctgtcaggtgagagtgtcaacctgcaaaagcaattaacttatttttaaaaaaagaaattggagaatcaaccatttaagcatgattttaagttcaagaattttcagatgttattttcttacatggcttccaactaattttatacagtaagttcaagtccatagcaaaggtaataaaactgccagttgaccttgatagaaactatggaaatttataataaaatttcaagtcattttaaaaagaatatgaagccttgtttgctcctacaatgcaacaaaatctagattccttttcttgatataaatctctattattctgaaaatctaccaagagatttatgtataaaatatttgtaataactgttttacatgtgtggtgcctttaaaataatatatctgaagactaaatatgtcattaataataaaaaatacaaacaaaaacaacggctagaataggaaagactgaaagtgccaatgacaagtcatttgatcacagatacctctatgttcctacatagctctaataagttgttatgaatatgaacaacatgtatcttacttgatctcttagagacaaaaatatagatagggagatgggagttataaggtgtcaacagattcatcatttgaatcaaaataaaacaatctgaatatcatcactgcttctactatatcactacagtgtgatcgcattcagatttaaaaggtttgagtccactctcaaagacggatatatttctactttctccacagtacagtctggcttcactgagttactggtaaagacacgggcacctgattagactgaggtgctggagacccactgttcatggcttgtggaggcactgcagctggctccatcttgctaatgtgtgtgatgaatcgaagacgaagttttaaagctggttttaagttacagataatcttctctacctaagaaataaaaacacattaaaacgtactttaatcagagaatttcaacttctcacatttaaagcaggatttacacatatccggagacaataaactaaggagtgtcgtggggtagatgagaagtttcttaacatgttctgtgttttaagaaaagcagatacaatgatttctttcttgcatgagaaacaatacgttctccctcacacacaccccttatatattatatgtgcatgtctgtacatgtaccatatgtatattcatatatatgcatatacttacaaaggcgtatccactcatctagctagccagtcatcccactaccaaaagctagcagagtttacactggaaattttatacatccaacaagttgatcattcttttaaaatgccatctttacagaagcatgaagcataattataaagttctttgaataactcatgtttgcaacatttatctataaaactattttggttttgatttacacttggaattaactaaataatattagatctactcttttgaaaaacactaaggagacaaacacatcaagtcgtttcacagctttcttagctttactcaaatgctctttgaccttttcctttctgtactcccttgtgttaaagtttcttaggcctaaatgtaaagaatactttttttaaaaaaacaaacaaataaacaatttcttttacagtttctctgcatgttctgtgttgtaacaaaagcagatacaatttctctctttcttacatgagagagaacaggtcaactctctttgacactgctgctgagacataaaggagtcaacctccttggcatctcaacctaaagtactgggaggggtaggaggatggacttaactttccctatctgtcctacctccactcctttaaaatggcccagattctgtttcctacacgtaggaaactcagttatgattcaaggtctttttctactttcagacatccccattaggaagttcctcttcatatgctaagtcagggtggcctccctttaactttaccagaattcatacaccctctaaagtgacacagaacgaatctaatacctattccaaatgaaaaccctccaaaatgctgaggtcataaataattccctaggacttttttcttcaggataagcattcccatattctctaaatgcttttcatgagttagtctctagtcaggattagtctagaatcctgactttagtcttctagttatgccgcggtttgtctactgtcaccatgagtgtcaggagaagcaggacctcctttactcataacacaacaacctctctgctcatatttcagcagccatatcccactgtttctccctaatgagattactattaattaaccctctaggtctttttcagattttctgttgcaaatatcaagggggaaaagtacaagaaattataacatgtatttcctttaatactacatctagaataatatgcctctgatgcctaaaaaggtctcatacccaccctttttccttaaaagaaaaaattagacaaaataaaaataatcacccaaaccaaaaaagtctattactatatgttcaagttttctaaattaaacatcattaaaaataattaaacaaattcaacttacttgctctttcacgctgtcaccagtaaacatatacttcatgtgatagaggaagtcacagatgggatccatgtaatttaaatgggtgctacactggtcaacattcagcagcatgtcataaaacgccacaccaatctatttaacaaataatgtaaaattatttaagtgatcaagtgattcagtaattcagcatgatgcagctgggctccattacaacactagcaccgggggatactgtctttgctgtagaactgtcatataccatatacacctctatgcacatgagatatgatatggcttgcatttataaaagaatctatagtgctacaaaatgcccctgacaaggcttaaataaaatttctcttcatagttaagtaatttctcttaaaatcaagagataaacaatcccctttctagacaccatctctcgatgtctgggataactccactcctagggatcctttggattatactttcttagttccatttggtagctcttgctttaaggttctactcctgggtcctttccttgtttgcgacattttgttagaagtgactgacttcatccattctcatgattttaattagctcctctgcactgtaagatctcaaatgtacttctccatccttaacctcttctcaaccttcatgatgggcgtttcctctgcatctccaattcaatacatcccaccctaaattcattactggcaaactaagtcctctaaaattgctcttggatcctgttaaactagtttcactactaatggttgtgacctgcagtttcaataacactggtaaagaaacttaaatagatacttcagaatttaatcatgtcacaggaaacccagattatattttacctctatcatacaa

SEQ ID NO: 94916 - DNA, 31030 bp, Homo sapiens
gtgaaggtcataaactgtctgagcaggcctgagatacagccacctggacgccatagtgaaggtcatggaataagctgtgctaggcactaaaggaaaacctagataactgacatctgggttgcacagcaacggtcatgtgtaatcctgagttatgaacctgtcacaatttgattaattgctctgcctctgtatccttgctttcacaccactgtaactgtaagcctgcttcaagctagcccactccctttttgaagtgtgtataaaagtcaagtgctgtctttgttctaggcccagttttccagatgtaagtctgagtacactcaataaagatcctcctgctttaccccgaagtctctctcatccgcctgattcccgcgacattggcactagccatagattaatcattatggatggaattgcttcaccatgtggcttttattttcatcctggacaaaaattaaccattatggctggaactgttttcaccacgtggcttttattttcatcataacactgctgaggccattagtgagacattggaaaatactaaaaaatagaaattgctgtttatcattaatattttattgatttttgttatttaaaataacacaaagcattgtgtaatattgtagtttccaagcattctaagttaatgtggtacgttaaaccccacaaattttgcattctcatctcatcaatactaccatgtttttccatgatgctcatatatatagaagaaaccatttggtgtttctagaagagatctgagatctgactgcctatcctgattattgttctgggaagttctatatagaaaatatagtgtagggctgggtgcggtggctcatgactgtaattccagcactttgggaggccaaagcaggaggatcacttgagcccaagaattcaagaccagcctgggcaacacagggagaccccatctctataataacaataacaaaaattagccagtcacagttgtgtacacctgtattcctagctactcaggaggctgaagtaggaggattgcttaagcccaagagttcgagggtacagtgagctatgatcatgctacccccacctgggtgacagaatgagactctgtctctgaaaaaagaaaagaaaagaaagccagtcttggccacccagaatctcccattccaaggtatttattaatatatcattcagacaagaataagcacaaatatagtatattttatattttcataatttattttgatattcactgtaattgcatttcttttcttttcttttttcttagacagactgttgctctgttgcccaggctggagtgcagtggcacgatctcagctcactgcaacctccacctcctaggttcaagcaattctcctgcctcagcctcccgagtagctgggattacaggcacctgccaccacgcccaggtaatttttttgtatttttagtagagacaggatttcaccatattggccaggctggtctcgaactcctgaccgtgtgatctgcccgccttggcctcccaaagtgctagaattacaggcatgagccactgcgtcctgcctgtaatcgccatttctaattcttttcttcctctgactacaactgtgttttctccctagtacttcaatgagactcttgtgaagttcaccaataacccccaagttactaaatctagtagtcaatatccggccctcaccttcctcatatcagcagaatgggtggttctgtctttctttgacacaccagaatatagcacttttccacttctgctgcacttggctgctccttcttaagcgcctttgttcttttttccttgacctcctaagacttagaccttgctctgcttctttgtgtacactcactttttagaggatctcatttagtcccatgttatttatttattcatttatttaagacagggtcttgctctgttgccaggctggagtgcaatagcgcagtcttggctctctgcaacctctgcattccggactcaaaggatcctcttacctcagcttcccaagtagctgggactacaggcatgtaccaccatgcctggctaatttttgtattttttttatagagataaggttttgctatgttacccaggctgctcttgaactcctggactcaggcgatctgccagccttgatctccctaggtgctgggactacaagcatgagtcactgcgcccagctaagccccatgactttaaaagccatttctattctgacaacttcccaatgcgtttctaacctttatgctgaactgcagactcagaataagcttcttggatatggtatgactgaaatttatttttaaaattttcccgcaaaaccctctccttccacaattctccccatttctgacagttagaactctctctatcctgtggcttaggccaaaatttcaatgccatccttgattcctctttttctctcatattcagtccatcagcaaatcccttctgctctaccatcaagttacatctagaatatgaccacttttcacacctccactgctcctttcctggaccaagccatacttatgccatacctagattactgtatcataactgacttcctatcttcagcttctgcccaccacaaagtatatatagacaagctagccactctctagcaggaaagacctggaacacagctgtggatttgcaactaatgatgtctgtcatgaaaataacaggttttgctggttagatgaaagtgtcctgtaaagaaggctcttttcaaacagtttatgccaaaatttgggaagaaaagatggaagtgggtcatctagaagttacgtgagatgagctgggcacagtggctcatgttgtaatcccagcactttgggaggccaaggcaggggaatgacttgaggtcaggagttcgagaccagcctggccaacttggtgaaaccccattgctactaaaaatacaaaaaattagtcaggtgtggtggcgggcacctgtaatcccagctactcgggaggctgaggcaggaaaatagcttgaacctgggaggcggaggttgcagtgagctgagattgtgccactgtactccagcctgggcaacagagccagactcaaaaaaaaaaaatttatatgatatggtaaatcagagcatgcatcctgtgtagtggcacaaggccccacagtcaaaagggctctgtacttattttaatgctctgctgttatcaccttgaaattcttttttttttttttttgagacagagtcttgctctgtggcctcggctggagtgcagtggcacgatcttggctcattgcaagctctgcctcccgggttcacgccattcacctgcctcagcctcccgagtagctgggactacaggtgcccgccaccatgcccagctaactttttgtatttttagtagagacagggtttcaccgtgttagccaggatggtctcgatctcctgacctcgtgatctgcccatctcagcctcccaaagtgctgggattacaggcgtgagccaccgcacccggccatcaccttgaaattcttaatttttgagcaaggggctctgtatttttattttgcactgagccctacaaattatacagatagtctgtggtcagtgcagatccctggtatttaacagcatcaattaagaggaaaacgtaaaccttgtaattactgcagcagaacaacaaatatataatgattaaatgtgaaaagaatgtgaaaataaaacttagagtcttgttttctacaaaaatggtggtgattctcatggggaagacagtggaaagatttgcttgagagaaagagaacagctgcatcaagccagaagaactggcatttgagaatttaatccctaaggagagatcagacaaagaaaactacgtctgattcctcagagtataggctgtagttaaggtgtaagaaattagatgagatcacaaagaagtaaataaatagagaaagtgggggaaaggagaggctttgggtcataactgagggctggaactaggttattttattacattctatcctttcttttgaaagtcttgtccctggactagggagttgtaagaaccaagcctggtttaaggattcaggtggtggtatctcagaggtaatctagtccaactttcatactttggagctgagaaaccaatgttccagaaagctaagacaatgattctaagttccctttttaaaatgtattgaaatgtgttgtctaaaaattaaaaaataaaaatatctgtggtattttgtgaagacagaggccttggtttggagtagatactgtcacatgacttctcacctcgactcttttattgtaaaagaggaagataataataccttccagggaacattcttcccccttctccattgtggtaggaattaatcactgcccaagactcctggttgaggggctgagtgaagtgcaggcagtctccagccaggagctacaccgtttgttgggctaccctgtttgtagggaggaatgcctttctatgtttctaacttgcccaaagtctgcatccttgtaaagtagtgttctgaatgtgagcgatcatattcatgaagtgcctggcacatagtaagcactcaataaagagggatgtaatttttatgaactgtgcactgaacgtttattataagctcatttagtttgtaacaaacacaaaaggccaaacctagaacttattggtaattcttatagaaaggacacacctatgcccaatacttactcactttcttttttttttagagtctcgctctgtgccccaagctggagtgcagtggtgcaatctcagctcactgcaacatccatccacctcctgggttcaagtgattctcctgcctccgcctcccgagtagctgggattacaggtgcccgccaccacgcccagctaattttctgtatttttggtagagatggggtttcaccatgtcagccaggctggtctcgaacttctgacctcaggagttccaggcctcccaaggtgctgggattacaggcgtaaaccaccgcgcttggtctgcccaatactttcaacattgctctggatcttactgtaaaattcttggaaactgctgtgatactaagataaccagatatttacaactgatacaaagtactactgcaatagttatttatggatcccgcacaatgctgggggcagggtggtaggtacagagaaacaaacgtcactgtaactatcaagttacaaaatcccttgagtagaaaaacaatgacttccttaagatttattttactttttactgtatttaagtttacactactgtttcttccttaccaggggagaattttatgatttttatgttggcccattttctttttccggaaagtctaaactagcatttagctcgtcctgattagagtcaggcaccgccaaggcatgggttggcatcttccagatcccgctcccccaaccgcggccacagcagatctggaggaccgggagaggacgcaaggaggaaaagccctgctctgcgagctgacagccggactctgcccacattgccaatggaaccacgtcttcaagccggaaactcagctggacctctcgcagcgctctctgcgagggggcacaggggttattttctccgatgttgtccacacccagaaaagcttgtctctcggggctactgtgctgagccccgactggtcaggttaggccaccggggttagctctgcaactcttgcttcacggttaacagcccggagagctttcttaaaaaataccgacgcccactgccacctgggacaacgtaatcaggctccctagaaaaggggctcaggcctgggtactttttaaggttctcttgtgaaccaggaccaagggtcttgggagggtgccgcggagaccacgtgggcatggaggccccgcccccgtttcccgccccgcgcgcccctcccccggttccccgccccccccaaccccgcccccgccccgccccacccctgcgcgtcccgcccctcccgtgcgccgctgacgcgccgtgctccggcgcaggcgcacaggggacggttgctggcccaggtgagcgggcgcgctggtccaggtgagcgggcgcgtccccgcgacggcgctgcctgcccgaggcggttcacgtaaagacagcgagatcctgagggccagccgggaaggaggcgtggatatggagctggctgctgccaagtccggggcccgcgccgctgcctagcgcgtcctggggactctgtggggacgcgccccgcgccgcggctcggggacccgtagascccggcgctgcgcgcatggccctgctctcgcgccccgcgctcaccctcctgctcctcctcatggccgctgttgtcaggtgccaggagcaggcccagaccaccgactggagagccaccctgaagaccatccggaacggcgttcataagatagacacgtacctgaacgccgccttggacctcctgggaggcgaggacggtctctgccagtataaatgcagtgacggtgagggggcacccgggcccagcgagggctcgtgctttcgggggattggggtgacggagatcctggaggtgtgagtgacagatgcaaggcagaccttgacggtgtccttcggctgtggaaaaacttaaccactgctagaatcttgccgttctagtgattgagcaagctgggtacaagttcgcaccactattgttagaatgtgagaggtcacattctaacggagaggtgtaccccccgtcccatttgcattgcttctgaattaccttttccccccctcaattgcaccaagttgccgaagaacttactgacgtaggaatcatgggaatagagtggaacagactggttttagctcatttttgcttctgtaaattggatgaacatgcgaagcaaactgagaatttaaaaaccatgccgtatkaactttctctataattgatattaaatggttttttttctgcaaacccatagacaataacttgcgacctttgtacagacttttggtgtactcgagtgttgagaaagggttccgataactcttctttccttagatatcagtgacccgcctcctcctcattgttggttaacgttaatacagttatcttcatttactcttttaatattttttgaactttctctttgaacctgagaatttgtttggtggcggtatgagtactaatcaactcagtatttcaggcagagatagttcttttgtagcacatttttgagtgcttaaatattttaataggtcagaaaaatattggacttttgtttggaaattgaaaatgttaagagagcagttgggagatcatgtttccaataagattagccaaggttagagtctcattatgctggcagcggaaaataatmggggatccagtgacttcattgttggaacctgattgtataggtgaacttaaaaggaactggtatcatgtaaacctatgatgccacatgctgcctgcaattttcaagataatttctagttttatrttaatagaagtaaaggatgaactgtatcttgtatactttaaagcgctgaacaggtgctgagacatgttgcattgcttcttaaatttgtgcctaaacgttaccacctaaacgtatgcttcatgaagatgtttttattcttgtagaacttgttcggaggattaagtgcataatttaaggatcaaatagttgcctttcctaaagcaaatgttacagttttacttagtcattcctattcattatacaaatatttgagtcccaactgtgcttcagatgttgttctaatttgagattcagcagttaataaaacagacaaaaatctctgtccgtggagcttgagttctggtgagggagagatgggcagtaaactagtaaataagtaaaattaggggaagtgtggagtctgatcagggcagacgaggggccatgttggaggcaatttactcttctaaatgggttgttcagcaaaggcctcactgatgaaagaatatttgagaagaaatctgcacgtggtaaggggagggaatgtggttatttggagaaacagcattccagacagagggaatagcaagtgcaatggacctgaggagaaaggccagtcaaggatgactctgaaggttttggcctgagccaaaggaaggaaacggttgccatttacagagatagggaagacttggaaggagtcgtcttcataaatttattagtctagggttctagagtttatttacatttaaaacatgcctgaagttgaatgaataccagccttgttaaaatactgttttagtctttttattttattttttgttaatatttttgaggcaaggtctccctctgtgcccaggctagagggcagtggtgtgatcattgctccctgcagcctccaactcctgggctcaagcaattctcctgcctcagcttcccaaatagctaggactataggccatgcccccactacacctggcttaatctttctttttaatctttttcatcttctacaggcttctcaaaatttactatttggagtttagaggaaggtctctggcacaaaaaaacacaaaggaatttgagaatttaagaaatgttatatgcctcagtgaaaaaaaattttttgtcttagtaagtactctacgtttaacggacatgtggtttcaagtccaagtcaccatactgatagataattggatctcaatgaaaaaaaaaattaggcaggacgtaatggctcatgcctgtaatcccagcactttgggaggctgaggcgggcggatcagttgagctcaggagttcgagaccagcctggccaacatggtraaaccccgtctctactaaaaatacaaaaattagctgggcatggtggtgcacacctgtagtcccagctacttgggaggctgaggtaggagaatagcttgaacctgggaggtggaggttgcagtgagccgagaccgtgcctccagcctgggtgacagagcaagactctgtctcaaaaataataataataataataataataaawttgctgttactcgagcagtctctctggaacaattcaacctttcctatattttggaattcaggtgaccaaatcagaaccaaacagaacaatcccaaatctggagaaacatggtgattaaggggtatttttagttgcamgaaagagatcaagagagctttaaaaaaaaaaaaaaagagtgagttaatggtagggagaggttggtcaaataaagggcacatgtccttgctttacctgagggactggcattatggagacttgctcccttagttttggccatcctctcttgggtaggaaaaaggccttattgagagttaagtatttagggaaataaatttgatgatccgttattttcttcaacttttttctccctgacagcaaggaagatttaaggaagaaaacttttcgatttcctttgaaaaatagaacacaaaactggcttgtaaatgtttttagaatgatgaataagtcattaattaattcagtgaygtatgttttctaggatccctctggctgttgtgctgagaacagaaggggtcaagggagtgggggagtaaaartggaagcagggtgacgcatgcaggagtccagacaaaagacgggtgattttgctcaggttggtagcaacagaggtaatgagaagtagttggattttggatatattttgaaggaaggacctaaaagatttgctgatggcttagaagttaggtatgagttaagtcaaaaatgataccacagtttttggcctgaacaactggaaggacagaattaccattaactgatatggggaagaccgtggaaagaacagttttcgggcattaggaaaaataataacacatttgtatgcttttgagaatggttcagtggagagtagaaatactgacgagggagagaattattggagtcatagccttgggtaagtgagagggggtagtttctagtacatacttagagagtttggccaagagcatatagcatagccctgttaataggaacacaggtagaggatatgagcactggtgctggttaagtgggtggatgttcaagttctcctgattgcctgcttttytcagtaaagtaggaatccaggtcatcagctgacagagaagatggggaatggggatgttggagatttgaggaaaatataaaagtgaacagactagaaaaataaagtaatataaggaccttttggagattaatgatcatgaatacttaaagtctcaagtgtttgggagtgcaggttggaatcttacaaaactctgccatgagacctttgtgtgacccagcagactacttcttgtgcttgtcatctgcttcatattctgtcaggtgaaaacagttggtctatctggaagtatttgcatcaaatttagaaaaaatacatggaaaataatcaactttgtctcagtctatgaaaatctttagatttctgcagtccatacaaatgataaacaatcaagagaaggagctattgcttaagtcaaaaatggaaattaatgaatagtctttccatgcagttgtacacagtggatttggtttgtatccgcttacaaatyttagaggacaatggccgcaacacatcatggtgttttgatgttactctgattttgtttcttccattattgagtttttgctttatttgtaaaaactggcaccagtagaaatgctaatttttaaaatgcttagccatttataaaactataacaaaatttaaaatattaatacatttgtaacattggtgtctgaatcaacttaacctctaataaagaactgtctatataacttgccttgttcagaaataactattttaatttaaaggtgaatttagaatttcaaaatactttagaatttctcaggaaactagttacttccaagttttcagttttttgctgtggataaagaattattttaatttcatcaaagaatgtttcccattttttaatctggtaatttattgggtgcccactgtgtgctaaatatcttctaggtgagcaagactaagtcctttcttcatagaaaccgactaatgttaatgttaattaggtcaataaatgctagaaagagagggggtgctattttagattgggtaagcagggaaagcctctctgaagaaatgacattaggagtttgccttgaaaaaaactaaagaaccatacacatatgccccttttgccatttacactggggagccaaactttttaccagcatttatttcatggtgttattatccagtttttcatgtacagtagatgttggctctttattacttgatttttatcaacttttcttcttcagacagttataaccactagccctgtttggcacagcagcctcctacttccttgtacctccattctcatttttgccagttgtccttctctgtactatctcttcctctttactctcctatggtgggcatgtttttagtttttctgacttcatttgtgtctgatcattctcccattcaaaggtaattatctcttatgagaaaatgtctatatatgtacacgcatgcatacacatatatatgtatcactgtcattacacacatcatcagcatcaggaatgtttttatagatttgaaatcagagtctatggatttagataaaatacaaaaggaaggaaaaatagaagtactgctgttgtatgtacattgagggaagtatctttctgattaaaaaaaaaaggccgggcgcgatggctcacgcttgtaatcccagcactttgggagactgaggcaggcggatcacctgtcaggagttcaagaccagcctgaccaacacggagaaactccatctctactaaaaatacaagattagccaggcatggtggcgcatgcctgtaatcccagctacttgggaggctgaggcagaagaatcgcttgaacccaggaggcagaggttgcagtgagctgagatcatgccattgcactccagcctgggcaacaagagcaaaactcagtctcagaaaaaaacaaacaaacaaaataagacaattgagacacatgtctttaaagccataggcccatatcggttgtctgagggtggtaatctttgcttctcatggaamagggtgaggtgccagaaatctctagactggcagatgggagggagggagaatgtacaaggtgtctaaaaagttggaaacataggataaacattatgttttattttcaaatgacacactcaatatgtttttcattaaccactagacacttttttagatgatatacttctaaatttaaaacagtccagttgttaacctgaacaatatatattgtaaatacactattattcctgtttccagactttttgaacattctctggtgtatttattgtacttttttcagattaacaacttgacctatttcttagtgtgtatctctagatatgtttctaaacattttgaacagttgattgtcaaaacccctgacgaaagagagtttcatgatgaagcttgaggaactagaatgggcttcccaagaattaaatgctgatccagcctccttttctgtgaagagatttatagtgtgttagggcaaagaaaactatagataaatgtatagtttctcatgatactcctgtgagaaaaactggttactatttgatgacttcacggctgcttggagagaggactcatctgtagtggacctctgtcctgattaatatctgcatcttaagtttgtgaatatctgggagcaacaggcaacactgggtgaataactctagatttaaaaactgctcagcagtcgagaatggtgaactgaaactaacaagattgaatcttatatacaatcttatatttagactcaaaattaaattgcagaagtgctaagcctctagcagtaagtattaaaaagtccattttagaaagaactgatgatttttttttttttactactgtctatgttagcagtcaggcacagctgaaacatactgtgttaggctgttttaatacaagtactttatccagcacaaaaggttaaaaagcccatcttaccctacagtgttcagtctgaggtgctgtattttaaagagatgtgacaagctagaagtcatcagtctttggaggctggctgatgaatgctcaccaagcccaaaagagactctagggcaaacagcagggtttcttaacggataatctccatttataatgaatattccaagccttccaagtcttctgttcattaattcatcacatacttattgtaaaaattcatcacaaagttattccaggcactgttctaggcattgggaatccaaaacacaaaaatgtctgctttcgaggagtttacattttcggatggggagacataataaaataggtagattagtgatatagtatgttagaaggtcatatgtgctacaaatagtatggtcagggaagacttgctgagaaggtgaatgtcttagtctgttcaggctgctgtaacaaaatgccttaaactgggtggcttataaacaatggaaatttattcctcagttctggaggctgtgaagtccaagatctagcatttggcagattcaatgtctggtaagagtccacttccttgttcatagatggcaccttctagctgtgtcctcacatggtgatggatggggcagggcagctctttagggccacttttatagggcacaaattccattcatgagagatctgtccacatgacctaatcacctccaatagtcccaccttctaataccatcacattggtgattaggtttcaacatgaattttggggtgatgcaaacattcaaaccatagcagtaaaggagaaactagtgtcaggagaaagagcatccacatacaggaagagcaggttcaaaggccctgggacaggagcagacctgcagtgtctgtggaacagcaaagaggaataggttgaggaagaaaggaagagagactaggaagaggatgaggtcagagaaatcatgggaagaccaggttatacagggtttcataggctttatagactttggcttttgttctgaataagatgagaagccattaaagcgtctctgagcagaaaaagacttgatctaacatattttaatacgatcatttgtgctcggtgttgagactggattatgggggttggtgtggagcaggggaaccaaagtagggcaaatagttaggagtttatagcaataatccattgtggcttggagcaggattggtagtagtggaggtggtaagaagtgattagattctgaatattttgaaggtagagtcaacaggatatactgttggattgaatgtggggtataagaacgtaagaacataagcaaaaatgtctgacatttttgctctgagcatctggaaggacagaattactgttaactgaaaacagcaaactgtgaatggagcaaatttgaggtgaatgtcaggagggacagcttaagtttgagatgcccactggaccttcctctgtaggcccttgtaagtaggaagccaagtcataaactgttttcttaggaatgaaggactgggccgggcatggtggctcatgcctgtaatcccaacactttgggaggccgaggcgggtggatcacgaggtcaggagtttgagacgagcctggccaacctggtgaagccccgtctctactaaaaatacaaaaattagccaggcctggtggcacactcctgtaattccagctactggggaagctgaggcaggagactcacttgaacccaggaggcagaggttgcgatgagccaagatcgcgccattgcactccagcttgctgggaggcaaagcgagactccatctcaaaaaaaaaaaaaaaaagaatgaaggactaaaagtaggcgatgagagttgaaggatcatggtgactcatctgtgatagcctgagtcatctaccctcatcttccaagggtccagaaacaacccttccttatggacagggctggagaaacaagacgaagtgctatcattggccttcccttttctagactcatcttaaccattcctttttgtatacatttttcctttagagcaggctgtaggttttgtttttgttgttactgttttttgagacagagtttcgctcttgttgcccaggctggagtgcaatggcacgatctcggctcaccacaacctccgcctcctaggttcaagcgattctcctgcctcagcctcccaagtagctgggattacaggcatgtgccaccacattgcccagctaattttgtatatttagtagagatggggtttcrccatgttggtcaggctggtgttgaactctcgacctcaggtgatacacctgcctcagcctcccaaagtgctgggattacaggtgtgagccaccgctcccagcccaggctatagctttatatcttcgtgaggttatactactctcttgaggctatgtatggtgaccttagttgagcatggaacttctgagcaagtcactgaaaccgtttatttttttctctttctttttttatttttttaaaattcatatatatatatatatatatatatatatatatatatatttttttttttttttttttttttttttttttgaatacagacagagtctcatcatgttgcccaggctggtctcaaaaacctgggctcaggcacctcaacctcccaaagtgctgggattataggcgtgagccaccacgcccagccaaaaccatttttcagttattaccttgaggggttccttattttgatggttgattactgaaagagctgcttttttaccctcaatttatttttggagggtaaccttgtctttataaaatctaccaataaatgttaaatgaaaattggcggaatactttgtgtcactcctatgtatccaactgtggggttgtatttggaaactgccatgtcttagggtaaaatacctgggaatatctcattttagaaggcaagataaattgtagcccaaaatatttgaaaggattattgtgtaaaatagggagttggcttatttttctgtttccccaaggggcagaggattgtttataggtagaacttaaaagaaagcagaagaatgtcttaacaattgatgtcatttcacagtagaataggttatttcttgatgtaggagggttgtgggaaacattcaaagagccagtaggtgactggtaggttgaagtgatttctatacaagcatacttcattttaatgtgttttgctttaatgcacttcacaaataattgtggggtttttttttgcttgtttgctttttaacaaatcgaaggttagcggcgaccctgcattgagcaagtctatcggtgccatatttcccacagcatgtgctcacttagtatctgtgtcagcattttttagcaataaagtatttttaaattaagatctgtacattggcttttttagacagtgttattgagcacttaatagactacagcatagtgtaaacaaaacttttatatgcactggaaaaccaaaaaaatttatgtgactcacttcattgttatattggctttattgtgatgatctgggactgaacctgcaatatctctgaggtaaacctgtattaaatgaggtgaggtgtttctgaagtaccctccaaaatttaagattgctatgataatgtcatctttttccttgttactgaacccttgatgctactggggaacattagccttccaagtcttctgttctttagaagtacttcattagaactacagtacttctggagtaccgtagttcatcaagtatccctcctaaccttttccttagatggcaaagaagtatatttgtggaatggttgactcggtgggagggcagcaggcagaatgcgtggtcttgtaatgtcttgtagtactaaggttattgaatgatcatcagatgaccttgtcttccttagccttaggctttgcccaagtaaactggttggttaatggttattgaggtttgtatgcaatgaagcatttgtgggagttgggaagatactgtcttagccctaaaaaacaaagtgttagaatgtacaggaaaacagggtggatttatctttcatacatatgaaccctatctggcaagtgacctctgaaatctccagaagtccaggataagcttttgtatgtttcgtatgacataggcttacaaataattacattttatgagttgctatatatgtgtatatgtatatatgtgcacatttgtatatattcctcaccacaggagaaataaaaagtctaattagcattcttaatgctcatcagaataaagacatatgcacttatgttagcatccragtaaatattacatatttctaaggctaatgtagcatattgacctttttgagtatgtattttacttttatcatatttgaaaattaattatgataccattatattttataggatctaagcctttcccacgttatggttataaaccctccccaccgaatggatgtggctctccactgtttggtgttcatgtaaatattgtcttttatttgataagttttgtaactggtaaatcatgtaatacttttggtgatataagactatcagcatgttcttagattcacaaataatttagctgggtgtaagagtgatcaggtttattagattctttttggcaaaactaacaaaagtaaatgaagtaaaattgttttatttttgaatcttatagatgttcgtactatttaaatgatatttcccaatatcacatacatagttgaaaagtttggagtacagaagtgctactacttagagggaaaaagtatagataaatcatgttttcgacattaaaacaaggctaagtgggatagytgtgtggttgttgtaggagtgactggatctaagccaagtattatgggaaaaaaatgtttatgagaatgattcctagacacaaggattttgtgtataaagttatttaaaataattgaagttatagattcagagtaatagtatctttggggaatggagaaatatttaaagattaaaaaacaaaaaaatttgagttgtaggaaagttttctgtgatatttcacataaagtaaattttatttggaaggagaggccacaaacactttgagtatccaaaaatcatacttacctagcccctggagaatctttaatggacttagcctcatctttctttttttaaaacttatgttttgtgttttggacaaatggaaattttgttactgacaggtaactgtgagtgttctaacgctgcagaatagggagcagtgaggcatagctgagagagtaacatgggtgggtatgrgtaagtgtaatggggagatttataacacagaaaatatttgtaggcagaaatggattttggaactatctatacagcagtcattatcatttatacctatttagtctatttgaatgcagtacttcagaggagttttgcatttcattgacagtaatccatccaaatgccttttgcagcttaacattggtatcccttccctgacaaagtgttgcaaccaacacgacaggtgctatgaracctgtggcaaaagcaagaatgactgtgatgaagaattccagtattgcctctccaagatctgccgagatgtacagaaaacactaggactaactcagcatgttcagggtawggatgatctggtggcttggggatgagtgtactttttaaagttgtatcaaatgctctatgttttagtataggatttaccaatagaaatctttcacatatattatctattgtgacacagacttcaattttctgaggtgaggagctgatgattttataatctaaaatgatttatagtcacagaagcaaaaagcattaggaaaccttgggagagtaggggtgtctaaggctgagagagagaagaattcatctaccttgtgccctaaaatatatctccagtcatcatgtaagaacctaaagtagctaaagtttgaaactctgattccagttgtcttagtccatctggactgctaccatagactgggtgacttatagacaacagaaagttatttcctacagttctggaggctgggaagtccaagatcaaggcactagcagatttggtgtctgataaggactcattttctagttcgtagcagatgccttctaactgtgtcttcacttagtggagaggactagatagctctctggggcctcttttataagagcactaatcacatttaccatcttttggaacttagacacctccaaaggcctcaccttctgatttcatcactttggaggttaggatttcaacataaattctggaaagacacaaacattcagaccataccaccagtgaatttaagagtatagcacactggatttggagtaggaatttctagaagacttgtcttatgggtttctgttgggaaggtccccagatgacccccaggttcagtgatttactaggaggactcacgggactcagcatatagttgtactcactgccatgaggtattatggtgaagagatagaaagccaaactagcaaagggaaagggccctttggtgtcatttttaaaagaatgatgatactcacctcacagagttgtcataaggatgaagtgaagtatttgtggaaatacaaataaatcaccattcaaatactggtagttataagatttctctactgtcaagccaaagaacatatcatacactgaaatcagaagaggcaaggcaggaaaggaaaataacattttaagcactttcataagatactgtgctagatattttattcatgttttcatttgatgccaacaaaaacctaaagaggtaggtagtgttatccccatttttcaaggaaggaaacgatggttcagaaaacagtaacttgccccaagtgagcatttagcctgactttaaaatctgtgttctgtctattatacagtattctccaaatagtctcatattatagccctgattctaatatcctaataattcatgtcaaggaagaaatctctgctgcaggtaatcttgaattcacagcctctgtatccctttgcagcttttggctaaggtaaactagctgtaaacctgaagcatagatagatttatttcctgttttctgatttaagaagaatgtgaaaccaatcatcttgtaacctcctatttaatagtcatagcctctccacttctgtggttggttgtttcttaatggcaaagtcttttggagaactttgaaaatgttaagattttgtaatgacaagtttcttccttaacatgaatattttgaaacgaaaagtatttggataactaaaagccactctgtgctatatctctgtaagtgtaacatgttaagataatctcacctggatgtttcaggtttcttagaataagaaaagtaaataaattaccttttcatagtcttcaaaaaatttaaaaacctaactggggccgggtgcggtggctcacgcctgtaatcccagcactttgggaggccttggctggtggaccacttgagcccaggagtttgagagcagcctggccaacatggtgaaaccccatctctaacaaaaaatacaaaaattagccaggcgcctatagtcccagttactcagaaggctgaggtggaagaatcrcttgaacccaggaggcagaggttgcagtgaaccaagatcatgccactgcactccagcctgggtgacagagtgaggtgagaccttgtctcaaaaaaataaataaaataaataaataaataaataaataaataaaataaacctacctgactggggaaaaatacttttgatttatatgctcccatatccccaagtcaaattaggacattggtcaaagagattggattccgtttactttaagcctcttaactgatgtatgatcagtcctcagaagccattggccataatgaaatgttttgagatttcaatttttaaactttgtttcttccgcacataaaacattttttcttaaaatgcaaatttaagagtattatcagacaactctgttagtgattatgtttttcaaataaaaagaaagttaaaacactgattaatcagtgctattttaaaagacttttatttgtctagtttaaacaattgggccaggcatggtggcccacgcctgtaatcccagcactttgggaagacaagtcaggaggactgcctgagtccaggagtttgagaccagcctgggcaacatagtgagacctcatatctactaaaaacaaacaaacaaacaaacaaacaamcaaaaatagctgggtgtggtgttgtgtgtctgtttaaaattaaaaattaaatttaaaaaatttaaattaaaaatgagctggccatggtaatgccagctactcaggaggctgaggtggaaggattactttagcccaggatgtggagactgcagtaagctatgactgcaccatgacactccactctgggtgtcagagtgagaccctgtctcaaaaaaaaaaaaaaaaaaaaattgggttaaacagttgaatgcaaacaaaaaataagatgcatgagactaaaactggaaatctgtagatatatatgtgtgtatgtaaatatgctacaggttgtgagagtttggtgatttcatctagcatacatttcagtgctcacgagggatatgcttgttgctgtgctgtaatgtgtaacataggtgaaaagagcaatgcagttgcccaacagtaatcccattttcttgttttgcagcatgtgaaacaacagtggagctcttgtttgacagtgttatacatttaggttgtaaaccatatctggacagccaacgagccgcatgcaggtgtcattatgaagaaaaaactgatctttaaaggagatgccgacagctagtgacagatgaagatggaagaacatamcctttgacaaataactaatgtttttacaacataaaactgtcttatttttgtgaaaggattattttgagaccttaaaataatttatatcttgatgttaaaacctcaaagcaaaaaaagtgagggagatagtgaggggagggcacgcttgtcttctcaggtatcttccccagcattgctcccttacttagtatgccaaatgtcttgaccaatatcaaaaacaagtgcttgtttagcggagaattttgaaaagaggaatatataactcaattttcacaaccacatttaccaaaaaaagagatcaaatataaaattcatcataatgtctgttcaacattatcttatttggaaaatggggaaattatcacttacaagtatttgtttactatgaaattttaaatacacatttatgcctagaaggaacggactttttttttctattttaattacacataatatgtaattaaagtacaacataatatgttgtttctctgtagcccgttgagcatatgagtaagtcacatttctattaggactacttacaaggacaaggtttccatttttccagttgtaaaattggaaccatcagctgataacctcrtagggagcaaccccaggatagctaagtgttatgtaatatgcctagaaggtgatgtgaatgcgattcagaagcatagccactcccattttatgagctactcacatgacaaatgtcatcttttgctataacctttgccaagttagagaaaagatggatttaatgagataaatgaaaagatatttaacctaatatatcaaggcactatttgctgttatgctttgttatttatttcccagcacttgttccttattgtagattttttaaagactgtaaccttttactaactgtggtcttactaaaatttgtgcttgatactgcttttcaaaaagcctttaattagagccaaaaggatggaaaaggcaagatataaatgccttttatagatctcttatttacattgaaaattattaccatatgtttagagcaaatccaagaaaacttcaacagcttctgaagatgtctatgaatgttgaaaacttttcaatctcttggaatgctcagttatgttcctagaccggtctttgctgactactggttgttaacctttccctagcctgggacctcaagccatatatatcctttgggtgacccatggccaaagttattaagatgaactgactttcaaagtcagagaaggacagcatagggagaggcggttatttgtaagtcattacaggtagaacagggcagaaggaaaagtatgttctggagaaagggccatgttcctaactttggagatatgtcattgccgggaacctagtatcttccaacttgaattggtggcagctgttccagtgagacaaggcacatgtatgccttgtggctaagtgagcaaactgggtttccacttaaatgtttgggaccctcaattgattctttatttcaaacctttataaaaggtacagttttgtaagccattattaataattaatgcttatcggctgggcacagtggctcacacctataatcccagcactttgggaggctgaggcggttggatcacttgaggtcaggagtttgagaccagctggccaacatggtgaaacagcgtctctactaaaaatacaaaaatttgccgggcgtggtggcgcatgcttatagtctcagctactcaggaagctgaggtacgagaatcacttgaacccaggaggtggaggttgcagtgagctgagattgtgccactgcactgcagcctgggcaacagagcaagactctaaaaaaaaaatggtttatcaatatttactattgaaatatttgtccaggtaactttacacttacaatgaattcatggattttgttagcagcattggctttctcaaaaggacaaactcaatatcgttataaaatataattcgtgatcacaaattatacaaaaatcagtagaaacagttttttatgttcagattaaaaaaaaaaacttgggataattttagatttacagaaaagttgcaaagatacatggagagcttctgtgaccactcacccagttcccccagtgttaaccttttatttaaccatgaagcatttgtcagaagctaagtaaccagcaatggcaattactattaacggaactttgactttatttttcagattgtactagttttttaattaatgtcatttttcttttccaggatccaatctaggataccacactgaattagtcgtcatgcctaattagcctctggtctgtgatagttccacagtctttctttttcataaccttgacagttttgaggagtactggtcaggtgttttgtagaatattcctcaatttgggtttgtctgatgttttcctcatggttagagtggggttatagatttttaggaagaataccagaggtgaaggtccttctcactgcatcatgtcaggagttacatgctatcagcttgatggtgtattaactttggacacttggttaaggtagtgtgtgttggttttttgctgctgaaaattactgttattttccctttccatacttctgttctttggaaaacagtcactaagtccagtcatgggaggtggtgggtgggaaagattacattcaaccccctggaagtgggaatatccatatgtagtatttggaatttttctatatggaaaatttgtttctccctcccaccctaatttgtttacatcagtatggactcatgtatattttgtattttgggtaacacagtatttattttgttgcttaagttgtccagcttggctattaggagttctgccaggttggctactatgtccctttgatgtgcccatccttttgatttttgagcacttcttactttctggcactacaagatgctccaggttcatcttggatattccctgccccaaccctagaatccctagaatcaacccctgctccaaagagccctggttccttttgttggagaatcatacttagaaaccaagatctgggcattagatgtgcttgttgctactgggatgtcactgtttgtagcagagttgagaaatatgtatgtatattaatccatgcatatgtacacatctataattatttatgtgtgtacaaagctaaacatgagtttgtactgccgtcttcaactcaaaatttgtcccaaaattttgtggcatatgtttagattttaaagttgatattttccctattgacagaataaactcattaaaagagcaaaaaaaaaaaaaaaaaaaaaaaggcaagaactaactgtcagcagctctttgcaagaaatgtaatattgatactttaaaataatactgccttcaaatgatgcctgtctctttaaaatcttttgacatagttcttccagggacagatatggctgtatttatttcatagatggagaaactgagcacagagctgtaatgaagacagaattgagatataagggcaaaagctaattaaacgcatcctcacaggtagcctttctttcagtgaacctgtagactagtccagtaatacttattaaaattagttgttagaggctgggcatggtggttcaagcctgtaatctcagcactgtgggaggccaaggcggacagatcactcaaagtcagaagttcgagaccagcttggccaacatggcaaaaccctgtctctactaaaaatacaaaaattagttgggtgtggtggcacatgcctgtaatcccagccactcgggaggtgaaggcacaagaattggttgaacctgggaagcagaggttgcagtgagctgagattgcactgctgcactccagcataggcgtcagaataagactctgtcttggaaagaagaaaaaaaattgttagcctaaaaccaactctctctaaatttaaaagagtgattatttatcttagtatttatagaagtatgagattatcagaaggtgcgatgcacaatgctcattattttatcctagtacaagacacgtataacatctaacagtaaagaagatggaatctttctataaaaacaattctgttattaatagttgactgacttcagtaactttgaggagtagaatgaaacttattaggcaagatctttccacatacactacattgtattgttcaaaattcatagaaattacttgcaatatattgatttaagccttatgtagtgactgttgctatatttgaagtagcatttttagtttgctgtttttcctcactgcttaatcctacaaaaaccagccatctgcctaaaaaataaaagagcaaaaatgaatcagtgcaaccggtatacgaaaaataataattattaataaaactgtaaagggatcactagtgtcatcttttatatatgtcacaatgatgttagactttttgcctcaggcttacttattcagtttccataacatccttcaaaaatctccttgttgacaacttgacaaacatttctctgttggctttcaagttttaagtatagcaatcagaatcatcatagaaattaatatttctatgaattctgtaagaaaaaatattaaacaccaaaatcagtgaccaaaatttttaagttgtagaattatctctgaacttaactttattccctatatttcattcctatgataggtgacaagccaagaccttcagttttaataagttccacttttatttatattttaaaataatatattgcctttgaataatgcctatctccttaaaatcttttggcacatttcttccagggacagagatggctgtttatttcataaaggagacattgagcacagagaagctgtaatgaagacacgattgagatatgagggcaaaccagtttcaataagtcacttttatggaaaactattcagatataggaagaatcaagtcatcctgtcagttaacttagtgtatctgaattttaatggatttgctgtgggaatatttttctttgagagggaagagagtgcttggtaggattccagtctatgttggtggttctcaaacatgagcatgcgtgagactcactggcaggcttgttaaaacacactgctggaccccacccccagagtttctgattcagtaggtctggggtagacaggagaatttgcatttctaacaagttctcagatgatgatactgctggttcatagaccacagcttgggaagtagtttaggtaatcttcagtgctgaaaataactaatgtactgaaagcttgctgtgggttcagtactttcataggagtttgcaatttactgtctcaaaaactctggaatagatttggacctcattttacaacaaagagtttgaagctatgagaggttaagttgcattacctgtcacatatctaacagcaaataaaatggggaagccgtgagtagaacctgggcagcctgtttcccagtcccaggcactcagccattttattgtggctagctgttgctttaagaggctaaaattatacatttgtaattctgaaataagtacccaagaaaatgttctgtatttatgtttttagacaaaatcctgatcagtggtgaataaggggaaaaaaaggtagacaaaatattgttttaaaatacttaaccacatagactatagtagtaatgttgagataataagatacttatggagaaaaaatgacaaattccttccatctgctcttttcagataagtagaacgtcagccaactggagttccactcttgtcgagggaatgttttcaggactcagagaccctgaaagtgaggccaaaggactggaagttctggtggtcagataactcattcagactggataaaagccagagtgtaaatgtgaaaaccctgaattgtagtcaatggctaaatattgagccacatgcaaggcaactggggtaggtaatgaggaaaccaaaaaatgccactgctgtttccaacgagtacaacaagatggtaataaccaatattcattgagctcttcacatggcaggcagtattctgagtccttcacagtcacttaacccaatcatcacaaccaccatacaagggaaatatggaaattccatgtctttgttgcaggataagttactaagacagtgatttctgaaatattttatgcatacaatgaacagtaaatggtttgagtaaaaacccttctttgatttcgtactctaatgacatcaagacttgaaccacaggcacatgtagaagttaccaaattagattttttctctcccaaataatagtatgagatgagttccttatacttatttcttaagtattcattatacttattttaatatattagaagtggtgccttaacacattttaatttttttcccactctaaggttgcttacttttaaaattacaaggtccagaggaattacaaaagataaagccaccgtttcatcaaatctgaaagcattgtcaaagtaaattttttacaatagccaaccacccaaggaggagctaaattaaatccaacattgagcaccccatggcaccttgttggcacactgtttggctgctatttttggggtaggacaacatgctctccccaggaaacaccattatctagagaccctcatcattctgtgaatttctgcatggttctgtccctgaattagctctacctatgaaagccagatttgaaaaatccaggagaagccaggtgtcgtggctcatgcccgtaatcccaacattctgggaggccaaggtgggcagataccaggtcgggagtttgataccagcctgaccaacatggagaaaccccatctctactaaaaatacaaaattagccaggcatggtagtgcacgcctgtaatcctagctacttgggaggccaaggcaggagaatcgcttgaacccgggcggcagaggttgcggtgagctgagatcatgccattgcactccagcctgggcaacaacagctaaactgtctcaaaaaaaaaaaaaaaaaatccaggagttacctccagtttactttggcccaagtttcatatacaaagaacatttaaaataagttactgcaagtcctacaaagtaacttgcactggggaaaggactacacatgaaacaggaacatatatgccaccccctatgggatacctcagagggatttcgagtttggttccagaccaccaataaaagagtcacacaaattttctggtttcccagtgcatatgaaagtttttcatactaaagtgtagtctgttaagtgtgcaataacatgtctaaaaaaataatgtatataccttaattttaaaatattgctaaaagatgctagggatcatctgagccttcagcgagttataaatgttggtgtggggtattgttgagggctgctgactgattagggtggtagttgctgaaggctgggatgactggcaatctcttaaaataaggcaataaggaagtttgcttcatttttttgtttgttttgagatggagtctcgttctgtcactcaggctggagtgcagtggcatgatcttggctcactgcaacctctgcctcctggttcaagtgattcttgtgcctcagcctcctgagtagctgggattacaggtgcctgccaccgtgcccggctaatttttgttatttttagtagagacagggttttgccatgttggccagtctgggctcgaactcctggcctcccaaagtcctgggattacaggcatgagccactgcacctggccatccattgattgttccattcactaaagatttccctgtagcatgtgatgctgtttggtagcattttatccacagaccttctttcaaaattggggtcaatccccccaaaccctgccactgctttgtcaactaataccctgaatcctttgttgtcatttaaacacaattcacagcatattcaccaggagtagattctatctcaataaaccactttctttgctcatccgtaaaaagcatctcctcatctatcaaagttttatcatgagatggcaacaatgcagccacattttcaggccccacttccaattctatttgtcttgctacttctgccacatctacagtgacttccctcactgaagtcttgaacccctcaacatcagtgatgaggattggaattaacttctttcaaactcctgttaatgtggagatatatgcatatacctatgtataatgtatgtgtgtgtgtatatgtgtgtgtgtatatatatatatatatatatatatatatatatatatataaaatggataggtatgttgtcctgcctgtaaaataccacccagtgtgccaattgaaatatatataatttttaaatatttatatatgtattttatatatattatatatatatatatatatatatatatatattttttttttttttttttttttttttttaaagagtgtcttactctgtcacccagactggagtgcagtggcacagtcagctgactgcagcctcaaacttgggctcaaataatcctgccatcttagtgtcctgagttgctgggaatacaggcatgtgccaccactcttggctaattaaaaaaaaaaaaaaattgtagagacagggtcttgcattgttgcctaggctggtctcaaaactcctggcctcaagcaatccaccttggcctcccaaagtgctgggtttacaggcatgagccactgtggctgatacatgtacttttaatttttcgtttttctttttttccccctctagtctctagttacataccgtaagtggatattttgacctcccatgaatcacaaatgttcttaatggcatctcgaatgatgaatcctttccagaagattttcaatttactttgctcagaactatcagaggaatcatgatgacagctatagccttatgaaatgtattttgtaaataagacttgaaagtcaaaatttctccttgatccctgggcttcagaatggatgttgtgttagcaagcacgataacagcatcagtctctgtacatctctatcagaactcttggatgaccaggtgtattgtcaatgaggagtaatattttgaaaggaacctttcttctgagcactagagctcaacagtgggctttaaatattctctaagccatgctgtaaatagatgtgctgtcactaactagcctttgttggtccatttatagatcatatttagcataattcttaagggcactaggattttcagaatggtaaaggaatgttggctttaaagtcatcagttgtattagcccctaacaagagcatcagcctgttctttgaagctttgaagacaggcattgacttctctctagctatgaaagtcttagatggaatct

SEQ ID NO: 94917 - DNA, 18466 bp, Homo sapiens
  misc_feature (1)...(18466): n = A,T,C or G
aggcatgtgccaccatgcctagctaatttttgtatttttggtagaaaccatgttgcctaggctggtcttgaactcctggactcaagcaatctgcccacactggcctcccaaaagtgctgggattacaggtgtgagccaccgcatccggccaggatttttgtcctgtgctgtctttcccatagttaaaaaagtgcatccaggatatgttgaatgaatatatgttgaatgaatgagtgagcattagggtctcaagcttccattccatatctgccccccaacacattcacacatacttacatgcccacctgcttatacgaggccactgctaatgggggtatgccaaagaccaaaaatttggtgttttaaaattgttttttattttcttcattatagagacagggtctcactatgttgcccaggctcatctctaactcctgggttcaagcaatcctccctcctcagcctcccaaaatgctgagattacaggtatgagccatcatgcccagctaaaaatttggtgtttgaaagaatcctggctaaaaaattagctgggcgtggtggcatgcacctgtagtcccagctactcgggaagctgaggtaggaggatcattgagcccaggaggctgaggctgcagtgagccaggatcatgccactgcactccagcccaggtgacagaataaggccctgtctccaaaaaaaaaaaaaaaaaaaaaaaagctcctgaaagagcatctcattgaatctgaaagagcatctcattgaatggccctcattttattcaggaaaaaactgaggctcagacaagggcctgatgccatctgagtagggctgaagctgcatccaggtccttgactttcagcacagaccccaggtcctcttggggttcccgtacctatctctcacccacacacagggttcctggtagctcccagctcctggtatccccctgtgtgcccccctttctgcacctgaagtgggttactggatatgccaaatgcaggcctggaagggatccttggctcagattggaaagctaccttccagccccacagcccaggggccagagggtcgggggaggcaggacagcttctcccccaagctggggtggatgaggggcataggggagcctcggggccccttcaggatcacagcatgtcaaggttggaagggacctcagtgagtacctcctactctccccagcccccaccatcacatcatacagatgaggaagcagccgagacagggagggatttgcacaaatcacacgggggcagggacgtatcctaccacagctcccgacttcccgctctaggcttcttgctgttctaagcccttcagaaagttccaacgagttctgacttttggcaagggggtgggagggtgactgaaaactactcaatacgagtcgaaagagtgtatgtcagctgggggcagtggctcacacctgcccctggctgatataaaaggcagacatggttcctggccttgtgaggtagacacactagtggagaagacagatatgaaacatatgaaaaaaagcttatgtgtcccttctcttctgcctagggtcctcaaggtcatagaaccccataaccccattaggtgtcaggggcagaaacaggactgtgtgaagattcacagcctccacctcccttgccttcacggagcttcggcatctacccttattccaggcggctgctcaggtaatgagtatgaggcagaggtgggaaggctgtcctggtttacacgtggtgggggaggggtccagagcgcaggatgaggctgagagcatggggacaactgtcaagcagggacagatgggactgtgggtggagggctggaagttggatgtttctctcagcactgtgctaagagtgacttagagacatctcagctgcatttggctcacgctgatttatttatttgtttgtttgcttatttttccatgccctttgtcaacaggaatggtttacagatatttattcattcattcattttttgagacagaatctcactctgttgcccaggctggagtgcagtggcgcgatcttggctcactgcaacctccacctcccaggttctagcgattctcctgcctcagcctcctgagtagctgggattacaggcacgtgccaccatgcctggctaatttttgtattattagtagagatggggtttcaccatgtcggccaggctggtcttaaactcctggcctcaggtgatccacttgccccggcctcccaaagtgctgggattacaggcgtgagccatagcgctcggcctacttttttttttttttttttttttttttttttttttttgagaaagggtctggctctcttacccaggctgcagtgcagtggcgctatctcagctcactgcaatctccacctcctgggctcaagtgatccaccagccttggtctcccacagtgctgggattaagcatgagccgccgcgcccggctggtttacacatttttaaatgtaacacctatttattcattatttactgagtgccagaccctgtgtgaggtacatacagcaacaaacaaaacagacatggatgctgggtgtggtggctcacgcctgtaatcctagcactttgggaggctaaggcaggaggatcgcctgagcccaggagttcaactccagcctgggcaacagaaggagaccttgtctctaacaaacatttaaaaaattagctggctgtagtggcatgcgccagtagccctagttactcgggaggttgaggtggaaggatcgcttgagcctgggaagttgaggctgcagtgatctatgatcgtgccactacactccagcctgggtgacaaagcaagaacccatcttaacaaacaaaacaaaacagaacaaacaaaacaaagccaaggccgggtgcagtggctcacgcctgtaatcccagcactttggaaggctgagacgggcagatcagttgaggtcaggagtttgagaccagcctggccaacatggcaaaaccccatctctaataaaaatacaagaattagccgggcgtggtggcacacacctgtattcccaggtacttgggaggctgaggcacaagaattgcttgaaccccagaggcggaggttacagtgagccgagatcgcgccactgccctccagcctgggcgacagagcaagactctgtcttcagaaaaaacaaaaaaccaaaaaccagacatggttcctgcccttgtgaggcagacacactagtgaggaagacagatgttaaacaggcaaacacacgcatgaaataacgtgataagtgctgtggctaaaacagggtctagctagagtgtaatgggatgctggtgggggcagaaaagacggcactgagcctggaggaagagaagcaccgccacgttagaaggggtaagacgatgccaagtggtggggacagctaaggatgtgctaaaatccccaggtggaaaaggaagtggagggttcagggagcccacagggttggcatggctgtgcaggtgatcaaggggaggccacaggtggagaaatgggtggcggcggctcctgcaggttcagggcagagtttggattttatggcaaccactggagtgtgcaaacacgggagaggcatgacacaatggacattttaggagggtcactttgctgctgtatggagagtggcctggagggggcagggtggaggcaggagaccactgagagctgttacagtcatccaggtgagaggatggtggcctaggccttggagatggaagaggagggcaaagttgccacctgttaagttgccacctgtttgggaagcagagtggtcaggacttaactgaaagactgtgtaggggtgagggcgagcatgaggtcaaggatgactccagcatactgagccggatgcccagggacaggggcactatttccatggatcccccgggaaggggaagggaagagtaacctcctcccccaaggctccacggaaggggcaagggctggtgacgaggggagcagaagggaaggagagggagaaacaaagtgtatgcatgtatccaaatgtgtacaattattatgtatcaattcaactcatttgaaagtgggtctggagagcaagggtggcagagataaatatatcttctgcactaccacaggacctgaggggcaaggcacgggcaggccctgcaggaatacagggatgccctgggcccttccaagaactaccagagccttggtactgtggggagagtaggggtcagtgagtttctccaggactcccttacattttacacacgtggacccggaagcccaggggaaggggaataccttccagctgatgcatccccacctggcacacagtctggtttttttttttgagatggagtctcactctgttgccaggctagagtgcagtggcgcgatctcggctcactgcaacctccgcctccgggttcaagcaattctcctgcctcagcctccagagtagctgggactacaggcgcgtgacaacatgcccggctactttttgtacttttagtagagacggggtttcaccatgttggccagaatggtctggatctcttgacctcgtgatccgcccgcctcggcctcccaaagtggtaggattacaggcgtaagccaccgtacccggccagtctggggtcttttaaaaatacagacccggggctgggcgcggtggcccatgcctgtaatcccagcactttgggagaccgaggcgggcggatcacttgaggtcaggagttcgagaccagcctggccaacatggtgaaacccgtctctactaaaagtacaaaaattagccaggcgttgtggcaggcgcctgtaatcccagctacttgggaggctgaagcaggagaatcgcttgaacctgggaggcgtgatcgtgccactgtactccagcctgggcgacagagcgaggctctatctcaaaacaaacaaacaaaaaaaccccacacacacacacaaaaaacaaaaaacaggccggtgcagtagctcactccactttgagaggccaaggcggaaagacagcttgaaccccacagttgagaccggcctgggcaacatggcaagactccgtctctacccaaaaaaaaaaaaaaaaaaaaaaggccgggcgtggtgggtgtgcctgtggtcccagatactcaggagactgagatgggaggatcccttgagcccaggagttccaggcggcagtgagccgtgttcgcgccactgcactccagcctgggtgacagagcaagaatatgtctcaaaaaacaaacaaacaaaaaaaggcacataaccacgatctaccctcgtaaaacgtttccagagcgtcccagcggtgcccctcatcatctggcggcccctacgcctctctgagactcacagacctactcccctctccagggggcggagcccacaccgctgagcatttactcttgttcttccctctgccaggggcaccgttctacccctttctgcctggagaaactgccgtttttccttaaaggatcctcgaagccggaaggagcagccacctcccactcccggctgctgcaagcaagctgctttgacttctttctagagttggggattgctgctggagtccgagtctcaggcccagagtgggtgcgatggtcttgcttgcaccctgtatcccccggcagacgcccgggaactctactaagtgggtgaccccagagagctcgcccccacactccgactccgagtccagcactcggtccactgcacagggacctcgcgccccacagctgcgtcctctctgaccttcgcaatccggtgcgcggcccgcggaacgccccgatctccaggggcacggaaggccgaggcgtgccgggggagccaggagcagctggctggcgggcgccgcgggcctccccggtcacgtgacaccccggacaacgtgcgccgtcacgtgacggcagagcctgtgagcgtttttctcacgtgacggaggcgcctgcacgtggaccaatggggaggcgggggcgggggcggggccggcaggggcggtgcgcgggaagggaccccggacccggaggtcgcggagagctgggcagtgttggccgctggcggagcgctggggcagcatgaagtgcctggtcacgggcggcaacgtgaagggtgagtgcaggtcggcctggcagcggcggtgcagcagccgcggagccgccagcctaacycccttccgctcttctccccgcagtgctcggcaaggccgtccactccctgtcccgcatcggggacgagctctacctggaacccttggaggacggggtgaggggctagggtgtggggggcgggtgggactccagccgggagcgggtaacccggactagagtctcgcccccactaggcgggatgaccgctggcagatttgtcggcaaagtttcagtttcttagtctggcggctgtcatcttcccaggccggtgtgtgaattgaggaaagctgtcctgcgagctcccagggggtgacgtgcacttagagaaactcggggaaggcctgggtgtgcgacccctcctctgcggcagcagcgccggggccgactctgaaggcttccatggggaaaggagggtttttcagcaggtggtggcggagcgggaggacgatagggcaagtgtgtgagcagaagcagccagagggctgggtctgtggctgccccctgaccacgtccctctccctgctcttcgtkgcccagctctccctccggacggtgaactcctcccgctctgcctatgcctgctttctctttgccccgctcttcttccagcaataccaggcagccacccctggtcaggacctgcwgcgctgtaagatcctgatgaaggtgaggcccttccctcagcagtggcactactycaccccaggaatctccaccagctgtgcctctgcccyrgggtactcagtagatgctaagtggggagagagacacgtgcaagcccaatccatgcaaaacacagggagggccatggtaaaagcatcacagcggggacctgagagggtggtgacgctcaagttcgtcaagaaaggtaagcacgtcttttggccgggcgcggtggctcacgcctgtaatcccagcactttgggaggccgaggcaggcggatcacgaggtcaggagttcgagaccagcctggccaacatggcgaaaccccgtctctactaaaaatacaaaaattagctgggcgtggtggcacgcgcctgtaatcccagctactcgggaggctgaggcaggagaattgcttgaatccgggaggtggaggttgcagtgagctgagatcgcaccactgcactccagcctgggtgacagagcgagactccatctcaaaaaaaaaaaaaaaaaaggtaagcaggtctttcaaggcattccaagcataaggaagagcatgaatgaggcctagaaggatgccagtgcccgaggtgacgtgggagcccttttcccagagttacatgctgggcccatgatgggtgtgggcctgcatgggacaggagagcttgttgcagagatntgatgctaggctgaggtgtcttatcccntgcagtctttcctgtctgtcttccgctcactggcgatgctggagaagacggtggaaaaatgctgcatckccctgaatggccggagcagccgcctggtggtccagctgcattgcaagttcggtgagtgggcagccggccagccaaggggtgcctcagcagggaggtcggcgaggcccactgagaccctatcgcccatccaggggtgcggaagactcacaacctgtccttccaggactgtgagtccctgcaggccgtcttcgacccagcctcgtgcccccacatgctccgcgccccagcacggtgagcacacccctgccctcagctcagccccgggtctctctcttccttctttggggccccaaggggttgattttagaaggtacctctttcattttccctacagagtttctgtgaacctcaaagacatcccatggcccgctatgtgctcaggtccttacctggctctttaaaggcagacggtggcatggaggaggggcaggcgcctccttgctccattctccttactgttaggagcctgcattctccatcccaaaggtctgacttgactttctggctgctcaaacccattccaactcctcctctagggagcacatttctggcctgccaccaaatctcttgtctggcttgagtaaccttgaaggtctgcccataacctgtggctcagaggctcagaccccttctcyggcctgggcatccttccagaggtgttccccattcaacggcagcctcttttcctgactgcccaggatcgaggagtccccaaggccagggcaggaggctggagggaggctgaataatcagctatggggtggagctgttctgggcagtccgagcactgggggctgtctggggccagggaaatggggactccagttgaagcaaacgtccctggcgaggaccagctcagagaggagtgggctctccccctgctccatgctggtcactgcttgcattcaagtggcccaaggtcctgctcatttctcagggtgactgaagatccctttgggtcctgacatctgtttccccaggttcttttgagccagcactgctcagagctcttttgggtagtgagagacgggggccaattccttggtctgcatttagggtggtgtcttttttttttttttttgagacagagtttcgctcttgttgcccaggcaatggcacgatctcggctcaccacaacctccgcctcccgataaaagtgattctcctgcctcagcctcccgagtagctgggattacaggcatgcgccaccatgcccggctaattttttgtatttttagtagagacagggtttctccatgttggtcaggctggtcttgaactcccgacctcaggtgatctgcccgtctcagcctcccaaagtactgggattacaggcgtcagccaccacactcagtctctttttttaaaaatgagcaattgtttctctcgttttgttttgagatagagtctcgctctgtcacccaggctggagtgcagtggtgcaatcttggctcactgcaatctctgcctcccgggttcaagcgattctcctgcctcagcctcccgagtagctgggattacaggcatgcaccaccacgcccggctaatttatatatktttagtagagacgaggtttcaccatgttggccaagctggtctcgaactcctgaactcaagtgatccactgcttcggcctcccaaagtgctgggattacaggcatgagccactgtttttttttaaatccttgcgcaggggccttgctcatcttttgcatgcttcagttttagtgtatgtgctgccgaagcaagcactctgtctcatgaataatttcaaatatatgtaaaagcagacgcagctcccgtccccacttgacttgaaacaatttccagatgtgatttcatctgtatgtcaatgggtatccttagaggataaggatttcagggctctttctgaaggccgggtttgtagggtggcctgagtgccacgtcctgcctctgggccctctccctggtctgcatggtcaggtgccgcctgccaggtttgagcaaccactgcaaccagtcccctccctgccaccttctctgggcctcatccacggtgcgctaggcctgcgcacatccgtgcgtgtgcatgtgtcacccccacctcaggtcctccgagagcaaagccctgggcagggccaggcatttcgggtaatgctccaccctgttcacagggttctgggggaggctgttctgcccttctctcctgcactggctgaagtgacgctgggcattggccgtggccgcagggtcatcctgcgcagctaccacgaggaggaggcaggtgagggggctggacgtggcctgggacagcagagtggcaggtgggagagggncggggcccaggttactcctgttcttccccaacagacagcactgccaargccatggtgactgagatgtgccttggagaggargatttccagcagctgcaggcccaggaaggggtggccatcactttctgcctcaaggaattccgggtgaggttcctcccaggcgctcgccgtcctgtcctccctgcccagctcarcccagcccggggcctcacctgctacctctttcctcccaggggctcctgagctttgcagagtcagcaaacttgaatcttagcattcrttttgatgctccaggcaggtagttcccagccttgggacagggaagggctctgggatggcaggagctgaatgggatgacctagcttgggccccctcccctgcccaggcccgccatcttcaccatcaaggactctttgctggayggccactttgtcttggccacactctcagacaccgactcgcactcccaggacctgggctccccagagcgtcaccagccagtgcctcagctccaggctcacaggtgagggcacctccccccaactcctccyctctccatgtctgtgcactccagcctgagactgcaactcctagcttctgcacctccccgcaatgtgttctctcccgccccttctctttctatcaggccccagcccctaaccctatagtgctcacagctgccagccctgcagactcagccttctcggttagctgtactcagagacccctcccacccagggaagcatccccaaggccctgccagcttccttctctggctgaggcckcccctctgagcctcctcccaggccaaggagggaaagggctgctgggaggcaggagctgcctgggctgggggaagcaggtggctggaagggcaggtgggctggggaggatggcccagtgcactttcagcacaggaagttggggctggcccccagcccagcctgtccctgggctcctgtgctttccagctcctgtcccctgggaaggtgggggcttgggctccatgtggcccagttcataagacttgctgctcctccctcctagctgagctaaggtagcccccgggatgcctccctcaggcccctacctgaattctgatcaaagagattcctggcccaccccctccaggaagtcaccacttaayccctgcatcctctcctctccagccaaaycaggaagtcataaaaccaagagatctccagtggtcgggggccccagagctcccttcgagccctccaaggtggggccctgcctctgctcccccagtcccctccctgatactccgattctgcctacagcacaccccacccggacgactttgccaatgacgacattgactcttacatgatcgccatggaaaccactataggcaatgagggctcgcgggtgctgccctccatttccctttcacctggcccccagccccccaagagccccggyccccactccgaggaggaagatgaggctgagcccagtacagtgcctgggactcccccacccaagaaggtagggactggaggtggaggcaggggtgggaggtarggaagggagcagcctccagaactcacttgttctctttccagttccgctcactgttcttcggctccwtcctggcccctgtacgctccccccagggccccagccctgtgctggcggaagacagygagggtgaaggctgaaccaagaacctgaagcctgtacccagaggccttggactagacraagccccagccagtggcagaactgggtctctcagccctggggatcagaaaggtgggcttgctggagctgagctgtttcactgcctctcgcaggccccagctggctgtcactgtaaagctgtcccacagcggtcgggcctgggccgttatctccccacaacccccagccaatcaggactttccagacttggccctgaactactgacgttcctacctcttatttctcattgagcctcaggctatactccagctggccaaggctggaaacctgtctccctcaggctcaccttcctaaggaaaatgtcatagtaggtgctgctggcccctggtgatccagcttctctgccaatcatgacctgttccttcctgaagtcctgggcatgcatctgggacccccgtggagctgacaagttttccttgctttcctgatactctttggcgctgacttggaattctaagagccttggacccgagtgtgtggctagggttgccctggctggggcccggtgccgagactcccaagcggctctgtgcagaagagctgccaggcagtgtcttagatgtgagacggaggccatggcgagaatccagctttgacctttattcaagagaccagatgggttgccccaggatccggctgccagccctgaggccaagcacggctggagacccacgacctggcctgccrttgccctgagctgcagcctcggccccaggatcctgctcacagtcaccgcaggtgcaggcaggaagcagccctgggggactggacgctgctattgattcattaaaaaaagaaaagaaaaatacaccaaggctccatgttccccgtgacaggtgggcctgaggggtcggggtgacccccccccagcatggcagcatgatttctgtacaatcaatccatcatctggggcacagggtggtgtgcgggggctatttcttggctttggcggaattgcggggtggggtgatgggtcggcctccagggttcaggccactgaactgcccgtacttccccttgttcttgtcggcgggcttgaggatctaaaagagacagtgttggtcaggctcatggggctgagccacagggcctagcggctcctttcttccccacactcacctggaaagagcacatgagggtctcgtccacactcatcatggcgccagcattgtcaaactcgccacagtagttgggagctgagaaaagtgtcaccagctgccgcttggcaaagaactcgtagccgtcttctaccacctgggcgaggatgggagcagtcagtcccgagcgcaggcacggccctccccttcccctgccgcaggccggagccaccagcccacctggtgtgctcggcagatgaggtccaagtcgtgcttgtggaggaacttggccaccacctcggctccaaaggtaaaagagacgccacggtcgttctcgccccagccctgcacgtccttgtcagggtcagaccacagcaggtcacacagcaggccctggtcaggcacatctgtgggccgcatgatccgccgaatctgctccatagactgcaggtccggggacaggcctggggggccgggggaaggtcacttcctcaaacaaggacatcctccctccaggaagccttggccaatgaaccccacctttcccaccaccctcctggtcccgccactggtctcctgggcgcctagacaggcagaagtcatccccttcccctcagctttttcaagttcccaaacaggcacaaaggcatccctgccctcaggagcacagagctcccgggagaaaggagacaagcccactccatgtaggacacacatcaaggaagtgagtgcagcccagcacagtggggtatgggggacacttcctggaaggagtgacttcccagatgagacctaaggagagctgccgggtgctgagggatgcggccagtgctcctcctccccagccatcccctccctcacctccgtggcagcagaagatcttttcgtccactatggccgcgatgggcaggcagttgaagcagtcagtgaaggttttccacagtttgatgttgtagcgtctcttgcctgcccagggggaggtggctgtgaggtgcctgcctaccccaccctcagccagggtccctgggctattcagccgtggctgggaggagagagtcaggcaccgatgcaaaccaccccccacccctgccacctgtcagccttccaggagcaattctagttactttttattttaattaaagaagacaggatctggccaggcgcagtggctaagacctgtaatcccagcactttgggaggccgaggcgggcggatcacctgaggtcagaagttcgagaccagcctgaccaacatggagaaacctcgtctctactaaaatacaaaaaaatcagccaggcgtggtggcgcatgcctgtaatcccagctacttgggaggctgaggcaggagaatcgcttgaacccaggagacggaggttgtggtgagccgagatcacaccattgcactctagcctgggcaacaagagtgaaactccgtctcaaaaaagtaaagaaacagggtcttgctctgtcacccaggctggagtgcagtggcaagatcatagctcactgtaacttggagcttctgggtccaagggatcttcccgcctcggcctcctgccagaagtaattctaaagcacccgagtccactggaaactaagttccaatctggaccagcctcagggttggcactcctcgcatgcccccacccatgagccgggccaagtccaggtctggtttatctcagcttctggacagcagagcccatctgcaaacatcctaagtgcttagtagcaaatgtagggggagtgtcaccaggcagggccctgggggaaagcactagaatccgggcagcccttcagtcagcaaccattccccagaccccatgccaggaggggcagggcaggcacgagaacggacctgggccccgccttcgtggagcgcacagtctatcaagtgtctgtcagatatcaggccaatgtgaaggtcccactgaatggcaaagagtgcggttcaggacccgggcagccccagacgctcagaccactcacactcatcgtagaaaccatagatgcggttgatgctggcacactcgtggttcccacggagcaggaagaagttctcggggtacttgatcttataggccagcagcaggcagatggtctccaaggactgcttgcccctgtccacatagtcccccagaaagaggtagttgctctcgggagggaaaccgccatactcaaatagtcgcagaaggtcgtagtactggccgtgtatgtcacctgtgacccagggaaccgggtaagctagatgcaaggtctagacctgaacccagggccaggactgcgctcaagggaggagggctccaggaactctgtggggtccagtgccacttttaggaaggcaaggggacctgggccgggggctcaccgcagatcttgaggggtgcctccagctccagaagaatgggctggctcagaaaaatctcccgggatttcaggcacagaccgcggatctcgttctctgtcagctgtacattcttgccaggccgcgagccctgcactggggcgcaatggggtgtcaggaccctggaccctgacaggaggagggtgggcgacacgggtggccccatggatacctccgggggcgcctaggcctcctcggcccctccttgcccacaggcagctgttgctgctgagcctcccgggaccgcggcctcaagcctcccaggggaagcccccagctaccctcagcgcctcgggaggcgactgtcgtgcgcagggggctgccaccaaaaacctcacagcgcaggaccccttcctggaccgggcttcccgggtttctccctcgccccaagagcccaggcaacccgtgcgcccccagcccgggagagggggggagctgctccgcgcgtcggagctggccccggacctctcaggcgcgtccgcgggggggcagctgcggccacggaacctcgctgcccgtccccgcccagtctaagctggccccgggggcccgccccgcgccactttccgggccgggcacggggccatggtccggcggactcgggcctccctcgccccgaccaagcttccagcaagcgcccgatgattgagtccaggttgagcttctcgctgttggacatggcggccccgccgcctccatcccatctgctcctggcccgcccctgcttcccgccctccggtagcctctttccggcctggctctccttccgcccgccccatttcccccctggcctgcggcctcctctcctagcttcccggggcctccccctcccctttccccgccctcttttcgcccccctttggatcttatggccgggggccnnnnnnnnnnnnnnnnnnnnnnnnnnnnnnnnnnnnnnnnnnnnnnnnnnnnnnnnnnnnnnnnnnnnnnnnnnnnnnnnnnnnnnnnnnnnnnnnnnnnnnnnnnnnnnnnnnnnnnnnnnnnnnnnnnnnnnnnnnnnncacaagatctagaaggagaaggagacctaagaaattctagacagatatacagtgtaacacatacagaacgatatgcaagggaggaaggaaagatgatagaaggagagaaaaaagagataaagaataaataaaaacagcagaggaaaagaaggcgaaaatagaaaaaaaaaagcataagaaagaaaaattattcaaaaaatgataaaaaatagaccaaaggaagacccaaaggagaggataaagaaagaataccgaagaacataagaaaaagtagaaaataaacacaaggacaaagaatacaacttgaagaaaataaaagacaagaagaaagaaaagtgaaaaaaaaaataataaatataaacaaagagaaaaggaaaagagagtagaagatagacccaaaaaaaaaaaacgaaaaaaggacagagaagaacaaagacgaaaaacagataaaaaaaaaaccaagacaaataaaaaagaaccaaaaaaagcataacaaacaaaaaaagagacaacccagaacaaaattgaagaacaaaaccagaaagagaaaaaaaaagaaaagagacagaaaaaaaaaacagtaaaagaaaaaaaaaaacacaggtgatcacaaaaaaggaagaaaccaagacggacaaataaaaaaaagacagaagatagagacacaccaaagccaacatggtgaaaccccatctctctaaaaatacaaaaagttagctgggcatgatgggagcctcctgtaatcccagctacttgggaggctgaggcaggagaatcgcttgaacctgggaagtggagcccaggcgacagtgcgagactgtctcaaaaaaaaaaaaaaaaaaaagaagagcagacgataaatgaaccttaattcttgttggaaccctgagttggtgctttacatgccagtaacctcagaactggaagtgggcctgccgtggtggctcaggcctgtaattccagcactttgggaggctaaggcgggatggtctcttgcgtccagcctgggcaacacagcgaaaccctgtctcaacaaaaaatacaaaaattagctgggcatggtggtgcgcgcctgcagtcccagctactgtggaggctgacgcaggaggatctcttgagaccaggaggtggaggttgcagtgagcccagatcgtgccattacactccagcctgggtgacagagcaagaccctgtctcaagaaacaaacatgaagtccaggcgcagtggctcatgcctgcaatcccagcactttgggaggctgaggtggatggatcacctgaggtcaagagtttgaccaatgtggcaaaaaccctgtctctactaaaaatacaaaaattagccgggcatggtggtgcttgtctgtagtccctgctacttggggggctgaggcaggagaatcacttgaatccgggaggtggaggttgcagtgagctgagaccgcgccactgcactccagcctgggcaacagagcgagactctgtctcaaaagaaacaaacaaaagaactggaggtggcccggcccctgcgtctaacagtcctgggccctccacaccagcacaggaactcaagcctgcagtcactggggccatggggaaggtgggaggagcccacagctcaggggcactggggcaggcaggaagagcctcagagaggaaggggtgacaccccccacccttgggaggggcccccagcggttgccaaagctgtgtgaggaggaggaggaagtgagaggaggaggtgaggtgctgcgggaggtgagctgggctggtggggacaggggcagggcttggggctgggtctccggacagaggcctggcttttctgtcagggcagggcctagcccctgcccccataaaagaggagacatagggggcttggtgagataccctgaaacctcccccctctgaccccgcagccaggccccaggctggccgggagtggcccctcacactggttctccccactttctctgcctgtggcatcgaaggccccgggcaccatggcccaggccctgggggaggacctggtgcagcctcccgagctgcaggatgactccagctccttggggtccgactcagagctcagcgggcctggcccatatcgccaggccgaccgctatggattcattgggggcagctcagcagagccagggtaagggggcagggtgagggctggcggaatgctgggacagaggacagggggctgagggctgaattctggagggaggccgggagggtctggtggtagggattgggagggggactcagccagtagcacccctctgcagg

SEQ ID NO: 94918 - DNA, 14977 bp, Homo sapiens
tctttatcgcttgattcgttgaagagctgttctgctaactgcatctttccgggctttcaggaaagcaggcaggacactggccgccagccctggagagtcagtgcagaggtgagggtttgtctatctggatgacaaggtgactttcagatgcagtctgaaggaatgtgactgtcagcggggtccgaggctgtccccaccatccccgaagcaccgtcaacactggcatcctggcaccgagtggacacaccctggaaaaggctcactgccacccatgggccctgctccagcaaggacagaagatgaactgggcttccagttactctggggggtttagggaggatgactctgagtgctaagccactaaatgcagccccagttagtcaggtttggctgggacaccacaaatgatgtgggcaaaggcctggagcactggccatccagcccccacgccggtagctgtctctggaaaagtgttggactgaagcccaagcctgcttccgtgccctgctgagctgggcagtcaaccccggcttagcttttgctgccctgacggagccccagcccttggtcaggctgcacatggcagcttggtgggcacagggtagccgtggatcaagaccaagaaagggacagaggccaagggctttcccagcttcagtccacctgctcgggacaactggtgctccaagcaccaagtagagctcccagccctgagatgagcgtcctcaactcctttcagggaagcatgaacccatgcctgtggcccacccatccctgcgcctgggctcagtgaggccactggggcaccttcaccttggataagagttcagaactttgaagattaagctggaccagatctgctcatcctcacagtacatttcaggagcatctcaatggctcccaccctggcctggaaccctcctgtgctgccgagatatcagggaggcgctgggtactgcaaggggaagatggcattgctatggagccactcttggtgaaggtcgaatgggtgacattggaagtctagcttttcctgaggctggggtctggaccttggtctagatcaggggtcagcaaatttttcttgaaaatgtagacagaaaatatcttaagctggccgggcacggtggctcacacctgtaatcccagcactttgggaggctgaggcaggcggatcacaaggtcaggagatcgagaccatcctggctaacacagtgaaaccccgtctctactaaaaatacaaaaaattagccgggtgtggtggcgggcgcctgtagtcccagctactctggaggctgaggaaggagaatggcgtgaacccgggaggtggagcttgcagtgagccaagatcgtgccactgcactccagcctgggcgacagagccagactccatctcaaaaaaaaaaaaagaaaaaagaaaatatcttaagctttgaggaccacatagtctctgttgcaatcactcatttgggccactgtagcacaaaaacaaacatagataacacacacatgagtgagcatggctggggcccaataaaactttatttacacaagcaggtgatgaaccacggtccatagtgtcccaatccttgatttagatggtgaactatcatgagctttcgttgccctctccggtagaaatatgggagaaaccacagagagaaacagagatttcaggaaaacagtaaaattaaacaaataaagtgagaygtmgcccctcctggaggctgcaggctgtgttgaacctgtgtgtgtctgggtgtacagggatgtgagtagatgcgcgtggagatgtgtgtgtgggtggagactgagcgtggctggaggtggctgtggtaggatgccagaaggaaggagtttgcattcagttcctttattagtactctctggagttgttgaggggatgtcactgctgaacactgaccctggtgcaggctaaaccgaagttagcctctgctaccctctgctgggtgaggcactggggagaacagtgggactgaatggggcgggctttctccctcccacacttcccctggaaacacccagcaccagcacattagaacatggggagccaccttccccagcgctgcttcccaaggttcggaaggggaaactctgacctcaagctctgtttgaagagcgatagcaaaggggagaggttggctgtggtttggtggtgcttatctccttcctttgctttgaaaccacaggctggcatactacccgagagaatgaccagtgccaccaagggaagggcacaagctcactggttccaggggagacatctcaggggacaggaacatcccctgacgctgaatgagtgcagcacacagacggagaatacacacaagagaaatcatgaggacatgagagaaggcactggcaataggaagttacaaaaagcaacaaaaagaaagagtagatataaaaacaataatcgaagaaagccaacaacagatgggatgaatcatacgaggtatgcgactcatggatgaagaggtgagtgatgagatcagctggggaactctctcccaggaaagacaaaccagaagaaacacaaatgacatcgaagtggccaggcgcagtggctcacgcctgtaatcccagcactttgggagcccgaggcaggtggatcacttgaggtcaggagtttgagaccagcctggccaacatgatgaaaccctgtctctactaaaaatacaaaaattagccaggtgtggtggcaggcacctgtgatcccagctactcaggaggctgaggcaggagaatcacttgaaccaggaagcagagattgcagtgagctgagatggtgccagtgcactccagcctgggcagtagagtgacagcctgtctaaaaaaaaaaaaaggcagtaaagtgataggaggatagattagaagggccattttccagatagtgcaaggaagaaagaagaagaagaagaggaggaggaggaggaagaggaagaagacggagaagagggcatctcagaagaaacaatggagatacatttctcaaaactgaagaaagatgaccaacctcagaccgaagggccaagaggccaaaccagagagacagcttggcaagccaggaagagcaccaaagctagacaattagagtgaaattaaagaaaacccaaggtgacaaaaatttaaaaagcttccttgtgacctcagtccattggtgaaaatttaaaaaaaaaaaaaaaaaaaaaaggacagcctgggcaacatggtgaaaccccatctctacaaaaaatacaaaaattagctgggtgtggtggcacatgcctgtagtcccagctattcgagaggctaagtaaggcaggaggatcacttggggccaagagttccagaccagctgcggcaacatacrtgttgtgggaagtcaggcaccccgaacggagggactggctgaagccatggcagaagaacataaattgtgaagatttcatggacatttatcacttccccaatcaatactcttgcgatttcctatgcctgtctttactttaatctcttaatcctgtcatcttcgtaaactgaggatgtatgtcgccttaggaccctgtgatgactgcgttaactgcacaaattgtttgtagaggacaattgttgtgtgtttgagcaatgtgaaatctgggcatcttaagaacaggataacagcaattttcagggaacaagggagataaccttaaagtctggctgcctgtgggctgggcaggacagagccatacttctcttattaccgcaaacaggtaagagaaatatcgctgaattctttccccagtaaggaatattaataattaacagccctgagaaaagaatgcattcccagggccgggccactgaaatggcctccctgagagtgcctgcctttattcagaagtagaaagggatgaaacacgccctagtctcctgcagcacccccagacttgataggattaggaaattccagcctggcaaattctagtcagaccggttctctgctcttgaaccctgacagtgcgtgcacagtgggacctggaagttcattagtgattctagtttcgccgtgaccttctgccctgtgatcttttgtcgcccttgaagtatgtgatctctgtgacccacaccctgttcgtgcactccctcctctttgaaaattgctaataaaaactcgctggttttacggctcagggggcatcacggaacctgcggacatgtgatgtctcccctggacacccggctttaaaatgtctctcttttgtactctttccctttatttctcaggccagccgacacttagggaaaataggaaaggacccacgtgaaatattgggggctgaatttcccccgataataagtctcttaaaaaagacttttaaatgaaatttctttgttttttaacttttatttctgttttgggggtacatgtgaaggtttgttacataagtaaactcgtgtcttcggtgtttgttgtacagaatatttcatcacccaggtattatgccgagtacccaatagttctcttttctgctcctctccttcctcccatcctgcaccctggagtcaaccacagtgtctgttgtttccttgtttgtgttataagttctcatcatttagctcccacttacaagtgagaacatccagtatttggatttctgttcctgcattagtttgctaaggataatagcctctagctccatccatgttcccacaaaagacatgatctagttctttttaatggctgcattaaatgaagttttaaagatacaacataaacaccaacctcttccccaccacaaaaatcccttgctgaatttgattacacttaaattaacgagttttgtttcatgaaagactccttggacaaacttgacagttgatggaataggagaagctgtctgtcatgtctaaagccaacaagagatcaatatctagaataaatggagatctgcaaatcaacagaaagtaggcagcaaagccaaagaaaatagcctaaggcacagccactaaaaggaacgtgatcatgtcctttgcagggacatgggtggagctggaagccgttagcctcagcaaactcacacaggaacagaaaaccagcgagaccgcatggtctcacttataagtgggagctgaacaatgagaacacatggtcacatggcggcgatcaacacacactggtgcctgttgagcggggtgctggggagggagagtaccaggaagaatagctaagggatactgggcttaatacctgggtgatgggatgatctgtacagcaaaccatcatggcgcacacacctatgtaacaaacctgcacatcctctacatgtaccccagaacttcaaataaaagttggacggccaggcgtggtggctcacgcctgtaatcccagcactttgggaagccgaggcgtgcagatcacctaaggtcaggagttcgagaccagcccggccaacatggtgaaaccccgtctctactaaaaatacaaaaatcagccagatgtggcacgcacctataattccacctactcgggaggctgaagcagaattgcttgaacccgagaggcggaggttgcagtgagccgccgagatcgcgccactgcactccagcctgggccacagcgtgagactacgtcataaaataaaataaaataacacaaaataaaataaaataaaataaaataaaataaaataaaataaaataaaataaaataaaataaaataaaataaaataaaataaagcaatttcctttcctctaagcggcctccacccctctcccctgccctgtgaagcgggtgtgcaagctccgggatcgcagcggtcttagggaatttccccccgcgatgtcccggcgcgccagttmgctgcgcacacttcgctgcggtcctcttcctgctgtctgtttactccctaggccccgctggggacctgggaaagagggaaaggcttccccggccagctgcgcggcgactccggggactccagggcgcccctctgcggccgacgcccggggtgcagcggccgccggggctggggccggcgggagtccgcgggaccctccagaagagcggccggcgccgtgactcagcactggggcggagcggggcgggaccacccttataaggctcggaggccgcgaggccttcgctggagtttcgccgccgcagtcttcgccaccagtgagtacgcgcggcccgcgtccccggggatggggctcagagctcccagcatggggccaacccgcagcatcaggcccgggctcccggcagggctcctcgcccacctcgagacccgggacgggggcctaggggacccaggacgtccccagtgccgttagcggctttcagggggcccggagcgcctcggggagggatgggaccccgggggcggggagrgggggcagrctgcgctcaccgcgccttggcatcctcccccgggctccagcaaacttttctttgttcgctgcagtgccgccctacaccgtggtctatttcccagttcgaggtaggagcatgtgtctggcagggaagggaggcaggggctggggctgcagcccacagcccctcgcccacccggagagatccgaacccccttatccctccgtcgtgtggcttttaccccgggcctccttcctgttycccgcctctcccgccatgcctgctccccgccccagtgttgtgtgaaatcttcggaggaacctgtttmcctgttccctccctgcactcctgacccctccccgggttgctgcgaggcggagtcggcccggtccccacatctcgtacttctccctccccgcaggccgctgcgcggccctgcgcatgctgctggcagatcagggccagagctggaaggaggaggtggtgaccgtggagacgtggcaggagggctcactcaaagcctcctgcgtaagtgaccatgcccgggcaaggggagggggtgctgggccttagggggctgtgactaggatcgggggacgcccaagctcagtgcccctccctgagccatgcctcccccaacagctatabgggcagctccccaagttccaggacggagacctcaccctgtaccagtccaataccatcctgcgtcacctgggccgcacccttggtgagtcttgaamctccaagtccagggcaggcatgggcaagcctctgcccccggagcccttttgtttaaatcagctgccccgcagccctctggagtggaggaaactgagacccactgaggttacgtagtttgcccaaggtcaagcctgggtgcctgcaatccttgccctgtgccaggctgcctcccaggtgtcaggtgagctctgagcacctgctgtgtggcagtctctcatccttccacgcacatcctcttcccctcctcccaggctggggctcacagacagccccctggttggcccatccccagtgactgtgtgttgatcaggcgcccagtcacgcggcctgctcccctccacccaaccccagggctctatgggaaggaccagcaggaggcagccctggtggacatggtgaatgacggcgtggaggacctccgctgcaaatacrtctccctcatctacaccaactatgtgagcatctgcaccagggttgggcactgggggctgaacaaagaaaggggcttcttgtgccctcaccccccttacccctcaggtggcttgggctgaccccttcttgggtcagggtgcaggggctgggtcagctctgggccaggggcccaggggcctgggacaagacacaacctgcacccttattgcctgggacatcaaccagccaagtaacgggtcatgggggcgagtgcaaggacagagacctccagcaactggtggtttctgatctcctggggtggcgagggcttcctggagtagccagaggtggaggaggatttgtcgccagtttctggatggaggtgctggcacttttagctgaggaaaatatgcagacacagagcacatttggggacctgggaccagttcagcagaggcagcgtgtgtgcgcgtgcgtgtgcrtgtgtgtgcgtgtgtgtgtgtacgcttgcatttgtgtcgggtgggtaaggagatagagatgggcgggcagtaggcccaggtcccgaaggccttgaacccactrgtttggagtctcctaagggcaatgggggccattgagaagtctgaacagggctgtgtctgaatgtgaggtctagaaggatcctccagagaagccagctctaaagcttttgcaatcatctggtgagagawcccagcaaggatggacaggcagaatggaatagagatgagttggcagctgaagtggacaggatttggtactagcctggttgtggggagcaagcagaggagaatctgggactctggtgtctggcctggggcagacgggggtgtctcaggggctgggagggatgagagtaggatgatacatggtggtgtctggcaggaggygggcaaggatgactatgtgaaggcactgcccgggcaactgaagccttttgagaccctgctgtcccagaaccagggaggcaagaccttcattgtgggagaccaggtgagcatctggccccatgctgttccttcctcgccaccctctgcttccagatggacacaggtgtgagccatttgtttagcaaagcagagcagacctaggggatgggcttaggccctctgcccccaattcctccagcctgctcccgctggctgagtccctrgyccccctgccctgcagatctccttcgctgactacaacctgctggacttgctgctgatccatgaggtcctagcccctggctgcctggatgcgttccccctgctctcagcatatgtggggcgcctcagygcccggcccaagctcaaggccttcctggcctcccctgagtacgtgaacctccccatcaatggcaacgggaaacagtgagggttggggggactytgagcgggaggcagagtttgccttcctttctccaggaccaataaaatttctaagagagctactatgagcactgtgtttcctgggacggggcttaggggttctcagcctcgaggtcggtgggagggcagagcagaggactagaaaacagctcctccagcacagtcagtggcttcctggagccctcagcctggctgtgtttactgaacctcacaaactagaagaggaagaaaaaaaaagagagagagaaacaaagagaaataaccatggtcactgtcctggagcaccacacagtgtatatagaaggagaaaagtctcatagaaacatgctttctaggcacagcamgtgcctgtcagatggacagactccaggatggagggaaatgagggattctgggaaggagggatgtgaggagttccctgtcctgggggattagctgagtagctctgagcagcccaggttggtgggagggtcattctgcttggatgggggctttcctggcttcctgctgacttgtgagttttggtgcatcctaggcaagcaatgacactactgtattaggattctccagagaagctaagccagtaagatgctgtagggcaggcaaaattttatctctgtccttttagggttttttggctgggcctgagaactaaagacatgagcaagagaaaagcattcaaatttatctaggctgggcatagtggctcatgcctgtaatcccagcactttgggaggctgaggcaggtgaatcacttgaggtcaggagttcaagaccagcctgaccaacatggtgaaaccccgtctctactaaaaatacaaaaattagccaggtgtggtggcggttacctgtagtccctgctacttgggaggctgaggcatgagaatcgctctctctctcctgccaccttgtaaagatgtgcctgcttccccttcaccttccaccctgattgtaagtttcctgaggcttcccagtcatgcttcctgttaagcctgcaaaactgtgagtcaattaaacctcttttcttcataaattactcagtctctgataggtctttgtagcagtgtgagaatggactaatacactgtttttgttttgttttgttttgttttgtttttgagatggagtctcactctggtgcctaggctggagtatagtggtgtaatctctgctcactgtaacctctgcctctcagactcaagcaattctcctgcctcagcctcctgagtagctgggattacaggtgcccaccaccgcgcctggctaatttttgtatttttagtagagatgggctttcatcatgttggccaggctggtttcggacttttaacctcacgtgatccactcgccttgggctcccaaagtgctgggattacaggcgtgagccaccgcacccagcctaatacgctatattaatcagaaactgccaactaacctctaacttgggacttttcactctaaccagtcaaaattgttttctttgtctggcttctgcaaaatgattaagtttcacttcccctctaatagaagcactagctgctttggtcttgtgctatcttaatttatgtgtcactgaatgctcaaataaactctttagaatgtaaatgggcttaagtttatcttctagcagatctgatgtcagaggtaggatccttcagaaggacatcagaaggatctgaaggatttctccccatcctgggcccagtgatggtctccaggagcaatgagcaaacaggtgtaggcatttcactgagccccctgcacgctgcttcctgcagcatatttgaaggtcatcactggtaagtcccactcagatactgtattagtcccttctcacactgctataaagaactacctgagactgggtaatttataaagaaaagaggctaagccaggtgtggtggctcatacctgtaatcccaacactttggttttttttctggttgttgttgttgttgttttttgagtcagagtctcactctgtcgcccaggctggagtgcagtggcacaatctcagctcactgcaacctccactttctgggttcaagtgattctcctgcctctgcctcccaagtagctaggattacaggcacatgccaccatgcctggctaatttttgtatttttagtagagacagggtttcaccatgttggccaggctggtgtcaaaactcctgatctcaggtgatccactcgcctcggcctctcaaagtgctgggattacaggcgtaagccactgcacccagccaatcccagcacttcaggaggctgaggcgagcagatcacttgaggtcaggagttggagaccagcctggccaacatggtgaaaaccccatttctactaaaaatatttaaaaaatcagctgggcatggtggcacgtgcctgtaatcacagctactcgggaggctgaggtaggagaatcccttgaacccgggaggcagaggctgcagtgagctgagatgacgcctctgcactccagcctgggtgacagaagattgattgactcacagttctgcatggctggggaggcctcaggaaacctacaatcgtggcagaaggcgaatgggaagcaaggcacatcttacatggtggcaggggaggtaaggggggaagttccacatccttttataccaacagagcacgtgasaactcactgtcacgagaatagcaagggggaaattcgcccccatgatcctatcacctcccactaagtccctccctcaccacgtggagattacaattcaagatgagatttgggtggggacacagccaaaccatatcacatacaaactccagaacttaaatcgagttctctgagttgagccgatctggactgggtttggaagttgtggtagaagtttaacgcatcctgtagggaggcttcaggtatctgactgggtcagacagaaactgaaatggttttagtgaaagacctctaataggtaaggttccaggaaaacaaacaattctgggctcatttaaatccagggggtctgggactccatcgcaggacttgtgctcttctagagagatgattgaatcttaccaaaaataatttagaattttggtggccacagtggggaagttttaacctaaataaaactgctcatctccagaatgcattgaaaaaaaagaggggggatcccaaacaccccagaaataatgggttgtatttttggttggcaagcagagggttctaagttctccatctttctcactagcctcctctgaatctgctgacttctttgcttggttaccttcccaccttgacgatgcaatgaaaaaaaacccagctagataagttatacaagttaggctgtcaaatcaaccatgtctgcttctttacccttatgccatagttaaaatcttaagctcagagcaataataaaaggtatccctgtccggcatagaaaatgctttgtctgccctatttgttaatgggctccaccctgacctcagtaatctagttacacatatgttgacaggacctgaggaagctcaaaattggatgcaagaggcagaatggtattgctctgaggacaatatccaaggtccacaagcccctacttggtccatatataggccagaagaaacccaaacttttgaccgggtgcagtggctcacgcctgtaatcccagcactttgggaggccgaggagggtggatcacgaggtcaggaggtcaagaccatcctggctaacatggtgaaaccctgtctctactaaaaatacaaaaaaattagccgggtgtggtggcaggcacctgtagtcccagctgcttgggaggctgaggcaggagaatggcgtgaacctgggaggtggagcttacagtgagccgagattgcaccactgcactccagcctgggtgacaaagcgagactccgtctcaaaaaaaaaatcgatgcctgatagcattttaatttatcagttagtctggaaactacacgagaagaaagaacaaaatacccttaaacaactacccccggcagggagactcattttcctgtctctcctggcctgatacgttttgcatagctcgcattcttcacactgctctaagctacttttctttctcatttccctcttttgatagatatttttctcttctgaaagcattgatgatcgacattttttttatgcatatgatttttgttcactgtcacgtaagattcaggaatcaatgtgttagatgcaagtttgtcccatgtcactgggaaggcttattcccaggccatctgtcctacttcagagagaaagaggagaggtacctatggttaaagaatttagtgaaggtgccgggcacggtggctcacgcctgtaatcccagcactttgggaggccgaggcgggtggatcacctgaggtcgggagttcgagaccagcctggccaacatggtgaaacccgtctctactaaaaatacaaacattacccgggcgtggtggtgcacgcttataatcccagctactcaggaggctgaggcaggagaatcgcttgaacctgggaagcagaggttgcagtgagccaagatcgcaccattgcactccagcctgggcaacaagagcaagacttcatttcaaaaaaaaaaaaaaaaaaaaagaatttagtgaagtctcaaggtcaaattgattagaaccacagagggacaaagcaatgggaactcagtcgagccatccgcttacaaaggagccgtgacatgtgagagcatttctaagcatctagctatcatgattttattttttgttgttgacttaagacatctagaaatgcaaagcataatcaatttaagaataaaaactactggccgggcacagttgctcacacctgtaatcccagcactttgggaggctgaggtgggaggctgagttgggcagatcacttgaggttaggagttcgagaccagcctggccaacatggtgaaacctgtctctactaaaaacacaaaaattagccaggtgtggtggcagacacctgtaatcccagctactcaggaggccgaggcaggagattcgcttgaaccctggaggcggagcttgcagtgagctgagatggcgccactgcactccagcctaggcgacaagagtgaaactgtatcaaaaaaaaaatatgatgcaaataaagacagttattaacaaaacaagttgaaatccagatctgaaaagtgttcttatttgtgaaggtaacaaatcaaatagatcatgtaatggggttggctttttgacagcttgcagccatttagccttttgagtgatccttccaaaccgagtttccacttctcatccaggtttgaagaacaaggtgactggttgtggtcagcttcggtgggagatctctggtgatgaaagatgtccactcaggtgggctgcctttttaaagtgaaaaaaaaaatgagaatccatgagtcaatgcccctgatgttagctgcacaaagactggttaacagtacgtgacatgatcccttccaacatggttggagggagtattttatttgatgatgtttccaataaacaaaatctccaggttggaagctgtgatctttgatgtctgtctccagggagattgctttttaaaagaattcttcattaattaaatttttttttaattgagaagctttataaaggccctggcaatcatgaagtatagcatttttaagaagagctagctcatagacttctgcattcaggcacatggccttcctgttatttcaaagaaagaaagccgatgttgttgaaatggggtagagtgtgaattaagcaataccaatgggagactcttaggccagagaagtttcaagtttctataagcttggccaggcacggtggctcacacctgtaatcccagcactttgggaggccgaggcagacggatcacctgaggccgggagttcgataccagcctggccaacatggcgaaacccgtctctactaaaaagtacaaaaattagctgggcatggtggtgggtgcctgtaatcccagctactcaggaggctgaggcaggagaattgcttgaacctgggaggcggaggttgcagtgagctgagatcgcgccactgccctctagcctgagcgacaag

SEQ ID NO: 94919 - DNA, 16343 bp, Homo sapiens
  misc_feature (1)...(16343): n = A,T,C or G
ctaaggctggttggaaggtgaccgcatggatagcgacttggacacctgtggccagaactctaagtcagccagtggtcctccgctgtgcggagggcaggaagccggctgagcacacgacaggcattcagtatgcacagtatgcatatgctgactgatttctaccacgttttaaggtgcaacctccagacctcacatatagaacagaatgcaggtgggttaccgatggcagtatcaaggcagagtcccaaagacacagggagtccagcttggctctgctccgactcccctcctgttcttggcctggcccccagcctccacctctctggcttcatggctccaagccctccctgcttcgtagactgtagcctggcccctggggacagtggcctctctggccccaggcctccacagccacccctgtgagtcctcctcctgcacagagcagccagaaggagcttaaatgcagccatcgcccctgcactcccctgacactccctgtcacatcccttgttttattttcttcatgacacttctgacaatctataaatatcttgtgaatttggttactgtcgccacccatccccacccccgccagaattgaaggtctcgatcacttgattcccagctgcagatccacgtctggagccagtgagcacccagcaggtgcctgcgggctctggggaggaacgcctcctactgtccctgagaagctcaggcctccatgtgctgtgatcaccctgctcctgccccatctgcctcctctggaagcctccctggcccagctctgcaccaggcggtgcctgggtgatgggtgatgggtgatgtagcgccaggcaccaggccatcaccttcggyacacccagtcctgtgatttgaggctcaaaaagggaaccctggagctggtgagctacctccccacccacaccccaaggctcctgccccagccactggctgccccactcaccctcactgaggaaggcatcccagacacgcagcactgtggggaagggcagggagcgggcgaagaggcacaggaaccactcgggcaggtacagcaggggtccgacgcccacctgctgcaggtgcttgtgcacgtgcggaagcagccgccgcagcagggccatgaacacctcggcgtccagccgcacagcctcctgtggccacgtccatcagcaggccagcaccgccacccccagagcccaggctcaacctccctcagtccccagacccccacccactcaccgggcccctgcccctccttcctccagcccccatgtcagcctctcaccatgtggggcccgtagtacccagggaggtagacctcacagatctgcaccaggcaccagaaggcctcctggggaaggggcagggcacaggcctgtaagtgctcaccaaggaagggaccgtggaggagaaggcaggacaggggaaaggagtgaaggggagggcctgggcaccacaggggcctgcactcagggccactcctaacctgcgcagttcctggaagcccttcccaaaagccccctcctctgcccaagacagggtctgctgaggggtttagggtgttggaaatcacagggctcatggtgttagatttgaaggtcacagggttggggttcactggccaagggttgggagtgtcccaaagttcaagtcctgggtttctgggtctttggggttggggtcgcagtccccaagttcagaatcaggagtcgtggggtcaaggtgataacatccagattcctagatgactggggtcaaggctggggtcaagggtcccaggttcctggagtcaaggtcattaggcttgaaggtcactgaggctggcagtcatgaggacctgggtcactaggacagggtccaggaatcaaggattgcaggtttctgaggccacagttcctggggatggggttccctgggcctaggtcactagggttcccagagcagggtcaaggtcactcacctctgggggcaggtgcatgagcagcacagcagccacgggcccctgggcctggcagtagccctgctccggtcgatacagggtgtaggccttgagcacctgcaggagcccctgctgcctgtgccggaagaccccataaggggccagtcctgcaggcacccccttctccaccctctgggggcctctgcccaggcctcagcctccctgggccttcctgggtcccctgagatgcaagactgtagagctgggctagggaaagtgggctggagcacctggggcttgtggggctgggggtccctgggcatcaccggcctcgtacccgtggccctgaggcgacacaaacatctcgtgcagagggaattgacggtgcaggtccctgccaatggtctccatccactgtgggtctccaggggcctctgccagctcctgtgggtagccaggaaggtgggtgtgagggttcagtgtggtgaggggctctgggtaggggaattggggcccctgcccactccctcacctgataggtgccagggctgttcttctggcacacatgggccccacacaacaggggccagcatcgggcrcgcagggcagacgggatgcctttccggcactgcatctttacctgtgggtgaggccaagggctccactaggcagcctccatagctcctgctggcaggccccaggcacagctcatcagcaggcaggggcccactttgggtggcagggagcaaaggccggaggtgctgggacacagggtgggtacattttgccaagatgtgggctgaggcagagaggaatgagccatggaagccaagtggggcccctgcccccctcmccttcttgtaccgccgggacatggttttctcccagtgcgaggtcatctccacccacttcatctcccgttggcggatgaggtctgcaggtgggtggcccggcctgggggtgcatggcacaggtatccagacgctgggcagctgttacccaaggcccacactgccaccctccaggctacccaggtgaacccagctcctggccctagggatctctgggagccctgtggggtgacctgtgacccaggagctgccaatgcttgtcacggggacaggaaaggatgtggctccgacgtgggcagaagcaggagactgaaggggtgagtgggtgtgtattgggggagggactggttggctgtcacccaggacagggacacagacaattcataggggaagctggctggagagagccctggactggaagcccagagtcctgagtttgagtctgggtctgtgtctgatctgtgtgacctggggcaagtttctgtctatatctggacttgtgtttctgtctgtagcttggggaaagggggaaggaggaggtatgggttctgtgatttggatctgggattcctgagccagaggttcaaaggggaaggatgttctgccccagtagtgggtgcaaaccctcggaggctgggggtaagagacgtacagaggcctccccggacccttcccaccttagggttccacctggcacctgcagaggggtgctactggctgagtccccctcccaatccctaccaccagaccctcccggcctccctccagaattcagccctcagccccctgtcctctgtcccagcattccgccagccctcaccctgcccccttaccctggctctgctgagctgcccccaatgaatccatagcggtcggcctggcgatatgggccaggcccgctgagctctgagtcggaccccaargagctggagtcatcctgcagctcgggaggctgcaccaggtcctcccccagggcctgggccatggtgcccggggccttcgatgccacaggcagagaaagtggggagaaccagtgtgaggggccactcccggccagcctggggcctggctgcggggtcagaggggggaggtttcagggtatctcaccaagccccctatgtctcctcttttatgggggcaggggctaggccctgccctgacagaaaagccaggcctctgtccggagacccagccccaagccctgcccctgtccccaccagcccagctcacctcccgcagcacctcacctcctcctctcacttcctcctcctcctcacacagctttggcaaccgctgggggcccctcccaagggtggggggtgtcaccccttcctctctgaggctcttcctgcctgccccagtgcccctgagctgtgggctcctcccaccttccccatggccccagtgactgcaggcttgagttcctgtgctggtgtggagggcccaggactgttagacgcaggggccgggccacctccagttcttttgtttgtttcttttgagacagagtctcgctctgttgcccaggctggagtgcagtggcgcggtctcagctcactgcaacctccacctcccggattcaagtgattctcctgcctcagccccccaagtagcagggactacagacaagcaccaccatgcccggctaatttttgtatttttagtagagacagggtttttgccacattggtcaaactcttgacctcaggtgatccatccacctcagcctcccaaagtgctgggattgcaggcatgagccactgcgcctggacttcatgtttgtttcttgagacagggtcttgctctgtcacccaggctggagtgtaatggcacgatctgggctcactgcaacctccacctcctggtctcaagagatcctcctgcgtcagcctccacagtagctgggactgcaggcgcgcaccaccatgcccagctaatttttgtattttttgttgagacagggtttcgctgtgttgcccaggctggacgcaagagaccatcccgccttagcctcccaaagtgctggaattacaggcctgagccaccacggcaggcccacttccagttctgaggttactggcatgtaaagcaccaactcagggttccaacaagaattaaggttcatttatcgtctgctcttcttttttttttttttttttttgagacagtctcgcactgtcgcctgggctccacttcccaggttcaagcgattctcctgcctcagcctcccaagtagctgggattacaggaggctcccatcatgcccagctaactttttgtatttttagagagatggggtttcaccatgttggctttggtgtgtctctatcttctgtcttttttttatttgtccgtcttggtttcttccttttttgtgatcacctgtgtttttttttttcttttactgttttttttttctgtctcttttctttttttttctctttctggttttgttcttcaattttgttctgggttgtctctttttttgtttgttatgctttttttggttcttttttatttgtcttggttttttttttatctgtttttcgtctttgttcttctctgtccttttttcgttttttttttttgggtctatcttctactctcttttccttttctctttgtttatatttattattttttttttcacttttctttcttcttgtcttttattttcttcaagttgtattctttgtccttgtgtttattttctactttttcttatgttcttcggtattctttctttatcctctcctttgggtcttcctttggtctattttttatcattttttgaataatttttctttcttatgcttttttttttctattttcgccttcttttcctctgctgtttttatttattctttatctcttttttctctccttctatcatctttccttcctcccttgcatatcgttctgtatgtgttacactgtatatctgtctagaatttcttaggtctccttctccttctagatcttgtgnnnnnnnnnnnnnnnnnnnnnnnnnnnnnnnnnnnnnnnnnnnnnnnnnnnnnnnnnnnnnnnnnnnnnnnnnnnnnnnnnnnnnnnnnnnnnnnnnnnnnnnnnnnnnnnnnnnnnnnnnnnnnnnnnnnnnnnnnnnnnggcccccggccataagatccaaaggggggcgaaaagagggcggggaaaggggagggggaggccccgggaagctaggagaggaggccgcaggccaggggggaaatggggcgggcggaaggagagccaggccggaaagaggctaccggagggcgggaagcaggggcgggccaggagcagatgggatggaggcggcggggccgccatgtccaacagcgagaagctcaacctggactcaatcatcgggcgcttgctggaagcttggtcggggcgagggaggcccgagtccgccggaccatggccccgtgcccggcccggaaagtggcgcggggcgggcccccggggccagcttagactgggcggggacgggcagcgaggttccgtggccgcagctgcccccccgcggacgcgcctgagaggtccggggccagctccgacgcgcggagcagctccccccctctcccgggctgggggcgcacgggttgcctgggctcttggggcgagggagaaacccgggaagcccggtccaggaaggggtcctgcgctgtgaggtttttggtggcagccccctgcgcacgacagtcgcctcccgaggcgctgagggtagctgggggcttcccctgggaggcttgaggccgcggtcccgggaggctcagcagcaacagctgcctgtgggcaaggaggggccgaggaggcctaggcgcccccggaggtatccatggggccacccgtgtcgcccaccctcctcctgtcagggtccagggtcctgacaccccattgcgccccagtgcagggctcgcggcctggcaagaatgtacagctgacagagaacgagatccgcggtctgtgcctgaaatcccgggagatttttctgagccagcccattcttctggagctggaggcacccctcaagatctgcggtgagcccccggcccaggtccccttgccttcctaaaagtggcactggaccccacagagttcctggagccctcctcccttgagcgcagtcctggccctgggttcaggtctagaccttgcatctagcttacccggttccctgggtcacaggtgacatacacggccagtactacgaccttctgcgactatttgagtatggcggtttccctcccgagagcaactacctctttctgggggactatgtggacaggggcaagcagtccttggagaccatctgcctgctgctggcctataagatcaagtaccccgagaacttcttcctgctccgtgggaaccacgagtgtgccagcatcaaccgcatctatggtttctacgatgagtgtgagtggtctgagcgtctggggctgcccgggtcctgaaccgcactctttgccattcagtgggaccttcacattggcctgatatctgacagacacttgatagactgtgcgctccacgaaggcggggcccaggtccgttctcgtgcctgccctgcccctcctggcatggggtctggggaatggttgctgactgaagggctgcccggattctagtgctttcccccagggccctgcctggtgacactccccctacatttgctactaagcacttaggatgtttgcagatgggctctgctgtccagaagctgagataaaccagacctggacttggcccggctcatgggtgggggcatgcgaggagtgccaaccctgaggctggtccagattggaacttagtttccagtggactcgggtgctttagaattacttctggcaggaggccgaggcgggaagatcccttggacccagaagctccaagttacagtgagctatgatcttgccactgcactccagcctgggtgacagagcaagaccctgtttctttacttttttgagacggagtttcactcttgttgcccaggctagagtgcaatggtgtgatctcggctcaccacaacctccgtctcctgggttcaagcgattctcctgcctcagcctcccaagtagctgggattacaggcatgcgccaccacgcctggctgatttttttgtattttagtagagacgaggtttctccatgttggtcaggctggtctcgaacttctgacctcaggtgatccgcccgcctcggcctcccaaagtgctgggattacaggtcttagccactgcgcctggccagatcctgtcttctttaattaaaataaaaagtaactagaattgctcctggaaggctgacaggtggcaggggtggggggtggtttgcatcggtgcctgactctctcctcccagccacggctgaatagcccagggaccctggctgagggtggggtaggcaggcacctcacagccacctccccstgggcaggcaagagacgctacaacatcaaactgtggaaaaccttcactgactgcttcaactgcctgcccatcgcggccatagtggacgaaaagatcttctgctgccacggaggtgagggaggggatggctggggaggaggagcactggccgcatccctcngcacccggcagctctccttaggtctcatctgggaagtcactccttccaggaagtgtcccccataccccactgtgctgggctgcactcacttccttgatgtgtgtcctacatggagtgggcttgtctcctttctcccgggagctctgtgctcctgagggcagggatgcctttgtgcctgtttgggaacttgaaaaagctgaggggaaggggatgacttctgcctgtctaggcgcccaggagaccagtggcgggaccaggagggtggtgggaaaggtggggttcattggccaaggcttcctggagggaggatgtccttgtttgaggaagtgaccttccccyggccccccaggcctgtccccggacctgcagtctatggagcagattcggcggatcatgcggcccacagatgtgcctgaccagggcctgctgtgtgacctgctgtggtctgaccctgacaaggacgtgcagggctggggcgagaacgaccgtggcgtctcttttacctttggagccgaggtggtggccaagttcctccacaagcacgacttggacctcatctgccgagcacaccaggtgggctggtggctccggcctgcggcaggggaaggggagggccgtgcctgcgctcgggactgactgctcccatnctcgcccaggtggtagaagacggctaygagttctttgccaagcggcagctggtgacacttttctcagctcccaactactgtggcgagtttgacaatgctggcgccatgatgagtgtggacgagaccctcatgtgctctttccaggtgagtgtggggaagaaaggagccgctaggccctgtggctcagccccatgagcctgaccaacactgtctcttttagatcctcaagcccgccgacaagaacaaggggaagtacgggcagttcagtggcctgaaccctggaggccgacccatcaccccaccccgcaattccgccaaagccaagaaatagcccccgcacaccaccctgtgccccagatgatggattgattgtacagaaatcatgctgccatgctgggggggggtcaccccgacccctmaggcccacctgtcacggggaacatggagccttggtgtatttttcttttctttttttaatgaatcaatagcagcgtccagtcccccagggctgcttcctgcctgcacctgcggtgactgtgagcaggatcctggggccgaggctgcagctcagggcaayggcaggccaggtcgtgggtctccagccgtgcttggcctcagggctggcagccggatcctggggcaacccatctggtctcttgaataaaggtcaaagctggattctcgccatggcctccgtctcacatctaagacactgcctggcagctcttctgcacagagccgcttgggagtctcggcaccgggccccagccagggcaaccctagccacacactcgggtccaaggctcttagaattccaagtcagcgccaaagagtatcaggaaagcaaggaaaacttgtcagctccacgggggtcccagatgcatgcccaggacttcaggaaggaacaggtcatgattggcagagaagctggatcaccaggggccagcagcacctactatgacattttccttaggaaggtgagcctgagggagacaggtttccagccttggccagctggagtatagcctgaggctcaatgagaaataagaggtaggaacgtcagtagttcagggccaagtctggaaagtcctgattggctgggggttgtggggagataacggcccaggcccgaccgctgtgggacagctttacagtgacagccagctggggcctgcgagaggcagtgaaacagctcagctccagcaagcccacctttctgatccccagggctgagagacccagttctgccactggctggggcttygtctagtccaaggcctctgggtacaggcttcaggttcttggttcagccttcaccctcrctgtcttccgccagcacagggctggggccctggggggagcgtacaggggccaggawggagccgaagaacagtgagcggaactggaaagagaacaagtgagttctggaggctgctcccttccctacctcccacccctgcctccacctccagtccctaccttcttgggtgggggagtcccaggcactgtactgggctcagcctcatcttcctcctcggagtggggrccggggctcttggggggctgggggccaggtgaaagggaaatggagggcagcacccgcgagccctcattgcctatagtggtttccatggcgatcatgtaagagtcaatgtcgtcattggcaaagtcgtccgggtggggtgtgctgtaggcagaatcggagtatcagggaggggactgggggagcagaggcagggccccaccttggagggctcgaagggagctctggggcccccgaccactggagatctcttggttttatgacttcctgrtttggctggagaggagaggatgcagggrttaagtggtgacttcctggagggggtgggccaggaatctctttgatcagaattcaggtaggggcctgagggaggcatcccgggggctaccttagctcagctaggagggaggagcagcaagtcttatgaactgggccacatggagcccaagcccccaccttcccaggggacaggagctggaaagcacaggagcccagggacaggctgggctgggggccagccccaacttcctgtgctgaaagtgcactgggccatcctccccagcccacctgcccttccagccacctgcttcccccagcccaggcagctcctgcctcccagcagccctttccctccttggcctgggaggaggctcagaggggmggcctcagccagagaaggaagctggcagggccttggggatgcttccctgggtgggaggggtctctgagtacagctaaccgagaaggctgagtctgcagggctggcagctgtgagcactatagggttaggggctggggcctgatagaaagagaaggggcgggagagaacacattgcggggaggtgcagaagctaggagttgcagtctcaggctggagtgcacagacatggagagaggaggagttggggggaggtgccctcacctgtgagcctggagctgaggcactggctggtgacgctctggggagcccaggtcctgggagtgcgagtcggtgtctgagagtgtggccaagacaaagtggccrtccagcaaagagtccttgatggtgaagatggcgggcctgggcaggggagggggcccaagctaggtcatcccattcagctcctgccatcccagagcccttccctgtcccaaggctgggaactacctgcctggagcatcaaaaygaatgctaagattcaagtttgctgactctgcaaagctcaggagcccctgggaggaaagaggtagcaggtgaggccccgggctgggctgagctgggcagggaggacaggacggcgagcgcctgggaggaacctcacccggaattccttgaggcagaaagtgatggccaccccttcctgggcctgcagctgctggaaatcytcctctccaaggcacatctcagtcaccatggcyttggcagtgctgtctgttggggaagaacaggagtaacctgggccccgmccctctcccacctgccactctgctgtcccaggccacgtccagccccctcacctgcctcctcctcgtggtagctgcgcaggatgaccctgcggccacggccaatgcccagcgtcacttcagccagtgcaggagagaagggcagaacagcctcccccagaaccctgtgaacagggtggagcattacccgaaatgcctggccctgcccagggctttgctctcggaggacctgaggtgggggtgacacatgcacacgcacggatgtgcgcaggcctagcgcaccgtggatgaggcccagagaaggtggcagggaggggactggttgcagtggttgctcaaacctggcaggcggcacctgaccatgcagaccagggagagggcccagaggcaggacgtggcactcaggccaccctacaaacccggccttcagaaagagccctgaaatccttatcctctaaggatacccattgacatacagatgaaatcacatctggaaattgtttcaagtcaagtggggacgggagctgcgtctgcttttacatatatttgaaattattcatgagacagagtgcttgcttcggcagcacatacactaaaactgaagcatgcaaaagatgagcaaggcccctgcgcaaggatttaaaaaaaaacagtggctcatgcctgtaatcccagcactttgggaggccgaagcagtggatcacttgagttcaggagttcgagaccagcttggccaacatggtgaaacctcgtctctactaaacatatataaattagccgggcgtggtggtgcatgcctgtaatcccagctactcgggaggctgaggcaggagaatcgcttgaacccgggaggcagagattgcagtgagccaagattgcaccactgcactccagcctgggtgacagagcgagactctatctcaaaacaaaacgagagaaacaattgctcatttttaaaaaaagagactgagtgtggtggctgacgcctgtaatcccagtactttgggaggctgagacgggcagatcacctgaggtcgggagttcaagaccagcctgaccaacatggagaaaccctgtctctactaaaaatacaaaaaattagccgggcatggtggcgcatgcctgtaatcccagctactcgggaggctgaggcaggagaatcacttttatcgggaggcggaggttgtggtgagccgagatcgtgccattgcctgggcaacaagagcgaaactctgtctcaaaaaaaaaaaaaaaagacaccaccctaaatgcagaccaaggaattggcccccgtctctcactacccaaaagagctctgagcagtgctggctcaaaagaacctggggaaacagatgtcaggacccaaagggatcttcagtcaccctgagaaatgagcaggaccttgggccacttgaatgcaagcagtgaccagcatggagcagggggagagcccactcctctctgagctggtcctcgccagggacgtttgcttcaactggagtccccatttccctggccccagacagcccccagtgctcggactgcccagaacagctccaccccatagctgattattcagcctccctccagcctcctgccctggccttggggactcctcgatcctgggcagtcaggaaaagaggctgccgttgaatggggaacacctctggaaggatgcccaggccggagaaggggtctgagcctctgagccacaggttatgggcagaccttcaaggttactcaagccagacaagagatttggtggcaggccagaaatgtgctccctagaggaggagttggaatgggtttgagcagccagaaagtcaagtcagacctttgggatggagaatgcaggctcctaacagtaaggagaatggagcaaggaggcgcctgcccctcctccatgccaccgtctgcctttaaagagccaggtaaggacctgagcacatagcgggccatgggatgtctttgaggttcacagaaactctgtagggaaaatgaaagaggtaccttctaaaatcaaccccttggggccccaaagaaggaagagagagacccggggctgagctgagggcaggggtgtgctcaccgtgctggggcgcggagcatgtgggggcacgaggctgggtcgaagacggcctgcagggactcacagtcctggaaggacaggttgtgagtcttccgcacccctggatgggcgatagggtctcagtgggcctcgccgacctccctgctgaggcaccccttggctggccggctgcccactcaccgaacttgcaatgcagctggaccaccaggcggctgctccggccattcagggmgatgcagcatttttccaccgtcttctccagcatcgccagtgagcggaagacagacaggaaagactgcatgggataagacacctcagcctagcatcacatctctgcaacaagctctcctgtcccatgcaggcccacacccatcatgggcccagcatgtaactctgggaaaagggctcccacgtcacctcgggcactggcatccttctaggcctcattcatgctcttccttatgcttggaatgccttgaaagacctgcttaccttttttttttttttttttgagatggagtctcgctctgtcacccaggctggagtgcagtggtgcgatctcagctcactgcaacctccacctcccggattcaagcaattctcctgcctcagcctcccgagtagctgggattacaggcgcgtgccaccacgcccagctaatttttgtatttttagtagagacggggtttcgccatgttggccaggctggtctcgaactcctgacctcgtgatccgcctgcctcggcctcccaaagtgctgggattacaggcgtgagccaccgcgcccggccaaaagacgtgcttacctttcttgacgaacttgagcgtcaccaccctctcaggtccccgctgtgatgcttttaccatggccctccctgtgttttgcatggattgggcttgcacgtgtctctctccccacttagcatctactgagtaccccagggcagaggcacagctggtggagattcctggggtggagtagtgccactgctgagggaagggcctcaccttcatcaggatcttacagcgcwgcaggtcctgaccaggggtggctgcctggtattgctggaagaagagcggggcaaagagaaagcaggcataggcagagcgggaggagttcaccgtccggagggagagctgggcmacgaagagcagggagagggacgtggtcagggggcagccacagacccagccctctggctgcttctgctcacacacttgccctatcgtcctcccgctccgccaccacctgctgaaaaaccctcctttccccatggaagccttcagagtcggccccggcgctgctgccgcagaggaggggtcgcacacccaggccttccccgagtttctctaagtgcacgtcaccccctgggagctcgcaggacagctttcctcaattcacacaccggcctgggaagatgacagccgccagactaagaaactgaaactttgccgacaaatctgccagcggtcatcccgcctagtgggggcgagactctagtccgggttacccgctcccggctggagtcccacccgccccccacaccctagcccctcaccccgtcctccaagggttccaggtagagctcgtccccgatgcgggacagggagtggacggccttgccgagcactgcggggagaagagcggaagggrgttaggctggcggctccgcggctgctgcaccgccgctgccaggccgacctgcactcacccttcacgttgccgcccgtgaccaggcacttcatgctgccccagcgctccgccagcggccaacactgcccagctctccgcgacctccgggtccggggtcccttcccgcgcaccgcccctgccggccccgcccccgcccccgcctccccattggtccacgtgcaggcgcctccgtcacgtgagaaaaacgctcacaggctctgccgtcrcgtgacggcgcacgttgtccggggtgtcacgtgaccggggaggcccgcggcgcccgccagccagctgctcctggctcccccggcacgcctcggccttccgtgcccctggagatcggggcgttccgcgggccgcgcaccggattgcgaaggtcagagaggacgcagctgtggggcgcgaggtccctgtgcagtggaccgagtgctggactcggagtcggagtgtgggggcgagctctctggggtcacccacttagtagagttcccgggcgtctgccgggggatacagggtgcaagcaagaccatcgcaccc

SEQ ID NO: 94920 - DNA, 17691 bp, Homo sapiens
  misc_feature (1)...(17691): n = A,T,C or G
atcccagatagccatcaaggactatgaggagtgaaaaagaagagactagagctttcgtgttaagggacaagagcttttgtgttaagggacaaagggggtataggcaagacttcaggtgacaacagggggatgggcaaaggaccaatgcagaaacaatcgttacctagacctgatcttctgggtttccggatgtgagtttgctgcagggaggcgccagcaggaccggacccaggggactgataccggtacctggggtctgtgtatgcccaagacctccctggtcctccgtgatggaaactgcagaccatgtctaatgcatcaggatggtatatgccaaagagggaccctgagaccctggcagagtgatggagagtggccacaccaggatggcggcgcggagggtattccatggcccctgagctgggccagcagggagagaggcctgggcctgatgcgtcattcattgtgctgcttgccttaaatactttcaccttgtcctttgcgtgccccaccagccgtgactgatagactttactctttccagtttaaattcatggaaaaaaaagatttccagttcaagacagcaggatacaacctgaaacccactatgtctttctcaaacacatcaagaccagagaagaaaaactagaaaaactttttttttttttttttaagacggagtcgctctgccacccaggctggagtgcaatggcacgatctcggcccactgcaatctctgcctcccgggttcaaggaattctcctgcctcagcctcccgagtagctgggattacaggcacctgccaccatgcccggttaatgttttgtatttttagcagagacggggtttcaccatgttagccaggatggtctcgaattcctggcctcaagtgatccacccgcctcggcctcccaaagtgtcgggattataggcgtgagccaccgcacctggcctgtatttcctatttagcattctttccctgtatttcttctttactttgttttcttgtcttcagttgaattgaggtttttgtgctagtcccttctcccctactattggaagttacacattttacttttatttttagtgattactcttaaatttttagatcatacctaaatttcatgtccaagcaaaagctaatatctctatcccccttcctgaatatgaagtgaaaacaaaaacagagtatatgtccaggcgcagtggctcatgcctgtaatcccaacactttgggaggccgaggtgggcggatcacctgaggtcaggagttcgagaccagcctggccaacatggagaaaccctgtctctactaaaaaaaaaaaataaatagccgggcrcggtggcgcatgagtgagccgagagttcacgagttcgagaaaaagtaacaatttggccagattcggtggcttacgcctgttatcccagcactttgggaggctgaggtgggtggatcacctgaggtcaggagttcgagaccagcctggtcaacatggtgaaaccctgtctctactaaaaatacaaaaattagccaagtgtggtggtgtgcacctgtaatcccagctacttgggaggctgaggcaggagaatcgcttgaacccaggaggcagaggttgcagcgagctgattgcaccactgcactctggcctgggtggaaagagcgagactccatctcaataaataaatattaaaaaaaaaatcacctagaaacagtaacaggtattgtcaggatggtcataaaatgttattactttcttcttgcttttttggtatttcttcaatttcaaacacaggaaaaaaattgatgtttttcatttttcaaatataatatttgattacaatattgagtaagtccctcccttgagaagctctatgctgggggttggggaagatctgatcgtgccttactcacactgggcctgacaataggtgctcaagatagttgtatggggttgttgtaggaccaacaggtttgtatgcccatatgtatgcagtaacagaccaattacactgagatagcagggtttgcagcagagaaagagtttaatgattgcagggcaccaagtttggagatgggaggagaccttcaaatccatctccccaaggagttttggactgaattttttaaggagattgtggagggcaaggggctggaaatttgggattgttgattgcctaagcaaggggcatgaaataattgggattggaaaccgcattctttggtgagccagctcctcatggggaccagttgagtcagtagttttatcagcatgcaggatctgaaggaatacttcaaaaggaaaatttagcatttcatgttcaagttgttatttatacagcagttaagggcagctataatctagggtctttgtcactccgggacaacaggcaccaaccagccatgaggaagcaggtcagagagcagctgacctcatgatgaatactgagtatgctgcaggcttggtttattttcatcttttccccctacttcttccctaatttgtaggggtgggttgcccctacacacctgtgggtgtttctcgtaaggtgggacgagagatttggaaaagaaaaagacacagagacaaagtatagagaaagaaataaggggacccggggaaccagcgttcagcatatggaggatcccgccagcctctgagttcccttagtatttattgatcatctgtgggtgtttctcgaagagggggatgtgtcagggtcacaagacaattgtgggaagagggtcagcagacaaacacgtgaacaaaggtctttgcatcatagacaatgtaaaggattaagtgctgtgcttttagatatgcatacacataaacatctcaatgctttacaaagcagtattgctgcccgcaggtcccacctccagccctaaggcggtttttccctatctcagtagatggagcatacaatcgggttttataccgagacattccattgcccagggacaggcaggagacagatgccttcctcttgtctcaactgcaagaggcattccttcctcttttactaatcctcctcagcacagaccctttacgggtgtcgggctgggggacggtcaggtctttcccttcccacgaggccatatttcagactatcacatggggagaaaccttggacaatacctggctttcctaggcagaggtccctgcggccttccgcagtttttgtgtccctgggtacttgagattagggagtggtgatgactcttaacgagcatgctgccttcaagcatctgtttaacaaagcacatcttgcaccgcccttaatccattcaactctgagttgacacagcacatgtttcagagagcacggggttgggggtaaggtcacagaatctcaaggcagaagaatttttcttagtacataacaaaatggagtctcctatgtctacttctttctacacagacacagtaacaatctgatctctcttgcttttccccacactaattggttttataaagtttatagggacggttgtagggtggttgcagaaagcttcctgggggaggtgacgtccaaagggctcctaggaggactagggccaagttgggaggaagacagatcctctggtgcagatccagcttgtatgggcaaagccaaaggagctggaactggggaggttgacaggtggcagcacaaaggaccttgaatgccaggccaaagggtcttgagctttgttctgagggcagtggggaaccacaaaaactctcaggcaggaaaggggcaaaacgggtctgagatttataataatcccactgttccatgtttgcagagaaggggctggaggagccaagatgtgagggtgggaggccccaaggatacattgttaatttcaggtgagagatgacagggccacagccatctatcactgtgcagggaatgtttggaaggtaaagttgaccagatagacacagtggatgtggggccagtgggacagggaggagcccttgatacctcttggcttgtggcctggaggctggctggggaggctgatatacagagtgacacaggatgggatgggtgctgaggaggtgagagccaggacctgagatgctgcagagaaggctcctgggagatgacatcagagtggatctccttcttcgcttgagaagcctggcaagtaggtgctccagtgggtggggaccagtgggggatttgttgttaggagacctcaggccgagttctggcagttgtgtcatcctgggcaggccactcagcaatgctgataccctgcttctgaaaacagggctcatcattcctgaggctggagttttggaggattaaggaggtaacacatggcaagtgcttggcccagagcctggcactgaatgaacagaggatccttccctcactctccgttttccatcccccctcatgcccagcatctcctgtccccagcatccccaacctgcatctccctcagcctgtattcctttgacccagttagagacagatgaggaaggaatccacccgctgggctggctctgacctgccccccttcttctgccccaaagggagggatccgaggactcaggtctgagcccggattagctgtgtaatccccagctttgcctaggcaacctctttccctgaccaagagagggggcctgcggctggcagccaggactcctgggctctgggcctgatactactctatctgtctgggaaacctcagacagggaagagatttcttggtgcctctcttgggaatgtcactgacgtccacagtgactgtcacatgcgtgtcagttgttctgtgggtttgctgtgtgcggggcactgtggaaaggaagaaaggcctagattccagtccagctccaccactcagcagcttcatgcccacagacaaaggacaaaatccccctgagcctcagttttttcgtggacaaaatggagtgaacaccttgtggggctgctgtggggtatgtgagaaaatagctgcaaaggagttttgtaaacagcacgttttagagagatcaggaaggatgattacagcacaaaagaacagagatggttcctcaccatgaggactggaaaagagctggggagagcaggccaaaaaggtcactcttatcacgaggaccacagcagagggttccaggaaactgaaaaagacgagttcatcaggcttccaagacctcctgggaaggcaaaggacagagggacctcctcaggtcaggggaaaaccgagggagggggacagccacacaaacgccctaaagtctaatgacggcagaaaggggtcttgggggacgggggtggggttcacagcagtggcctgggcgtgatgaccctggcgaaggacggggtcgcagagcccttaaatcctggaccagtggctgattccaaaagcagcagggaccatgccaggattttgggcagaagcagaaagtgctggactctcctgacaagagctgagagaactcagcggcgccagcaagagtttgtgccgtgcactgaccatctgcatcctctctgcctcaccccagcctaggattccgtgacaggccctctgggaagaactccgcgaacaaccccctgccttggagtctgcaatccttcctcgagcacacggacgcccggggtggggaagcccacagtctggcagggctcgcactgggcagaataattgcaacgtagtcatgaggatcgggctatgacctgcctgacttttcactcctcccatgatacaccgatgcataccgcaggtgcacactaaacgccgaatctatagaaagtggaacacaccaggacccagcagaaggcgacatgcgaggtttgtttacttgtggcatcaaaggctgggagccggcgrgctaaggagggagcgaaagagcgagcggtggggacagccaccgctaaatgccagcccggtggagggaggaaggcggaccccaggccggtgggaccacatctcccagaagccccggcgccaaggcactggcctctcagtcctcccccgaggaggcggggccgctggcgaagttgaaggggcgcagcgataccggtgcgcggcgctggcgtcgggcgcgtgacgtctttcctgcgcgccacctagcgtctctatcrcgccagttcctcagcctcagtgctatgaaggtgacagcgtgaggtgacccatctggcccgccgcgatgctggcaacacggcggctgctcggctggtcgcttcccgcgcgggtatctgtgcgtttcagcggcgacacggtgaggcccagcctggctggggccacgggtgttnggggccgggtgtcgcggccgcgcccgtgcacgagcagtccctggggtctgtagtggcctctggagagcccttctccccaggccaggcgggaaggcccccgctccggcctggttgaagtargggaacgggtcccaacgcggggccgactcccttgaccctctgacttgctggcttcccttgttttacagtcctcggcctggcggaagttttgcaggttgtgaagacccctagtctttcattctctccttgtcacagmcttgtagggcgtgaaggggtcattgccccatttagggatgcgcacctcctgatttcccgtccactgctctgcgccctgaagtggctgaaaagtgctcttaaaaggatgggaatcccgtcgccctcagctggtgcgctctccactgggtcgtggggctcctcatttcatcctaagtgagcccctccatcacctgtgtgttaaggaggcatttctttcccatcagtaaacacatttcgcctcttcggccgaggtaggaatataaaaggcccctggcctacccaagttttggtccagcaggggagccaggccgggaaagggccaagcygccacactcggcttgtggggctgtgtggtgccgtgatgcagctgtgggtttggccaccgacagacctgggctcaaattggacctgctgcttttgactgtgagaccttccataagctccttttgctccaagcctcagttttctcctctgtgaaacagagaaaatcgttcctatcagagttcttatgaggatgaaatgggattttggatgtaaaatgcttccatccagtacctgctaaacaaaatgcttactaatggccgggcgcggtggctcacgcctgtaatcccagcactttgggaggctgaggcgggcggatcgcttgaggtcaggagttcgagaccagcctggccaatatggtgaaaccctgtctctactaaaagtgcaaaaattacccgggcgtggtggtgagtgcctgtaatcccagctatccagaggctgaggcacaagaattatttgaacctgggaggtggagtttgcagtgagctgagattacgccactgcactccagcctaggcaaaagagcaagagtctgtctcaaaaaaaaaaaaaatgcttactaagtggcagtggtatctatgatgctatagatgcttccctagccctagcccagcccctcctaaatagggagacccaagattctgtagcttctggcccaatccctcatggccccagagcactctgggcctcctgaccctttgtctccctagacagcacccaagaaaacctcatttggctcgctgaaggatgaagaccggattttcaccaacctgtacggccgccatgactggaggtgagacagtgcccttagtgtgttgggtcccggagcaaggtgtccccttcattgccttccctattctgtccaggctgaaaggttccctgagtygaggtgactggtacaagacaaaggagatcytgctgaaggggcccgactggwtcctgggcgagatcaagacatcgggtttgaggggccgtggaggcgctggcttccccactggcctcaagtggagcttcatgaataagccctcagatggcaggtgtgtgtgtgggggcggggcagatgtggctgtgggagagaccttgggggtggctggggtttccctgggcctttgggctctttccttagaaacttagcatgaatgaggtgggcacatgttcccaggccttaaatggatgggacttactctgtggacttccacaggggagacttatgtagcagaatcaacacatgattttgactcaggcagacttagttcaaatcctagctctgcctcctaatcatagaggtttgggcaatttcccagcctttgtgaaccttagcttcctttttgtaaataggtacagtgatatcatgcaaggattaaagagataatgttcatacagcttttggcctgtatgctggttggcacataaagcaaatgataaatgtcacctgctttacctccttttgatggtagagcttgaggaatgctctttgtcaccaagagtagaatctggctctcaggggcagacacaaggagagatgtttggatgagctgaatgaagacctttcttgtggtcatagccacccaaagacagaataggcagtgagctccctgtcattggtggtgagcaagcagagcccctgggacatgttgggagggcagtaaaggattggctgtcagaggagacatctttgaggcctccctgggtggagtggggtggcayggagttgaagacccagtcctgatsgccctgtagcctgtctgacctgtgggcccctgcaggcccaagtatctggtggtgaacgcagacgagggggagccgggcacctgcaaggaccgggagatcttacgccatgatcctcacaagctgctggaaggctgcctggtggggggccgggccatgggcgcccgcgctgcctatatctacatccgaggggaattctacaatgaggcctccaatctgcaggtgggtagggagagatgtagacagatgagaaggtgttcagtgtgcactcacacacccctcacccagcacagttgttctgaggtgttagtacctggtctgtcagtggttgaactgggggagtggtggccagtcctgcatgcatcccaaatgggacttggctcccaaagcctccttccagggctcctaatgctgctggtgtaaattttttttttttgcttcaaaaatatagtattttttataaaacaagtagcaagaagaaaaaacctaagtggaactatgtgtttagcaagagagcggaataattatgaatataaacaattcctatttggagaaaatacattatgttcattgcttggaactatgaataatacttatatctgtaggaaatatagaaaaataaaataggttaaggcaataaggatataggcaattacatttttattttaattttataargacttttatttttcctttacagactagggtagttaggagacctgatagtagctacttcgtttttattttcctggcagcaaagcagcttacttatgtgttccttcttgcttatctgttccagatcatagtcaagttttccaattcgttttactaagctagcaaaattttttataccaggagcattaggagcttcaccgtgggaggccttcaagggcttcatgactcctgaagttataggctgactcctgggctgggggtgggctgggaaactcacacctttgtcctgcaggtggccatccgagaggcctatgaggcaggtctgattggcaagaatgcttgtggctctggctatgattttgacgtgtttgtggtgcgcggggctggggcctrcatckgtggagaggagacagygctcatcragtccattgagggcaagcagggcaagccccgcctgaagccccccttccccgcagacgtgggtaaggcctggcgtaaccctgggtcagactgtgtcctgtgacacccgggatctggctaggctccctttggattgttcttagggatttctgagtggcttcccggctggggccagatagagagtaggctggcaacaacacacaggctcccccagggccgcctgctgtccctcctcctgcctcggtcccckccgcaccagtgctgctctgtggctccaccttcacagtgcctgttctgaggctaagggcatggggtgaacaaggcaatgggcatctctggagtttggggtccagcagggataagaatgataaggggatattagagcaggkgctctgccatgggtgcaggaccctgggacacacctccctgccaggaaacttgccccaccccctagcagccaccagttctcttcccatttccctgaaggagtgtttggctgccccacaactgtggccaacgtggagacagtggcagtgtcccccacaatctgccgccgtggaggtacctggtttgctggctttggcagagaacgcaactcaggcaccaaactattcwacatctctggccatgtcaaccacccttgcactgtggaggaggagatgtctgtgcccttgaaagaactgattgagaagcatgctggtaaggcctggggccagccaggtggtgggggggtgcgcagtgggggcaggtgtccacaaagagagcctgggcgggagggctcaggagacggggctgggtctaggggctgactaagggcctgggctcaggactaggcaggtgtgccggccccagccctgamcatgcatccctttggggaccgacttggggccccagggggtgtcacgggcggctgggacaacctccttgctgtgatccctggcggctcgtctaccccactgatccccaagtctgtgtgtgagacggtgctgatggacttcgatgygctggtgcaggcacagacaggcctgggcacagctgcggtgatcgtcatggaccgctcggtaagggttcacacaccagccctggtccctgccctcctggttgctgtctccctccctgggcctcccagaaaaccctcttgccagcactcaggtctcagttcctgcagcctgagataaagcaaggtggaagaggagggaggaaggctgctctgaggagaataccccggagtctgggcagcacagggggcccagggaggctggaggaggccagaacgctgggtgggctgggaagagcttctggaactgggggaggggctgctgctagggggctgaggcccaggcttctgtctggccgtgggtgcctgctaattgcccctcgtcacccagacggacatcgtgaaagccatcgcccgcctcattgagttctataagcacgagagctgtggccagtgtaccccatgccgtgagggtgagcatcgggcaggttgggggcttgcttgctgtggcttcatttaacctcctccccaccacgtggcctgcagccctcaagcgccgccccacatcctggctggggagatcatcaggccctctcttrtggctgtggctgcaggtgtggactggatgaacaaggtgatggcacgtttcgtgaggggggatgcccggccggccgagatcgactccctgtgggagatcagcaagcagatagaaggccataygatttgtgctctgggtgacggggccscctggcctgtgcaggtattcaccacccttctgcgtagcacggagggtgggtggcatcaagggcccagggtgttrggggatttttggactctgtttcacatggtccccccaccgaccccagggtctgatccgccactttcggccggagctcgaggagcggatgcagcggtttgcccagcagcatcaggcccggcaggctgcctyttagcccmccmccctggcctgctgtcctgcgtctatmcatgtggaatgctggacaataaagcgagtgctgcccaccctccagctgccgctgctgtgactgtgctctttaccctttacccagcacacgatcctcaagggtgggaggggagaacagggtccagtctggcccatggccagagaaaggacagggtctcatctggcttgaaggagatgtttatttcggctccatgatttggggtggggtgaatgtgaaagcggggagagaggaaacacctctctgacttggggctgggcatgagggtaaggcagccccagccgccatcatttttgtggggacgtttcaggcagctgtagtggaggggcggcaggcagggcccatgggctagtcgctgagctggacaggcttgctgtccagcgggtgccacagctccaggcggtggtcactgtggcccaggcactcaagccagtgccgcaggcgctccccactggcatggctgcccagctgcaccccgcctgccatgggggatgggtcaggaaccgccaggagcctactgggcccccaccccagctcctcatgttcccactcaccaatgaagtcatcagccgtgcctaggtcatagtcccacacagacaccagcagcgtcttctgggccagctcctcccgtgggcctgagtaaaagaattcctgcagggagaagggcagagaggcgggaaggaggcagcctcggctctcccacagcttaagaagcaggccacggtagggtagtggctcagcatgtcaaggccagggttggctgggacctgcctggccctggctcacctcattgaactcggggttcagggtcttcctgtgaacactggttttgaatttagatttcttccctgcatttggatgcaggaaactgatcggggaagattggcgggttaggtgtggccctggagaggtgaggagtcaccgccttatcctcacctcccgcctgcctaccccagttcactcacaggcgcacgaaggggtccgagtaaccattggcatccatgggggccaggtgggcgcagcgcagcacacctaccagcaagccaccctgctgagagctgtagcacagtgacagtaggacgtgcccacattcctcccaggccacctctgtctccacctcctcctgcaggtgtaggctgaggtcagccccaatccagtccaaagcccaccccctttagcctccgtgctctgggcaggaaagctcaacctggccccaaagaaatcgggggcaacgacttcatttccaatacagccacttgcccagtgccatggaagtggccctatgggtcagctgtaccctccagggcctgaccaaaggcgaggcttgctgaccacatgaccagtcagatacgtctgtcatggaggggaagcgaactggctgacatgccagtagctccctaagtggcctcccatccagtgtgtgtagccacccctgtaggcaagcggctctgagaggatgttcacttcccaaggagaagcagatctcttcaaaaccccaccctcttcaccccctatttccctggggaccagatgctgagtgtcgtttgtcacactctgggccctggtgcttctgaacaggctcagggaggaagcccggggaggatgcactgctctcacccgcagggtaggtttccatttgcggaaagccccaccaccttgctcacaggcggttctcaggaatgcggaagtgctctgtgagcacccaccatgctccgggcgctgttgtgcttgggatctggggcggagggtacacggggctggcgctgggtgaagtggcctgtccatgccaccttggtgggcttcagccacttgggcttagctaatcgacagctgcagcaacttgtggctccaccagggggcggggcacccggcactttggggaggagctggtagagggccccgctctcagcctcccagctgcctcccccaccgaccacaggggttctaactaggtctttggtctctagtggcgtcaaacccctgccagtcaccctcactgcctccggacaagggcctgtctaggacagcctgccccaggagtggcccccacactcccctcaggccagaccccagccagggagccccacccatctgtcctctcttccacctcgcccagcctcccatctcgggccgtggacaaatgccgccagtttcagcctctgcctcaaggcaggtctctgcccagctgcgcccccagggactctgcttgtcccagtgccccacagctcctctgggctgccctggcaagggagtcaccctcactttgtcacctggctgtcccctgtgacaatgagggctcacagggcctatgagagctggcctcaggttcctccaagtcccctacgcccctgccaccaggcctgccccctcatctctgctcagcccagttgtcctacccacctcatagagggacatgccacaggctgtgtccaggctcttgggcctcttggcctgaaagggcagagagcccggtcatcctggccagatgctgcccagatccccctccctgttcctcccctccagctccccccatcacaggttcctggcctctgcagtcccacctgtgctccagccccactcaccagcctccgcttctccagacagatgtcaaagctcctggctcggtttggcaccagcttcctcaggggcacccgcagctcccccagggaaggtgcctgccactgtcgctgtaccatgggtcctcgcacacacacagcctggtggccgcccaggtcagacctggccaggccagccccatccctctgctccacccccaggtggcccaggccagatcctcacctaagggtcttgcactcagcatcctggcgggtgaagccgtgataggtgagtgtctcctcccagacaggtaccctcgtgccccgaacggtgtgtgtccgaagctggctggcctagggcccaagccgggtgggtcagggcctcctagggctaagaccgtcctgtaacccccaaccctacctccctggtaggaccccccactatttgcacatcccagcaactgagacctaggccttgcaggatggggaggagccaagcagagccaagtgggtgccccaggctgggtgttccaccagagggcagcagtgggggcctggggcttgccctcaccttgctggcccctggcagcagattggctttgacataggcatccgcggagcctgaggccaatggcttgaggccctgggaacagacagtgggtatgagacaggcccgtgccccagccctctgtcccaggaacacccacccccatcctcaccttggcacgatgagccgtgcaatgcagggcactgttgtccgcttcaaaaagaagtgtgaactccagggtgcccagggcagctagaggcaggtggaaggcagcgtcacctcctacctcagctcagtctgcccccacccatggcacgtgcttcctgccttgcccctccatggccagatggtagggacaccccactccccctcctggctgggctgagctcagggtgtccccctcttcccgcccctactcactgctgtcgtctgagtctccttctggctctgggtcgggctgcagctggggtgcagagcggacggcggacgccgctgcggggcgcaggttcggagggtgcagggcaggctccgcaaaagggtaaaagtgcgggaagtagtgggaaatgaggcggatgggccggatggggcccgggctcacatcgatggccatgtgctcctgcatgctaacccggggaggctgcccacctgctgccgcagtgcccgccatggggacccagacggggggcggtgggcggagactcagagaaatgcctgaggactggggctggcgggaacgcacccggcctcggaaatggggtgaagaagcatcgctgataccatgcagggacctgaggacagagcgcagggttgagggaggggctgggggagtcctcagcctggagggttgtggcaggctttggaggggactgggtgtgttgggagtcagtccagctcccggcccttaccgctctgggagctacttcacccagtgtgagttgctgctgctggcagtgggtacgcactcatgagggcagagcccgtgactgctgtgtccccagtgagtgagggtgacccagagctcagaaccctctcagagctccttcctagcgctggggctcagcttccctcctccctctgcccccttcacactttgtcaaagggagttatttttgccaccatcatgtggccctgctcccaggtgaggaggctggtgggccggaggtgacagagggctgtggaggtgataagtggtttgtgggaaggagggagcgcataggaggaggggagggggtgcatgggaaggtgggaggggagggaggtctggggaggagaggaggggagccacaggagggggctcctgtgatggagccctgtgggggtggccagtttacactctgaaacatgaaccagatcatcccgcctccacccctgcttggaataaaatctgaatcctttggtgaggcacggccccttttcacctcaccaaggagtgtccccttggcatctcacagtaacggcctgctcccctcccaaactgggccaccctccctgccctttgacctgaccactcctactcacctttggtttctgggtcaccccctgcaggggatcttggctggttttaaccatccagcattccctctcctctcttctccccagttattcttttaatttttaatcaacataaccgtaggtgtgtatggggtacaatatggtgttctgatgtgatatgtgtagaaatgcaatttctacaatatgcattgtagaaagagtcagtcaggctaatgaaaaaaagaacacttaaaatgtgctcttcaggcaactgtgaaatacacaaggcgctattgttagggatgtttgtcatgctgtgcaacagggccttcagcttactcttcctgactggaactttgtaccctaagagcaatgtctcccctctccccatccctagtcccccactctccagcccctggtgaccaccattctctctgcttctaggagttcaactttttcagattccccataaaaatcagaccgtatagtatttgtctttctgtgcctagcttatttcacttagcatatcgtcctccaggttcatccatgttgtcacaaatgatagaatgtccgtctttgttaaggctgaacagtatagacagaccatcctatccatccgtctgatgctgggcagtcaggttgctgccgtgtcttagctgttgtgaatggcactgcagtgaacacggaggcagacacctcttcagcatgctgacttcaattcctgtggatactacccacaagtgaggttgctggatcacacggtagctctatttttagtgttctaagggactgccatatgattttccaaaatggctgtgctcatttaccttcccacaaacagcacataaggcttccctttcctccacatcctcacgagcatttgttgtctcccatggtttggtagtagcttttctaacaggtgtgagatggtatctcattgagattttaacttctatttccttcacgattagcgatgttgagcattttttcacgtgtcttttgagaaatgtatgttcaggtcctttgcccatgtttaaatggggatatttgtttcttgagttccttgtttcttttggatattagcccccttatcaggtgtatggtttgcaaagattttctcctatcctgtagtctctctcttcactttgttgtttcttttgctgtgcagaagctttttagtcgggtgctatcccatttgtctgtttttgcttttgatgcctttgcttttggggtcctatccaagaaatcattgcccagaccaatgtctagaactttccccatatgtttccttcaagtagtgttaccattgcaggttttttttttttttttttcctttaagataggatctcactctgtcgcccaggctggagtgcagtggcacaatctcagttcactgcagcctctgccccctgggctctagcgatcttcccccctcagcttcttgagtagttgggactacag

SEQ ID NO: 94921 - DNA, 22987 bp, Homo sapiens
  misc_feature (1)...(22987): n = A,T,C or G
acatggcaaaaccctgtctctaaaaaatatacaaaaattagcagagcctggtggtgtgtgcctgtagtcccagctactcaggaggccgaggctggaggattgcttgagcccaggaggcagaggtggcagtgagccaagatcttgccactgcactccagcctgggtgatagatactctgtctcaatcataatgataataatttgacaattaagagtatttgtgtgtcagaacagacaaaggaatctattccatcagggcaccaactgaaaatatgaagaaaaattataatctggtactcttttttcttgagatggagtctcactctgtcacccaggctggagtgtggtagtgcaatctcggcttactgcaagctccacctccctggttcaagtgattctcctgcctcagcctcctgagtagctgggattacaggtgcgcatcaccacgcccggctaatttttgtatctttagtagagatggggtttcatcatgttggtcaggctggtctcaaactcctgacctcgtgacccacccacctcggcctcccagagtgctgggattacaggcatgagacaccatgcctggcctctaatctggttctttagaggcttattgtagccaagagataattcatgattcaatctgcactcaaaaacaaaagtcagggctggaatctagtaataagtgttataattttcctttgaaagaatttctctttctagccctccttttgtaccagagagaaattatagtaagaccaatttatgtgcaaaataagttttaggcttattatacttggcctgattttttcgcataaaatgcagcaagatttgattggtcatataggctcttattaatttggtttgatgggaatggtgtgccttctgaaatgtaacttaaaggttcttacttttttttttttcacgccattctcctgcctcagcttcccaagtagctgggactacaggtgcctgctaccatgcccagctaattttttgtatttttagtagagacagggtttcactgtgttagctaggatggtcttgatctcctgacctagtgatcttcccacttccacctcccaaactgctgggattacaggcatgagccactgtgcctggctttgttttttttcttttttttttcttttgagatggagtctcgctctttcacccaggctggagtgctacggtgagatctcagctcactgcaacctccacctcccagatttaagtaattctcctgcctcagcctcccaagtaactgggattacaggtgcacgccacaatgcatggctaattttttttgtatttttagtagagacggggtttcatcatgttggtcaggctggtcttgaactcctgacctcaagtgatccgtccacctcagcctcccgaagtgctggaattacagatgtgagccactgcacctggcccctgattttttttccataagttattgggatacaggtggtatttggttacatgagtaaattctttagtggtgatttgtgagatcctggtgcagccatcacctgagcagtatacactgcaccatacttgttgtcttttatccctcacccccttcccactcttccctccaagtccccaaagtccattgtatcattcttatgctttgcgtcctcatagcttagctcccacatatcagtgaaaacatacgatgtttggctttccattcctgagttacttcacttagaataatagcctccaatctcatccagatcattgcaaatgctgttaattcatttctttttatagctgagtagtattcaaacatatatatataccattagtgtatatatataccatagtatgtatatatataccatagcgtgtatatatatcatagtatgtatatatatgccatagcgtgtatatatatatatatagacaccatagtgtgtatatatacaccatagtgtgtgtgtatatatatatcatagtgtatatatatatatatgtaccatagtatatatatacacagtactgtgtgtgtgtatatatatatcatagtttctttggtcatgaaatccttgcctaagccaatgtctagaagggtttttccaatgtcatctcctagaatttgtatagtttcagctcttgggtttaagtccttaatccatcctgagttgatttttgtgtaaggtgagagatgaggatccagttgcattctcctacatgtggctagccaattatcccaggaccatttgttgaaaagggtgtcctttccccactttatgtttttgtttatttgttgaagatcagctgcctgtaagtatttgggtttatttctgggttctctattctgttccattggtctgtgtgcctagttttacaccgatatgtcactgttttggtgactatggccttagagtatagtttgaaatcaggtaggtagtatgatgcctccagatttgttcttttggcttagtcttgcttttgctgtgcgggctcttttttggttccatatgaagtttagaattgttttttctaactctgtgaagaaagatggtggtgttttgatggagattgtgttgaatttgtagattgcttttggcagtatggccatcttcacaatactgattctacccatccatgagcatgggatgtgtttccatttgtttgtgtcatctatgatttcttttagcagtgttttgtagttttcctttagaggtctttcgacttcttttttaggtatattctaaagttgttttgttttgtttttttgtttgtttttttgctatcgtcaaagggattgaattcttgatttgattctctgcttggtcgctgttggtggatagaagagctactgatttgtgtacattaattttgtatccagaaactttgctgaattcttttatcagttttaggatctttctggaggagtcctcagggttttcaaggtaaacaattatatcatcagcaaacagggacagtttgacttcctctttatcgattcagatgcccctatttctttttctcatctgattgctctggctaggactgccagtactatgttgaagaggagtggtgagagtgggcatccttgtcttgttccggttctctgcgggaagcctttcaactttttcccgttcagtattatgttggctgtggttttgtcatagatggcttttattacattaagatatgtcccttgtatactgattttgctgagggttttaatcataaaaggatgctggattttgtcaaatgctttttctgcatctattgagatgatcatgtgattttcatttttaattctggttatgtgatgcatcacatttattgaccctcctacgttaaaccacccctgcatctctggtatgaaacccacttgatcatggaggattatctttttgatatggtgttgaattcggttagctagtatattgttaaggattttagcatctatgttcatcaaggatatcagtctgtcatttccttttttggttgtgtcctttcccggttttggtattaggatgatgctggcttcatagaatgaattagggagggctccttctttctctatcttgtggaatagtgtcaaaaggattggtaccaattcttctttgactgtctggtaaaattctgctgtgaatccttctggtcctggactttttttttgttggtaattttaaaattaccacttccatcccgctgcttgttattggcctgttcagggtatctaattcttcctgatttaaactaggggggttgtatttttccaggaatgtaaccattgcttctaggttttctagtttatgtgtgtaaaggtgttcaccatagccttgaatgctcttttatatttcagtggtgtcagttgtaatatctcctgtttcatttctcagtgagtttattaggattttctctcttcttttcttggttaatcttgcaaatgatctatcaattttatttatcttttcaaagaacaagtttttgtttcatttaccttttgtatattttttctgtttcaatttcatttagttctgctctaatcttggttatttcctttcttctgcttggtttgggtttggattgttctcgttcctctgttccttgaggtgtgatcttagattgtctgtgctctttcagactttttgatgtaggcatttagggctatgaactttcctcttagcacagccttagctgtatcccagaggttttgataggttgtgtcactgttgtcattcagtttgaagaattttttaatttccatcttgattttgtttttgacccaatgctcattcaagagcaggttatttaatttccagttatttgcatggttttgaaggttctttttggagttgatttccagttttattccaycgtggtctaagaacatgcctgatataatttcatttttctcttgttgcccaggctggagtgcaatggtgtgctctcagctcactgcaacctctgcttcctaggttccagcaattctcctgcctcagcctcccgagtagctgggattacaggcacatgccaccacgcctggctaattttttgtatttttagtagagacagggtttcaccatgttggccaggctgttctggaactcctaacctcaagtgatccaccagcttcggcctcccaaagtgctgggattacaggcatgagccaccgcacccgacctattttacattttaacaattgctactgaggttgagcatattttaatttatttacgtctattcaggcttcttgtcagttcagtttaacaaaacaaaacaaaacagcttattgagatagcattcacatcccatacaactcacccatttacagtgtacaattcagtggtttggaggcagtgggcctccccagtggccataacccatctgctgctcttagatgggccttagcattctgccctgtattcccttccccatcccgaggtcccttcctggtgtcacattggcatttacatctttagctaccgaagattccagggccagggcttggtctcaggctgtggcctccgctgggctgtctccagtcacaaccaagggttatctcagatgtccctcctgcccacagggctgcacactctgccaagagactctctacagccctcagcagggcgtgtccttggtctcaggctygggggaaggtggggtggggacagagtcaggccatccatgaaggacagtggcaggacctgagctcattctgctccctggaacctagaaggtgctcagcaaatacttgtggaaacattagcgggcaacattgaggggcactgattttgtgccaggagctgtgatctgccttttccattctcacgtctccctctgtgaccctctcaagaaccatggcaattaggtgttattgttacttccgaaaggctcagagacgttaagtaacctacccacggttgcacagtaaataaataaaccaatgaacaatgcgccatcctagagctacaggtgccgtcgcccatcaagggtctctctgcaaagatctgagccccttcctctgccctgagtatgccagctgggcacactgagagtggaaatagagccacagttgctcatcttgacctgtgaagcctgaagagtgaggacaggagaggagggagatgaagatttagcatagagaccctaggaggggccatggggggcatgggaccactgtggctggggcctgggaggacttcctggcgaaggcagcatttgccaccaggatcctgctgatattttcatcctgtgaccttcccctggggttcttttttcctgatcaggtaactccctgctagcccattccaggaaacacagagcaaagcctcagacagccttgacttgtctaacctgttcccaagccggctgtgcagtgtggtccctgggggcagggccctggaagaacagggcagacaccgagcagctataggtcctggcagtgagacaagggtaggcatgggaattgggaggtgcagccctgccccacgcctgttgggtaacactgagcatcaccccattgattaccccattgccaggcgtgggcacgggagttggtttgggagctgccagkctcctgggaggatcgcagtcagcagagcagggctgaggcctgggggtaggagcagagcctgcgcatctggaggcagcatgtccaagaaagggagtggaggtgcagcgaaggacccaggggcagagcccacgctggggtatgtggggccacaggggtgaggggcgggcagagggagctcagggtaaaggacactggtgggaaccaggggcatggagggaaggggatgtgtgcccrtggcccgtgggtcagggggcaagcccaccaaggggcctatggctgcaggggccatgggtacggggcttgctcaggagagggaggtgggtgctggtgtcttctgagcctcactttgccctttggcaggctcctgggaagcagccacagaaatgaagcctgttccccaggagccccagggatggggacagaccccgtcctccctttgaggagctcccaggttagaggagaaggcagctctgtggacagacaaggattsggtcgggggcaccagggctgtgatcaggaggtgccggagaatcggggattggaagcagagagattcttggcagwtgaagcraaagtcggatctttggtttcagatgttaaaagcaacatgcattgcttgtttctggttctagaaatactacattcgcatttagaaagtctggaagctgcaggaagatgttgagaagacagtgaaaggcacgaggcacacattggcacatggtgtcacaaggctggtgtgaggagaggggctggggggcctccctcctcgcactgaggctgtgaggagggcaaatcaagtcgtctctgggagcctcggtttccctgtccttccaactgggtaataataatagctgtgaggctcagatgagatgtgcatgccagctacctggccccagatgccagctctgacttctttctgggccctgcaccaggcatggccactgccaagggaatgagtcccctctccatatgacaggtcccatcaggcctccaccttcctgtgtgtcttatttctcagcatctgcccccacagkgcttttgcacacgttggtccctctgtccagatcacctgccctccaagaggccctcccctacggcttccccgcagcagtcagagccaggggtgggtctctggccacctctggaagaagccctggcccaccgatcatgtttgtaatgatattgtttccggtgtcattgttccgtgtgtagactgtgagctccatgggggctggccaagtctggggtggtcacctatgggacccaggtccagtcaggaactgcctggtgagcagccagrggtccccagtgtaaacccagaaaatctgagacgggtctcagttaatttataaagtttattttgcctgtaatcccagcactttgggaggccgaggcgggcggatcacgatgtcaggagatcgagaccatcctggctagcacggtgaaaccccgtctctactaaaaacacaaaaaataagctgggtgtggtggcgggcacctgtagtcccagctactcgggaggctgaggcaggagaatgacgtgaacccgggaggcggagtttgcagtgagctgagatcgcaccactgcactccagcctgggcaacagagtgagactccgtctcaaaaaaaaaaaaaaagaaaagaaaagaaaagaaaagaaagaaagaaagttcattttgtggccaggcgtggtgactcatgcctgtaatcccagcactttaggaggctgaggcaggtgcatcacttgaggacaggagtttgaaaccagcctggccaacatggtgaaatcctgtccctactaaaaattataaaaattagctgggcatgggggcgcatgcctataataccagctactcgggaggctgaggcaggagaatcatttgaacctgggaggcagaggttgcggtgagccgagatcatgccagttgcactccagcctgggtgacagaatgagactccatttttaaaaaaaaaaaaagttaattttgccaaggttgaggacgtgcacctgtgacacagcctggggatgtcctgacagcatgtgcccaaggtggtcgggacacagcttggtttacacactttagggagacaggagacagcaatcaatatatgtaagaaggccaggcacggtggctcacgcctgtaatcctagcactttgggaggccaaggcrgggatcacctgaggtcgggagtttgagaccagcctgamcaacatggtgaaaccccgtctctactacaaatataaaattagccgggcatggtggcaggcacctataatcccagctattcagctattcgggaggctgaggcaggagaatcgcttgaatccgggagatggagattgcagtgagctgagatcccaccactgcactctggcctgggcaacaagagagaaagtctgtctcaaaaaaaaaaaaaaaatacatatatatatatatacacacacacacacacacacacacaaaatacatacatacatacatatatatatatatatatatatatatatatatatatatatatatgaagtacatcggttccatccagaaaggcagggacagcttgaagcagggggtgggggtgagggttggggcagcttccaggtcacaggtaggtgagagactgcattcttttgagtttctgatgagcctttccaaaggaggcaatcagaatgtgcatctatctcggtgggcagaggggtggctgtgaataaaatgagaggcaggggcccgcacggtggctcatgcctgtaatcccagcactttgggaggccaaggtgggcggatcacctgcggtcaggagttcaagaccagcctcaacatggagaaaccccatctctactaaaaatacaaaattatttgggcgtggtggtgcatgcctgtaatcccagctactcgggaggttgaggcagaagaattacttgaacctgggaggcagaggttgcggtgagctgagatcgcagcattgcactccagcctgggcaacaagagcgaaactccgttccaaaaaaaaaaaaaaaagggggaggcaggttggccctgatcagtttccagcttgaattttccttttagcttactgattttgggggtccaagatattttcctttcacaccagtcagccctgccccagcaagcgcccggacccctgccctgcagcaggtgggcgagacaagaaagcaccttgcatgagaggcagggcttgggtccagctccagcccccatctgtttcctcatccgtcaggcagatgctgctggctccgtgattatttcaccgagcaccagatgtgcacatgtgaggacaggcgacgactgcccagaaagggcaggggttcctctgccccacctgcctcacctgggaaagctgtgaccacgctgaggccaggttcctgggatgaacatcaggacacctgtgtgccatagctcatcccagactcctccaatccgggtcttgattcaggccggaggcggtcatccctccaaaggcaccagggagccatggaagaggttagagctgagctgatgtggccaggagctgcttgagcgccsggtggaggctgctgaygctcgcatgccaggcaaagctttgggtcagggccctggaacctgggacctggaagcgctccaggccaataccgcccgctaccagagaagggcccaggccccacccaggttctagcccaagggcttgagcaaagacagtagatgaatatttgcagagccctgtatgctgcgtcctcctccaggccctcatgcaggggggccgcacactgagtgtgggggtcctgtgccaggaatgtgatcacgctgcccaggggagggaggcggcatctgcaggtgtggccrggaaggtgcccagcatggcttcctgtctcctcacattcttcagctgggacctgagccgggcaggggctgctctcctcatcttgtcattcacaagacacggacttctgccattggttcagctggctctgtccatgggcgagcactgtccctgcatcacatatgacaagaatgcctggtgcggtgcaagtgcagatggggccactggcctccaggacactcactggggatgccaaggccctgctcaccacccacccccactgccctcagcaatgcgggtctgagcacagcctggcacggcactgtgacctgcarctgagggctgagattactcaagtccacacgcagacacacacacgacacacatgacacagacacccatacacacaaagagacacagacacccatatacacatacacacacagacacccatacacacacagacacacgtggacacacacacccatacacacacagacacccatacacacacagacacacgtggacacacacacccatacacacacagacacccatacacacacagacacacgtggacacacacacccatacacacacagacacccatacacacacaaagacagacagccatacacacacacacacccatacacacaaagacacaaagctatacaaagacacacagacacaaagaaacacacagacacacggatacacaaagacacacacagacacacggatacacaaagacacaggatttgcgcaccattcttgagcccctgggctgggatgctcagaatcccgttgctaggtgcctggcaatcctcttgagtgtccccctgagccccttcccccacccccagggtcctgatccttcctcctctccagaccccactggggttcccttgggccctcaggctaaagcccagaggggttcatgccctggggcagtctcagctctgccaacctacccccacctgcacctgtgcccacccataccagccccggagctctctcctctgcttctgcttccttctacgaccagcagagtgccaccccctccccagagcaggtgccaaaccctcctcagggctagggcatgcctatggcttcagtttccccatctgcgacctcaaarctctgtgatctctgaagcaaagaaccctccgagtccctcgtttagtcccagaagggagggaggcccaggggagagctctgttccatctgagtggtctgggtgtaggggtggcaaggtgccagcgtgggtgggtgtgtgtctgcgcaaggaggggaggtgcagggaagagctgggatggtgggcagcagggtcacccgaggtgtgtgtgttgggcttccagggtgggcgtccaggagggggatcccctccctggagtrggggaggtcaagcccagggccctccctcatgggcacacctgggaggcaggtgagttgggggtggtgcaggcagccccagccccgtggggtcattcgagtgggtctgtgtgtgtatgaggtggggtgtctgtgagcccccatgggtgcaggtggggcaagggtgtgcagaccctggggtggctggagggtgcccgtgaaggaggggcagccctggccacccagttcaagccaccccatccggcaggatggaccccttcgaggacacgctgcggcggctgcgtgaggccttcaactgagggcgcacrcggccggccgagttccgggctgcgcagctccagggcctgggccacttccttcaagaaaacaagcagcttctgcgcgacgtgctggcccaggacctgcataaggtgggccrtggagagtgggcccsggcaggggctggagcagcgtccctgtcctctttcaggagggcccgtgccccctagtgactggctatgtccctagttttattcctgtttgtttaacagaccccctccctggcatgtggagtgtggcaggcacctgaccttcactcctgaacactcacaagccaccctgtgatgcaggctccatggctgtccccatgttgcagatgaggaaactgaggcactcaggggttaacatcgcttgcccaaggccacacagccaggaagtcacagatcagaattgcagccatgcgcagttcccaggggacggcagtgcctcccataggagctgtatttatatgtccagtggtggtggtgcctgcgtgtgccctcctcaaattctagacccctcctggcccaggtctgggcctgaccactctgaattccacctccaccacagccagctttcgaggcagacatatctgagctcatcctttgccagaacgaggttgactacgctctcaagaacctkcaggcctggatgaaggatgaaccacggtccacgaacctggtgagccctgctggcaggcggcaggagggcagggcagggcaccgggtagctctggcccaggcccccttctgcccctgaggccccgggcgagtcactgattttctcgtctctcctgggattccatcgcacagggagctgaggccccaagtgtgcagtgggtgggctttggggtggcccttggcagggcctcactgtctaccctgtgcctcagttcatgaagctggactcggtcttcatctggaaggaaccctttggcctggtcctcatcatcgcaccctggaactacccaytgaacctgaccctggtgctcctggtgggcgccctcgccrcaggtgaggagggcrttccgaacyccatgctctccccrcccagtagcccctcccaaagaggcccctggaatcttgctctgaggtaccctgggcctcacatgccctctgagcccagcccctggttgggcatggggaccctgggctcccccaacgacgtccccatctgcccctgcagggarttgcgtggtgctgaagccgtcagaaatcagccagggcacagagaaggtcctggctgaggtgctgccccagtacctggaccaggtgagggtggccctgccccagcagtgccygacgtccccatatatcacccctgtgggctgaggaggcccggctggcccccgagcccgccccgagcctctcattccaccttgcagagctgctttgccgtggtgctgggcggaccccaggagacagggcagctgctagagcacaagttggactacatcttcttcacaggtgagggggccaggccagggtcccagagtaggtggaggggatcatcaggagagagggtgggagggttgtggagggaggaggctggggccagcagtgggggcacgtggggagctggagctggcacagagtccgtctgcctgcataggccacgccctgggcacattgcagcaaytggatccaggagtggccaggctggaggcaggtcccagtgggtgagccagaccggccaggagaagggtgaggcgggccaggactttctatgaagaaagcgggcaagagtcaggtgcctggagtgtgtggtcaaggccagttgaggatggggtctcctcaccatgtccctaggaagcccgccgactccaacacctctccagggaggagcaggctctgggctgggccatcctgcctggtccaggtcactgactggccactctggtttccttccacrcccagggagccctcgtgtgggcaagattgtcatgactgctgccaccaagcacctgacgcctgtcaccctggagctggggggcaagaacccctgctacgtggacgacaactgcgacccccagaccgtggccaaccgcgtggcctggttctgctacttcaatgccggccagacctgcgtggcccctgactacgtcctgtgcagccccgagatgcaggagaggctgctgcccgccctgcagagcaccatcacccgtttctatggcgacgacccccagagctycccaaacctgggccrcatcatcaaccagaaacagttccagcrgctgmgggcattgctgggctgcrgccgcgtggccattgggggccagagcaacgagagcgatcgctacatcggtgagtcctgctgccctaccrcagcccacctgggccaagaccctttctcaatggagggcccacggctgggccacgagtctggactcgcacctgaaacccggccccactatcagagcccggccttgagccatggctctggtgccacgattccgtctctgtgcttctgagcctgtggccccatgaggccatactctggtccctcagccctggattcactgagctcagattccagggctccagggcccagcgtgctaaggtgaattcccatcccaccacyggctgtcctgaaaggccgtaacctctgattctccgagcccatgatccccaggttctaaactctgacggccccatcctgagcccccagtctcctgggccgtatgactcagcagctcatgggacactgcagctccaacattctgggacgctgctgcctcatgaactccaaggttctaagatcccatcacccctgactgtgagaccaaggtcgggggattctctgcgccccacaggccctgagcaggctggggaagccctagggtcccttctggggggctgtggggaaactttcttccctaaacactccaaagcctgaagcgctgggaagtcagaccttgggatcctggcctggagccctggcccatgcccctgtccccacctctaccctacccctgggggcagtcctgactgtggccccagggctgagccgtctctggtgcccgcagcccccacggtgctggtggacgtgcaggagacggagcctgtgatgcaggaggagatcttcgggcccatcctgcccatcgtgaacgtgcagagcgtggacgaggccatcaagttcatcaaccggcaggagaagcccctggccctgtacgccttctccaacagcagccaggtgggggtgcggccgggttgggggcaatggaggggctgaaaggggcacagactggcacctttcctttcacagcccttcccagcaaggctttagagcagcagatgcctcaagggtgactatatctaggccacctggtaccactgcatccggcgcaaggatgcctggcagagaggacagggtccaaacccaccagacacttagcgggtccatcctctgtcctggccagagcagcctgcacttggactgtgcaaaggttctgcacaggcaagcagaggcccggaatggaggtcagggacagagcagagcaggggcctgatagagcccagcgggtcgcggtggggcccgcataccacactgcagcatcctaacctcaccgtcgcgactcaaggctgccggctccccatgatcctgcagggcttcctggtctttgcrccatggtggtaatcacccccatggcaccccgaccrtcactgagagggtgctgtccccagaagatgcttagagcggagattattgcccgttagagggtggaggggcaggtgaggatgaggctcacctccgctgtggaatgtgcggggctcaagccctcttctcatgactagagcccaacacccaccttctcactccctggcaggttgtgaaccagatgctggagcggaccagcagmggcagctttggaggcaatgagggcttcacctacatatctctgctgtccgtgccattcgggggagtcggtgggtccctgcccatttccacncctagggaagcttggctttggtamcccagacccaggaagtcccttcactcactgttcaaccttgatccacancctgggcctctcaaggcctcagtttccctatctgtaaaatggctctgtgagtggcctggctctctctgagctccctgccagctgtgtgccctggccggggcagtgggctgctgctggggctccatgggctgcctggtctcaggcccttgttctctgtgcccacacaggccacagtgggatgggccggtaccacggcaagttcaccttcgacaccttctcccaccaccgcacctgcctgctcgccccctccggcctggagaaattaaaggagatccrctacccaccctatrccgactggaaccagcagctgttacgckkgggcatgggctcccagagctgyaccctcctgtgagcgtcccacccgcctccaacgggtcacacagagaaacctgagtctagccatgaggggcttatgctyccaactcacattgttcctccagaccgcaggytcccccagcctcaggttgctggagctgtcacatgactgcatcctgcctgccagggctgcaaagcaaggtcttgcttctatctgggggacgctgctcgagagaggccragaggccgcagaacatgccaggtgtcctcactcaccccaccctccccaattccagccctttgccctctcggtcagggttggccagrcccagtcacaggggcagtgtcaccctggaaaatacagtgccctgccttcttaggggcatcagccctgaacggttgagagcgtggagccctccaggcctttgctctcccctctaggcacacgcgcacttccayctctgccccatcccaactgcaccagcactgcctcccccagggatcctctcacatcccacactggtctctgcaccacccctctggttcacaccgcaccctgcactcacccacagcagctccatccactgggaaaactggggtttgcatcactccactgcacagtgttagtgggacctgggggcaagtcccttgacttctctgagcctcagtttccttatgtgaaagttgctggaaccaaaatggagtcacttatgccaaactctaataaaatggagtcggggggccacatagaagccctcacacacacatgcccgtaacaggatttatcacaagacacgcctgcatgtagaccagacacagggcgtatggaaagcacgtcctcaagactgtagtattccagatgagctgcagatgcttacctaccacggccgtctccaccagaaaaccatcgccaactcctgcgatcagcttgtgacttacaaaccttgtttaaaagctgcttacatggacttctgtcctttaaaagcttccccttggctgtggccctctgtgtatgcctgggatccttccaagcactcatagcccagataggaatcctctgctcctcccaaataaattcatctgttctggagagcctatctttctgaggttgacacttatcttgcagaatggggttcccacccatctttgatcatgaaggaaatctcagatttagaactatgttgcccaggctgctcttgaactcctggggtcaagcagtctacctcggcctcccagaatgctgggattacaggcgtgagccaccattcccagcccacatttcttaaaaatggtatttcagtccaaaccttagtaatacaatcgatgtttctaattgtgtcctgcttacagggaccagggtttgtttttcgtttttgttttttgtttttttattttttgaggtggcatctccctctgtagcccaggctgaagtacagaggcacaatctcggctcactgcaacctctgcctcccgggttcaagtgattctcctgcctcagtctccctagtagctgggattacaggtgcccgccaccatgcccagctaatttgttctattttagtagagatgaggtttcaccatgttggccaggctggtcttgaaattctgacttcaggtgatcctcccaccttggcctctgaaagtgctgggattacaggcgtgagccactgtgcccagccctgagagcagggtttttgtttgtttgtttttgtttgtttgttttactatatataaataagaatgttcatgaatagtttctgaattttgtaggaatcaagtagggagaaaaagtgaataagttccacctttgttcacaaaggacccttgatcgagttattgcaaatgtcgatcaaaagagtcaaactctgtacaatatttaagagacttattctgagccaaagatgaatgaccacggcccgtgacacagcccttaggagatcctgagaacatgtacccaagactgtcaggtcacagcttggatttatacattttagggagacgtgacgcatcaatcaatacgtgcaagatatatgttggtttggtccagaaagatgggacaactcaaagcaggggcttccaggctataggtacatttaaaattttcctggttgacaattggttgagtttatctgaagacctgggatcaacacaaaggaaatgttcatgttaagataaaggattgtggagaccaagttttattgtgcagaggaagctctcagatagtaggctgtaaaatctttctttttctttttttttttttttttttgagatggggtcttgctgtgttgcccaggctggagtgcagtggagtgatctcagctcactgcaacctctccctcctgcgttcaagtgattctcctgcctcagcctcctgagcagctgggattacaggcgtgcaccaccacgcctggcaaatttttgtatttttgtagagacagggtttcatcacgttggccagtctggtcttgaactcctgacctcaagtgatccacatgcctcggccacccaaagagctgggattacaggtgtgagccactgcactggcctgaagtgtttcttatctaacataaaagggtgcctggttcttagttgattatctcctggatctggaaagaagttagaaaaaagggaaaatgggattctctacagaatgtagattttttccacaggagacaactttgcagggcagtttcaagatatggcaagcaaatatatttggggttaaaatattttgatttcttctcttatttgttatgtgaggttatgccagagtcaggtcagaaagcagaccacgctatagggttaaaattaaagcctctctgatgagactttatggtttgtagggtgtgactccccaggccccttagggaggaatttgagcaaaataagaacaaaaaaaatcagagtttagtcctcacaaactataggcaggttatgacagaaaatttccttgaatctgcaaaacaaaatgaggtgatagtctcacatttaagtcataaaaacattattcatatcaattacttaatttcatgtaattatttttgttttgctcaatctttttatttatttatttttaagacagagtctcgctccatcacccaggctggagggcagtggtgcaatcttgggtcactgcaacctccacctcccatgttcaagcgattctcctgcctcagcctcctgagtagctgggattacagttgcccgccaccacaccaggctaatttttttgtatttttagtagaggcagggtttcaccttgttggccaggctgttctcaaactcctggcctcaagtgatccatccaccttggcctccccaagtgctgagattacaggtgtgggcgacaagccacccaggtgccaaggcaagagactgagggcacaagctgtcccagtataataaagaaaatatatagaataagaatagttataytagaaatagattatagatatgattgtatatgagtatcattaatcattagtttgtagcatcactctttattccaatattataataatctttgttctataattataacccaggaaaaaccaggccatacagagataggagctgaaggggcacggtgagaagtgaccagatgagtgtgagccctctgttacgcctggacagggccactagagggctccctggtctagtggtaacaccagcacctgggaaggcatccattacctagcggaccttggtctaggcgtagcatcagtgcctggggaaggcacccgttacttagcagactgggaaagggagtctcccttttcctgggggagttagagaagactctgctccaccacctcttgtggaaggcctgacatcagtcaggcccacctacagccatctggtggcctgtctccctgtgatgctgtgcttcagcggtcacgctcctgtttcacattcatgttatgctctgtacacctggctctgccttctagatagcagtagcagtattagtgaaagtattaaagtctttgatctttctgagaagagcatagaagaaataatgatgtaagctgtcctctgtctctccgccttggctacctaaagggaaaggccccctgtctggtggacacttcactcgcgtgactttatcaatcattggagatgactcacactccttaccctgccccttttaccttgtatccaataaataacagtgcggtcaggcatttggggccactaccggtctccacaccttggtggtagtggtcccctgggcccagctgtgttttcttctatctctttgtcttgtgtatttatttctaccatctctcatctccacacatgaagagaaaaaacccacatatcctgtagggctggaccctacaacaagcgtgagccactgcacctggccagttttgctcaatcttaattagcaattttggaccatagccaattgtgaatgcttccagagaagaatttaaaacaactgtgggtggcagggcatggtggctcacgcctataatcccagcattttgggaagccaagacgggagaatcacttgagctcaggagtttgagaccagcctgggaaacatgagaccttgtccttataaaaaaataaagacaattagctgggcacagtggagcacccctgtagtcccagctactcaggaagctgaggtgggaggatcacttgagcctgggaggttaaggctgaagtgagctgtgatcacgccactgtactccagcctgggcaatagagtgagaccctgactgaaaaataagaattaactgtgggtgacaaaagcccagagcagccagtcagagatctgatgacaatttacaattgacaggaaatttcagcatttctttttttttcctttttctttttgagacggagtctcactctgtcacccaggctggagtgcagtggcgcattctcagctcactgcaagctccgcctcccaggttcacaccattctcctgtctcagcctaccgagtagctgggactacaggtgcccaccaccatgcccggctaattttttatatttttagtaaagacagggtttcaccatgttagccaggatggtctcaatctcctaacctcgtgatccacccgcctcggcctcccaaagtgctgggattacagatgtgagccaccgtgcccggccagaaatttcagcatttctctggcatacaaccatgtgacacaaccatcacagtcatgacacatatcttggcatatcagagttttaggaatctcaaaccttttcccctgtgttagtgacacacttacacaaacattacttaaaggaagttaaacaccgtttctatttgacaatgcttcccatattatttaccaagtaagcctgatcatttaatatctccaaaagatcagagacaaaacctttgaggcttgttccaggaggcccttttggtagaatctcaaagttgattttaggccagatggcttaatttaggatttggatcctggggaattctgccaaagaggatgtcaaaaagttcaaatggcttccttcaacagaatcagagatcactgccgaataatagttactcgtttaaccacagtgacaatcaaaagaattcaaaagcaacacgaaaagttacatgcatggaaaaaccttaacactttaaagctcagtctccctaagcaatctgtgtttcctaggctggtgagcaggggaatacattagtaataccatgggaagtcctggttacatgaaacaactcagacacattaagaaaaaccaagaacacagaatcagtttatactggcgtaaagctgcttttctagacctttgagataaacctgaaaccaaagaaattagactgatcttaagaaggaatatgacagaaacagaaactaatttgtaattcagagaatggctattaacgaagcaggttttagaaataaatatcaaaacctcttggaactttactaagagtgaattaatgtcttaagaaactgctgttttttgtttgtttgtttttaagacggagtctcgttctgtcacccaagctgaagtgcagtggtgtgatctcggctcactgcaagctccgtctcctgggttcacgccattctcctgcctcagcctcctgagtagctgggactgcaggtgcacgcccccaagcctgggtaatattttgtatttttagtagagacggggtttcaccatgttagccaggttggtctcaaatctcctgacctcatgatccacctgcctcggcctcccaaagtgcctggattacaggcatgagccactgcgctcagccgaaaccactgttgttttaacacaggggaccaaaattgtaagttatgtatcatgtgttttaacattcaaattcattctctagaaaaactgttacaggccaggcatggtggctcatgcctgtaatcccagcacgttgggaggccaggatcacctgaagtcaggagttcaagaccagcctggccaacatggtgaaaccccatctctactgaatatacgaaaattagccaggcatggtagtgcacgcctgtaatcccagctactcaggaggctgaggcaggagactcacttgaacccaggagatgcaagttgcagtgtggcaagatcgaaccactgcactccagccttggcaaatgagcaagacagccagactccatctcaaaaaaaaaaaaaactattacaaatcatttcatttaattacagccaatttaatcacacccaacatttccatcataagttcccattcacaagccttatcatgacttactcagacagctgtggcatgcttggacttgccctgtacttcctctttcttaaatgtctagtcattttagtccaagacagagattgaacacacaagtttctttcctatacaaaattactctcattgcttcacatctgtaattttctttacatctctgtctcatctacttactggttccttttaatcttttttctatttctttcctaaatccatattttaaaactccctttaaataacagctaaattagacaaattactttttttctcaataaagaatatattgtatacctttcttactgttttcttattaagtgctccttacttttggcacacttcctatatagaattgtatattaggatt

SEQ ID NO: 94922 - DNA, 32919 bp, Homo sapiens
  misc_feature (1)...(32919): n = A,T,C or G
gcctcggcctcccaaagtgctgggattacaggtgtgagccactacacctgaccacacatttaaatgtcatatagttttcaagtgttatgaaatacccttcttcttttgatttaattatttaaacatattaaaactgttcttagctcatgggtcacacaaaaacagtcagtggggctgatttggtccctaggtcttagtttgccaacctttgctctaggaagttgaccctggcagagatgaaaaactttacccacttagattcagtgctgaggcttgtgaactaaacttgacagaagacagactgatgaaagaaaagacaaatttttattcatgtgtgtatgtgggagcacaaagaaaagtgtgacttaaaagaacagttagtggccaggcacagtggctcaagcctgtaatcccagcactttaggaggacaaggcaggcagatctctcgaggccaggagttcgagaccagcctggccaacatggtgaaacctcgtctctattaaaaatacaaaaaattagccaggcatggtggtgggcatctgtaatcccagcaacttgggaggctgaggcaggagaatcacttgaatccaggaggtggcggttgcagtgacctgagactgtgccattgcactacagcctgggcaacaagagcaaaaatccatgtaaaaaaaaaaaaaaaaaaaagaattgggagcttataaaccatcttaagaggagaaaagaagggagaggaagagaggaagagcacttacgaaaaaaacaaatgggccgggcgcagtggctcatgcctgtaatcccagcactttgggaggctaaggcgggcggatcatctgaggtcaggagtttgagaccagcctggccaacatggtgaaacccccgtctctactaaaaatacaaaaaaatcagccaggcatgggggcaggcagctgtaatcccagctacttgggaggctgaggcaggagaatcgcttgaacccaggaggcagaggttgcagtgagctgagatcacgccactgcactccagcctgggtaacaagagtgaaactccatctcaaaaaaaaaaaaacaaaaagaaaaaaagagaaaaaaatgacatttaggaataataatgggacatttaggaagaataaatgggtccttaggaaaatacttgggagataagatagctttgtggcaatatctgcttaggcgatctcttatcctgaagctggcttcttggctctggcgacaagagtcaatcttccctctttgtgaaactcctagggaggggacttaagatgattgagttcgtttgggagactctgcttttaggtagataagggagttgagaaaacaagcctctctgtcatctgttgattctcaaatgccttcagctcaaattaacttttattctacagtggcatattctgctccacttcaccattggagataaactcacgagaaataaactgaagccatattctagatccctgtctccatctggagcaccatgaagtacaagtaccagtcatcagcttcttgagttttgtatgtggctcctaggttggctagaggtttcagtaagaactaagatgagcctggggtatttaaaatataaccttactgccccctctccagaagtctcctccaccacacacaaacacaagtctggaagactcctctggacttagtttggaagggaacttcaggatgaagggagtagagaaaaaggtttatacaattttaaaatttaattaatttatttagagaaaataaagatggaatctcactatgttgcctgggctggtctcgaactcctgggctcaaccgatcctcccacctcagcctcccaaagtgctgggattagaggtgtgagccattgtacctagccagtttacacaatcttgatgtgccattgatacacagtagaggcacacattcacacatattgttttgttttgtttgagacacagtctcactctgtcacccaggctggagttcagtggtgtgatctcagatcactgcaacctccacctcctgggttcaagcaattcttctgcctcagcctctcaagtagctgggactacaggtgcacgccaccatgccaggctaatttttgtatttttagtagagatggggtttcaccatgttggccaggctggtttcaaactcctgaccccaagttatccacccgccttgacctcccaaggtgctgggattataggcgtgagccactgcacccagcccacacatattgtttggggtcaaatggcttctttgaagtggttttgaactcccagagatggacatctgttttaacctgtcagcctccttctaatctgaactaggagctgtgtgcacagttatatgcacacgttgacagcagtgtagacttctcaggtgaagtttagacacgtgaactatattgctcatgcaaagttctgtctggggtcaaggatgccctctttggataccgtgtgtcaggtcagaaaagcaccacacccagcatttgtcccagatgatgtatgattttcagaaaatacaaatccctatgaagggtagggtagattagggcatgacagggtaacaggaaagagtgaaaagtttcaaatgcccatgttccatcttgagtaatgtctaataagctgaataatctctgttcttgggaacatacagttcacccacccatttttacagggtttttaccaaaaagaaaattaaaacttgccattcagactcttctcattggactattgaatggaattcttattttcccaagcttgcgtgggctgtacctcctcatttcagtcatgcacaagtatggtttgtttggccaagcctaggttgttgagaaatctatgaccttcggatcaggactcacttaatagagtgagccaatcaataatgtcaggaccaaaactgaaagaacgtcaacttctttttttcttttcttttcttttcttttttttttttttttttttgagacagaatcttgctctgttacctaggctggagctggagtggcatgatctcagctcattgcaacctgcacctcccaagttcaagtgattgtcttgcctcagcctcctgagtagctgggactacaggcacatgccatcacagatggctaattttttgcatttttagtagagatggggtttcaccatgttggccaggctggtcttgaactcctgatctcaagagatctgcccacttctgcctcccaaagtgctgggattgcaggtgtgagccaccacgcctggcccaagtgtcaacttctggagagaaaagacactacagcatacattcctaccaaataattctacatttgagaagtacatgagaaaatataccccaaaataccttgggatttgttttttgataaagctttgtatagtgtggatgtctgtcgactttcatccatccttattttgatccattatgtgtcagttctttatttaaagactgtccttggtactcagtcaatgttatatattctatcgtgaaaaaagttaaataatggggaaattatcttttatgtaacagtgacttgctttcccataaaagataatgaatctaagaagccttctcctaaataaatggttaaaacataaggtagcactcttgggaaagagtgaagagaaaagaagagggttcaggactctacccttataaagaccaaatcatgatctcattcaagccctacttgtaatgctttgagtcagagagtttcttctttttatgagacagggtctcactgtgtcatccaggctagagtgcagtggcacaatcttagctcactgcagactcttcctcctaggctcaagggatcctcccacctcagcctgccgagtaactgagattacaggtacacgccaccatctctggctcatttttaaattttttgtacagacagaatttcaccaggttgcccaggctggtctcaaactcctgagctcaagtgatgcacctgcctcagcctcccaaagtgttgggattacagctgtgtagctccccaccagccacagagctcagttttcaatacaaagaaattgggcctcagaaaggttaagaagcccagctggtttatggaagaaccagatctagaacccaagactcttaatccagagtttcttaaggcactgggaatattaacaacaagaatccataaagttttatgaaggaagtgtgactatgacttcaccaggtcaaggtggtttgagagtagatatacagttggcaatatctttcaggcacagaactagaccaagattacataactgggatttcttgcaagtctccaaagtgcttcctgctcttcatttataaaacacggaattcttttttttttcttttttttgtggagggggatggagtctcactctgttgcccaggctggagtgcagtggcatgatctcaacccactgcaacctctgcctcccaggttcaagcaattctccctgcctcagcctcctgggtagctgggattacaggtgcccaccaccacgcccagctaatttttgtatttttttagtagagatggggttttgctatgttggccaggctggtctggaactccagacctcaggtgattcgcccagtttggactcccaaaatgttgggattacaggcgtgagtcacggcgcctggcctaaaatctggaattaacacactgttcctcataggactccatttctctttctaccttaggcaatccaattctactcctcctgcagtgcatgaatatatattaataacttttttcaagagaaagatcagttgcaaatacttatcaaatgtgttgatacatgcaaattaggctttccctgctgccctttcaaaacacagagagaataaaatgacctatccttaacccaatgactaagtgtttgtgtgaacttgaataaaccttcacctttcctgtgcctcactgttcttatctacagagcagagaagttaaaccagatgacttctagttaaaataatgtatgatttaatgattcagttaattaagattctattgggaggccgaggcggggggatcacgaggtcaggagatcgagactatcctggctaacatggtgaaaccccatctctactaaaaatacaaaaattagccgggcgtagtgacgggcgcctgtagtcccagctactcgggaggctgaggcaggagaatggcgtgaacccgggaggcggagcttgcagtgagccgagattgcgccactgcactccagcctgggtgacagagccagactccatcctcaaaaaaaaaaaaaaaaaaaaaaaaaaaaaaaagtttctacctgtgcacatatttagcttcagatatgatctgtgtgagaagaccatcttgaaggaagtcaagaaatctaagaatgagtcccgttttcagcatcaagtggatatataatcattagaacagggaataacctcactttccccgttcattaaatggggtaacactcgtggtcatctctcagggttgttttgaagactgaacaagataagtcatgtgaatgtgttttgtaagttgtatagttagaggaattagaagtgtaatcattgttaaaggagatgtttgaaacactgcatatatcatcactgccaatggagataacaggctgagtccgggttatttctcgttaggacgcgtccttgtgctgagtaaatggtaggttaccttatcagactgcgcagtgagtcttgatccgggaagcgcctaactcctgaatttttaccagaaaataaaggactacactaaaaagaaaccagaaagaacgtgggaaggagggaattcgcaggcagaggaggaggaaaagcaaagacgaggcaaagttaggagaatgaaaggcgaattcagaggaatgataggggcgggtagggccgagccggcctggcaggacagggtggtggcgaatgagctgctagcccggcgacctgcccgcggccccggcgggggaggaggaggggcttggcaaagggcaacgccagagccagacttaaaagggagatgatcctagctagttgacgccaccggtgacctccgacgccccgggcaagagaacgccaggagggataacgggaggaaggccggccggggccgccaaggcagtcccaggctcgcgtaggaggcgcgcagaccttgyaccttgcaccttcgcagcgccctgcaccccgccaccatgtgcgagctgtacagtaagcgggacactctggggctgaggaagaagcacatcgggtaagggcaccctggcccggaagtaagtgcagagagsgggcaataacgagtgcagaaggtggagagagaaagccggctagggaacaaacgatgcgctgcagccgcactccgtgcccgccgcgcctgtgcacgcgccccgcgcgcctccacctgcaggggccgcgcggactcccagaaacgctcctggaacccggaacgctgggcttcctgcccgctcgaaagtccccggctcgctctgcagccggcggactagcgggggctgccggccggctagaggggttggtggatgacggccaatagccctagcagayaccattccagggatgggagatgggtggaagaaggatagcgctccgccacccccacacaactcgaaagtttttggaaactgtgaactgagaaatattttttcatgatggctccgcaaacaaaccaattctgacaatttttacttaaagtgagctttttcttcttgcatgcttggttaagtgatgaagggtttatctagccaatagaaaaacttgaaaccaccttctgttagaaaagcagagactttatttagatccctcttacccaacttgctctcccaagctgtgttcttcccagcctgcttgtcttgcccccgtcacaaacgacttagtaatataaaggtgagtatataagaccgacaggggctctagctctcgttggatgtcatattccctgtgtggacctctgtcaaattaattgtctcttctatgaaagtaggaataacattctacttcacaggagcaagaagatgagattaatatgttagtgttttgtgcgtggtttttaaaaagatacgtgtaaatataaatgatgattaatgaccccgaatactgtaaagtcaaccgtctgcaatattcacttgaaatgaacgactgcagccgggccagtgggcatgagagagcacttggggttacaaggaaraaaacaatccgcatcctcttcggaggaatgctggacagtttctcagactgaagctcctcaccccaactggaggggtttctgggtggtttggaagactagttccatctctctcagccgctaagtgggatcaaaataatccagttctttccccattaatcaatcactaccctactttttctaatcactcactgcgttagttttcaatcttagttagattccggtaaatgcctaatggtttctgacatgagcagaacaaattttctaaaagcacgagtgtagccatgggctgactggataaaggagaattttacctgaagtctgacgggcaaggtggaaagtgtattaaaaaggcaatgtgaagtctgcagctttcagctcacatccttaacaaagtttttttttggattttaacttgtaggtataaactaacagctgagtttgaaccaataagaaattcttataaaatactattttcatttcagctgatgatgcttaaaaaaaatcaatatataacacaaccttatgcaattttaaaatttgaggttacctactgtttgtaataatcaaaattccttctaaacagttacatatcaatttagtatatttctactactagaactacctccaatgtgtgtgagggtttttttgtatgtatgcaaaatcaccaaaataaataaatatatttaactttagttcttaaatgttcataaagccaagattagaagcctttgtgaaatttctatgtgctaaaatgtataatccagccattcatccaaataaaagtatggatgaccttattatgctcaaaaaacatattaaatgcttagaagaataattgaatttcactatttaataatggaaaatccatttgatactggacaagtaccactcaaaatacatgaaaatgaaaataatctataaaacttcctgcgtagtatttaactctaggttatttgcatttagctttcagtgctattcatgtctttatacattagattgaaggggaaacagagatgtctaccttgggctacagcacaacacagcctacttgcaaattctggttttctcatttactgtctgtgtagccttaaaccagttacttaatttctctgtgccttggtctcctcacctataagagtgagaaagataataacctctctttcataggattgttgacaggattaaataatatttacaaaatatataacagcttctgacacattaagccccccaaaaaaacttggttattttttttctgatagaacaaaatttctcaaaggaaaattagttattggtctgtgtgattagaaccatcagagagtggattcctgtgcctctaataaattgtcaaatcatggcatatttaatataacaagcataaggaatgtgaacaatgtcatgaatgggggattaacataaaagtttccaggtttacatgaaatgaaaagaaatgtatgtcatccaggttgtgttttccctttcctttatgtaactgtacttttccactgatggggaccttcattgagaaggaaaaatactgagagtagtcctaccagaccaaagtgtttcctttgattatttctaggccctcatgcaaagttttctttgcatcggatcccatcaaaatagtgagagcccagaggcagtacatgtttgatgagaacggtgaacagtacttggactgcatcaacaatgttgcccatggtaaatgtcctgtccttgcagtgctttggaggaaatgttcatggagtaaagctgacttggaacacttaatttttgtytggggaattgcagtggctgcagttcctttgctgagtgggccagtagtcctagtggggaaaatcgcagcaaaatatggaagagaaaggaactcaacttttgtttgtttgtttgtttgcttgcttgcttgcttcataattcctcttattcccaggcacttagaattctaacttatttcttggrcttttgtttcataaattttagtgggacactgtcacccaggagtggtcaaagctgccctgaaacagatggaactgctaaatacaaattctcgattcctccacgacaacattgttgagtatgccaaacgcctttcagcaactctgccggagaaactctctgtttgttattttacaaattcagggtatgcttcatggtttcccacccctccccattcccactaaactttgtctactcttgcacacaaatctttccttttgattcatggtggagcttgtccaaaagggtttgctgagtttcttgccattcactaagtgatcacacrttagggacctagcctttctggttctcccactttattctacgactgtgaatctaactgatcaaatgatgctcacctcctcaggcagtgcaataagtagctgaaggattgataggccaagatattctttcaatgagtgtatgagtaactttagccaagaaataactctagtaaacaagctaaaacttttttttttttttttttttttttgagatggagccttgctctgtcgctcaggctggagtgcagtggtgtgatctcaggtcactgcaagctccgcttcccaggttcacgctattctcctgcctcagcctcccaagtagctgggattacaggcacccgccacaacgcccagctaattttttgtgatccacccacctcagcctcccaaagtgctgggattacaggcgtgagccactgcgcctggcaacaagctagactttttaaagatttttgattgttgaaaattgagcatatttccccaatacaaacataagaaaagaaaaaagaaggaaactcaaatagatacatttcaacttycatttatttatttatttttttgagatggagtttcgctcttgttccccaggctgcagtgtaatggcactatctctgctcactgcaacctccacctcccgggtttgagtgattctcctgcctcagcctcctgagtagctgggattacaagcatgcgccaccacacccagctaattttgtattctagtagagatggagtttctccatgttggtcaggatggtctcaaactcccgacctcaggtgatccacccgcctcggcctcccagtgctgggattgcaagcatgagcaaccgtgcccagccagaaggagccccaagagatgcgggctggtctggaaggccatgcacagggccaccagcagcgcctcggggtcagcgtggggaccctggggccagcaccaacacccacaggctggccatctccaggcaggcacctcgggctgcctcaactttttaacttagttttttgttttgttttgtttgatttttagtgacagtgtctcattatgttgcccaggctgctcttgaactcctgaactcaagcaatctgcccacctcagccttccaaagtgcagggattacaggtgtgagccaccgtgcctggccccaacttttaaattctgtaaattcaaatcattatatatccattctatagactattatgcagatatttaggagtatgtttttgcaaatgcatgtctaaatatgtgcttaaagtgcaatattatattggggaaagctttatagatatatagtagaaactcctattttaaaaacgaaatatggttcggcgtggtggctcatgcctgtaatcccagcactttgggaggccaaggagggtggatcacgaggtcaagagatcaagaccatcctggccaacatggtgaaaccctgtctctactaaaaatacaaaaattagctgcacgtggtggtgtgtgcctgtagtcccagctacttgggaggctgaggcaggagaattgcagtcaggttgcagtgagccaagatcacaccattgcactccagcctggcgacagagtgagactccgtcaaaaaaaaaaaaaaaaaaagaaagaaatatatatgaaaattaactattagacattccgtgaatatttgattatatgactctctgtgattcactttccattaagatattttaaaaccaatttatgtccagcatggtggtcacactactgtgcctggctcggcttcccaaagtgttggggttacagggtgagcccctgtaacccataggggttacataacccactatgcctgggctaatttttgtattttttgtggagatggggtttcaccatgttgcccagactggtctcaaactcatgggctcaagcaatctgcccgcttcagcctcccaaagtgctaggattacagacatgagtcaccgcacccagccaagactaatattctatttttttaatttaaaaaattactttattatttttagagacaaggtattgctagattggtcaggttgatcttgaactcctgacctcaagaaatcttcccgccttggcctaccaaattgctaagattacaggcgtgagccaccgccaccatgtctggccaacaaaatactcttaaaagtaaaaaagtcttcagtctgaatcctgctctacctcatattagctatgagaccttattctgattactttacctctctgaggctgttttatccatataaaggagatggcaatacttgtaatgctgttatgagaaaaaatacaagtaaaatcctcagcatgatgtttaacggatagtaaacattccacttattattattttcttcctttttttgggtagtatatttagattgtctgaaatatataggaaaaaatttgatactcattttatagagaaggaagctagtcaaatgttgggtaaatatgacatagggttggcagccaagctaatgggccctcagtctcccattcctcctgtggagatcagatttagtgaaggcttcttcgtgtcctcagtcactatgtggctgaactagactaaagtctggaatgggcagcatatccttaatttttattgggtttcttctatatgtctcattctttactgaaaacatctaaggaaccttatattagaagggtaaagtgggcaggcaagatagaggaaggagaggatttcaacttattattttataagtttctgaataaatgtaatcttacaacttttgtaattaacatcctaaatgtttttttttgttgttgttctggagatggagtctcagtctgttacccaggctggagtgcagtggggcaatctccactcactgcaatctccacctcccaggttgaagcaattctcttgcctcggcctcccaagtagctgagactataggcgcacgctgctgcgcctggctaattttttgtattttagtagagacgggttgcctaatctggtctctaacttctgagctcaggcaatcggccctccttggcctctcaaagcgctaggattacaggcgtgagctaccgtgcctggcacatcctaaatgttttaaaaagagactgtcacagtgtcctctctctctatgttatcttaatagatccgaagccaacgacttagccttacgcctggctcggcagttcagaggccaccaggatgtgatcactcttgaccagtaagtcttggacacaagatttttaagcaagaagcttcttcagagacaaaattgtattgatcctatccatactaataccatgaacgcatgtgaaagaggacagatatatggagcaatgttttaatgtttttaaaaattatgtattaagctatcaaggccagcttaaatccagagggatatttaattccttctaagtaccaggaagtaggagaggctctcttggttactgtgggggatgtagcttcatggagtttgcatgaatcatggattacttttcacacattattcattgagccactattaacatgtaagtaattaaattgttttccaaataagaatacaattaatttcaaaaaaagttcaagcattcacttcactattgtgattattcgcagtcactaattttaaagataacaatttacagcaaattttaaagaaaaccggcagccacgtaagatttaaaactttttcattagcctgtaattattaacagtcactatctaatcttacctgtcaaacatgaatttattacattttaaaccagaaatctggcaacttccatctttattagagtttgtttgtttgtttgtttgttttgagacggagtctcgctctgtcatccaggctggagtgcagtggcgcgatctccactcattgcaacctccgcctcctgggttcaagcaattctcctgcctcagcctctggaattagctggtattataggtgcccgctgccatgcccaactaactttttttgtatttttagtagagacaggttttcaccatgttggccaggctggtttcgaactcctgaccttaagtgatccacccgcctcagccccccaaagtgctaggattacaggcgtgagccaccgaggctagcctacggatattttttcttttaaatttttgtctactcctccaccccactcactaacttcagatgtagagggtgaagttaaatatgcacctcatttcatgcccttcccaattgcttttgggaacttattcataaattctttgccaaggctgatgtccagaatggtatttcctggggtttcttctaggatttttacagttttaagtcttaaatttaagtctttaatccatgttgagttaatttttgtatatgataaaaggcaggagtctagtttcattcttctgcatatggctagcctcaatcttagttcttaaaaagatctccttttccttctcaagtaatatttgcctaatatttgcaagtggacatgctttagaaatcatcccgaacagaaacagatgcccattctatgatataaagttgtttttaaatttactagaatgtaacacatattcttttaacacatttaaagaatacatacacgtaaagtattgcatgaggatatagaaaacaatttttcacatttagacaatctaatttagcaatataatccaaatacatcagtttttcccaactaaaaagaaattgtcaatgaggacacatgcttggctttctatgagttttattacatgtaaaagaagaattgtacacattaagggccagtcttgccatgaaaaattagatcccatatagtcaaatctggcaccagtgttgagattctccctggatggatgcatatggatgaaatgcaacactggttttcatatacttgaaaatatctctcttggaattattttgattactgcttttttttctttgtctcttcagtgcttaccatggtcacctatcatccttaattgagattagcccatataagtttcagaaaggaaaagatgtcaaaaaagaatttgtacatgtggtaagtgtcttaaaatcctaaatcagaatgtttgtattggaggaatgcttaatgataatccagccaatgctttcatctagatgaaccatgaaagagaaactaaaatcaagagcagttatgtggcttgctaaggtcaaagggctaaataatgacagaatgttatttaaaatttatttatctatttaaaatacattgatgagtattacaataggcaaattagtttagtagttgttcagagctatcattttatttttcttgctccttaatcttcagttacattttctatcacaaatgccaactcaaaattcagagttgaactaagtgtgtttttaaattgctcttggccgggcacagtggctcgtgcctgtagttctagggctttgggaggccgaggtgggcggatcactggaggtcaggaattcaagaccagcctggacaacatggcgaaatcctgtctctacttaaaaaaagtacaaaaattagccaggtgtggtggcaggtgcctgtagtcccagcaacttgagaggctgagacaggagaatcgcttgaacctgggaggtggaggttgcagtgagccaagatcgtgccactgcactccagcctgggtgacagagtgagactccatctcaaaaaaaaaaaaaaaaaagaaaagaaaaagtaaattgctctgtataataatgctaaattattatatagctttattaagtaaaataaagaaaccaaccaagttgttgaaaaggtgaaatttatttggtgtgtttgtcttaactgaggaacagtataatttctttttttcttttcttttcttctcttttctttctttctttctttctttctttctttctttctttctttctttctttctttcttatttatttgagacggagtctcattttgctacctaggctggagtgcagtggcacgatcttggctcactgaaacctccgcttacagcgttcaagcgattcttcagcctcagcctcccgagcagctgggattacaggcatacaccaccaagccctgctaatttttgtattttttgtagagacagggtttcatcatgtaggccaggctggtctcaaactcctgaccttaagagacctgcacacctcagcctcccaaagtgctgggattacagacgtgagccaccgcgcctggccaaatttcttgagaatcatcaatattttcaagattttaagatctggagtgagtgctaacacactctagttttctgaatgattacgatttgcaatatagttgatcggtgttggctcattttaaatccagactagttaatacagtttccattcactgamatttttaaatactatcatcacatttgttgatttgaatgttctatttatgtgaggagggatatagtcttgatgtataacagtctggaagcaaatccaaacttctgttcacaattcaaagatgtcagttcttcacagaatttagaaatgttaagggaaaaaaagaacaaaaaaacctaaagtatcttaagttcacatgatcaccattctaacatgttcttgtggggaaatgycttttttttaaggtttgtcgaaaaggcaaattacaagcaaytgcattatttgatgttttcaggcaccaactccagatacttacagaggaaaatatagagaagaccatgcagacycagccagtgcttatgcagatgaagtgaagaaaatcattgaagatgctcataacagtggaaggaaggtttgtatttatagctttggaaacatctcaacatcttttataaaagggattaaaactgttgggattcactgaagagatggaaaaggattatatctaatgtccctttctgttcttctctagttacgttttcacttgattcaaatttcaaaaatgcgttattacaatcatgcctctaagactgtctacttgtatttatcctggaaatacaacmattatctggttccagaactggttgcctaattctgaccttttcagtggtatgcagggtctagtctagaggggtaggggtcattatatggtgaagggaagagaagagacaaagtagcccttggacctgaggaccaatgcagatttccagacccacaagggagccttggtgcttcccttgaacttcgaccttcttgaagccatggagcctggggctggtttgcacctgggtaagccaaggcagaaaatgttcttccgatgtgggcctggacttctaagacagaaacaaaatccttgagagcaggaaaaaattgttttcactttcttggtcttcaccctactgtcttcagcttaatgttcaattctcagcccatctgtaggttatttatgtggatgttaatgcaacctgacagtactttgccttaaaattggcttatagcatagacttggctattttaaaaaaaaaccttaactgaaataaaaatgaggccttttctttttataattaactcaaatatttttgtcttcatgactagagagccattcacatttcttaactgtttcttcttttttttccccaacccatttgtttttcgtatcttcttatgtgaaacatctgtgcaggtagacctaaagctctacgtgttgtaggaagcttcatactcttcctcttcaaatgtggtctgtacctgtttaaacaaatggcaaacaacacttttaggaaaaaatttacattaacaagatcttacggactctttgctgctaaaagagggtttgaataattttttgagaacattagcattcaacatttattggattgttgctgtcatattagcagtgctgaaagcaatgaacaaatataagatcagtgcttcagaatattagatgtgcttgcaaagtcatggaattgtacagcaaaagtcttgagtccaacagcctcattttacagctaagaaaccaaatatctaaaaagtgaaggatttaacccaaggtcatacaattactaaggggtagtctgaactagaacttgggttctcttgatttcttatctcacattctttgtgctttctcttcaacattatctrtttcctacttctcttttcttagtctctagaatgattcatctgtagttcctattgttaactgcccactgttgagttaagcgtggtttagggcaaaacctagaaatacggcacagtaactacagtgtgtggccacaaaccaccctgccactttcatggtgcaaattccagcctcaagcagccctacttcaccaagcttaagaaacaggcatcacgacaatgcctttggacctaggtaactttttacaggttcataaccaaagactaataaaaatagcagtcttattcagttcatcctaatgaaactgctgcatgtaatgatggagaaatggaagttgcgctctcatctcctctatttctcatggtagctttattggtaccctagattttcagaagttaatgstttaaatcaattgcttttcctgcatagacaccttttcctttttctttaatcaaatggctaatttgccacttgctacaggtctattcctagccatttttaaaataacctgctctataagatatactctttttaggggggttgtagggggacctaatggactttganaccatcttctcttgtatagattgctgcctttattgctgaatccatgcagagttgtggcggacaaataattcctccagcaggctacttccagaaagtggcagagtatgtacttgacttgggcctccttggtcaaactgagagcactgtgacaattctgtagggccatactagttgctaagatattaaaataattcctgattagctggtaaatagccacacctgagtgcctgccaacccaggactcctggatgctctctcagccttccccaagatccagcaagtacaaggtttacacatggtccaacagcgggggttcagaactctgctccagcctccagcctgcatcctctctgattggctagtaccaaatctgtattggtcagggttctctagagggaccaaactaataggatatatatatatcctatatatatcatatatgatatatcacatatcatatatattgtatatatatcacatatcatatatatcgtatatatatcacatatcatmcacacacacacacacacacacacacacacggcggtattaagtattaacttacatgatcacaatgtcccacaataggctgtctgcaaggtggggagcaaggacaaccagtttaagtcccaaaactgaagaacctggagtctgatgtttgagggcaggaagcatccagcatgggagaaagatgtaggctgggaggctaggccagtctctcctcttcacatttttctgcctgctttatattcgctggcagctgattagattgtgcccaccagattaagcatggatctgctttccccagcccactgactcaaatgttaatctcttttgggaacaccctcacagacatacccaggaacccaggattaatactttgtgtccttcaattcaatccagttgacactcagtattaaccattacacaagccttcccaattagtaaatatttgaagactaaccctgttaacaactacttgtttgattctttctcttcccacttaaaaggtaatatggtaataggactgggtgctgtggctcatgcactataatcccagcactttgggaggccaaagcagaaggatcacctgaggccaggaattcaataccagctgggcaacatagcaagacccccctctctacaaaacctttttaaaaatattatctgggcatggtggcacacgtttgtagttccagctactsgggaggctgaggtgggaggatggcttgagcccaggagtttgaggttacagggagtttgatcataccactgcactccagcctgggcaacagagtgagaccccatctcttaaaaaaaaatactgcaatatagcttactttaagtagcacaaacccaactggtatggaatatatctaatctaaaaattatgtgattatattgtaaagtcaatgacatttatgtggggtttagagtactgaaatgttttttaagaaaaattaaggcttcaggttaacaactttttttttttgtcttcaataatttgcatctttgtgggtgggtttggggatctcagtgacctgaaggcattagactgccgctttgcytttcagatatgtacacggtgcagggggtgtgtttatagctgatgaagttcaagtgggctttggcagagttgggaaacatttctggagcttccagatgtatggtgaagactttgttccagacatcgtcacaatgggaaaaccgatgggcaacggccacccggtggcatgtgtggtaacaaccaaagaaattgcagaagccttcagcagctctgggatggaatattttaatacggtacattttggtctccaactttaatgctaagaaggaaaaataatgcatgttcttatattttttgccaatgtagtaaagaatraagctcagtattgccrgctaaccacccagaactctggccaaagttttttcttattttaataaaacatcttaaatacttacatatatatataaaattatactttaagttctgggatacatgagtagaatgtgcaggtttgttacataggtatacatgtgccatggtggtttgctgcacctatcaacccgtcatctagattttaagtcccacatgcattagatatggccaaacttttatctaaccagattttattctgtctgacaaaatgctccttgtatttctgcttgtgtatctttacctgtcctaaaacaggcttattaatttttccaatgatagatggttgccctgctaaattctacaggttatgatattttcatttctttgtttcatatcatacttaaatttccaaaacacttttaaagtatttttatgactcagtactataaatgttatacagctgtcataagagatactaaatttttatctttgggatattatatttttttgacttatccccataagctttaagcttggaaaaattattgtagtttgttcagtatatataatacgacttgttacagctaaaagtaagattcaaatctgaggacataaattgcttggggaaaatgtcattgcttagctacttttactcagctcttcaagggcagaaacccctatttccctcactgggcaacactatgaaatcctgaactcccaacataatgtctgcttttgtttggatgagcaaataaaatcactggtagtccttcataccagttatgcagcttggataatataatttagaatgaattttcactcagtcctgaatatatagaatcatgctctattctaaatatgagaaactaatattataagagaacattttatttaaattatawsttcacttatgtatgtatgagccaaatttctcatggatgagggaataccactcattcaactggtatattttctcatttgtcttttttttttttacagtatggaggaaatccagtatcttgtgctgttggtttggctgtcctggatataattgaaaatgaagaccttcaaggaaatgccaagagagtagggaattatctcactgagttactgaaaaaacagaaggctaaacacactttgataggagatattaggtatgttcattatgaagttgtcatgtagttactcatttttttcaaaataataatagtttataggctgggcaacatggtgagaccccgtctctattaaaactacaaaaaawtagccaggtgtggtggcacacacaaatagtcccagctactcgggaggctgaggcatgagaatcacttgagcctgggaggcagaggttgcagtgagccgagattgtgccactgcattccagcctgggtgatagggtgaaatcccgtctctaacaataataataatagtttatattttatcttgtaagtttataataaagtacataaaactaaatctggaaaacaccaaaaaagagagatagcaaaaattattcttattccagaatccagatatcaccactgttaacatttgggtggggccggatgtggtggttcacatctgtaatcccagcaccttgggaggcagaggcaggaatattgcttgagcccaggagtttgagaccagcctgggcaacataacaagaaaccttgtttctataaaataaataaataaaccaacaacaataaaaaaacatttgggtatatgtctttcctggcttttatacttttttaataaagttaggataatgtcagcacccaaaagatgaaaagaaggaacttwatgtagctctaaataatttattgaaaattatttaaaatgctattctgaaaagctggatatttttcatatatatgtatgaaatactgacatatatatatatattatatatatatatatatatatataatgttaacatttatcatcattaacatcctgagaaactaaatagcatgaaagggttgtttttaagccattttcttttataattgagaaaagaaaactggatgacaaaaactaatttatttccaaaagtagaaacaactgtgaacatagattggtatcttgatttagttagaattaaacttggaaattaaatggaagtttggtgatagtgttaactttttgtgacagtgaagagttggacagattgtgggtcaagtttttcttcacctctcgcaggggcattggcctttttattggaattgatttagtgaaggaccatctgaaaaggacccctgccacagctgaagctcagcacatcatctacaagtaattcacccccacacccacctgtttggtatcttggctgcaggatgcctacccacttgaaagcttgcttgacttcctcccatccctctgaaaaaggaaagtttaaatacatcctatttataatgtgggcttcttaaatgcagaatacttaaactgctctatgttcacataattcttcagtaatcgtagttatcctttgcatacactcacatgtatttcctacacaaattaggatgaaagaaaaacgagtgcttctcagtgccgatggacctcatagaaatgtacttaaaataaaaccacctatgtgcttcactgaagaagatgcaaagttcatggtggaccaacttgataggattctaacaggtgggtccatggatctytaagatgtcttcttgttccctctcccaaacccacccctcaaaccctggtctagtcataatgagcatatgcatcttgttattcatgrtggaagtgaggcagggcagaaataaatgtgtaactttccatttaggactagaaaaagatagctgaaaagtaactacatggactcttaaattgaaattttcagtttgtattcatataactccaaatataagtttttgctgaaagaacatagttttgtcatttatttttactttagactagcatatttaaaagtgcatgtctgcattgtgccatggaccacaaatactacagtatatagtatttcagcattgtgtgattaatacatgaaacatttctaataaaaaaattatataggctacagtgtgacagttctttgctatatgctgaattgcttaactttgcgtggttttttttttttttttttttgagatggagtctcactctgtcatccaggctggagtgtagtgctgtgatctcggctcactgcagcctccgcctcccgggtttcagcgattctcctgcctcagcctcccaggtatccgggattacaggcacccgccaccatgccgggctaatttctgcatttttagtagagatggggtttcactatgttggccaggctggtatcgaattcctgacctcaggtgatccacccacctcgacctcccaaagtgctaggattatagacgtaagtcaccgcgtccagcctaactttgcatttttaacttttatttttaaatttttatttatttatttattttctgagacagagtcttgctgtgtcacccaggctggagtgcagtggtgggatctcggctcactgcaacctccgcctcccagattcaagcaattctcctgtctcagccacctgagtagctgggactacaggagcatgccaccacacccagctaatgtttgtatttttagtggagacaggtttcaccatgtgggccaggctggtctcgaactcccgacctcgtgatctgctcacctcagcctcccaaagtgctgagattacatgcatgagccactgcacccggccttaatttttatttttttcttttgcttttttctttaaaaatatttaaaatattgaaaatcttttactatttaacttttgaggacttttgttattcagaattatagtctatcataaaaatatatcttgtttacctatattatgcaactaggttaatttatttttttgttatgaacatacattggattagaaagtaaattagcactgtaaaaccatgttgaagagcatatcatgataaaaatgatagatattgtcgtttttgctttagttatatttttacaattcaggccagcatggcagcacatgcctataagatcccagaggccaaggtaagcaaattgcttgacttgagatcaggatagctcaggagctggagactagcctgggcaacacggtgaaaggttgtctctacaaaaaataaaatacaaaaattagccggacatggtggtgcgtgcgcctgtagttccaactacttgggacttggctgaggtgggagtattacttgagactgcaaggcagaggttgcagtgagccgtgccactacacttcagcctgggtgacagagtaagaccctgtctccaaaaaaaaaaaaaaaaaaaaaatttcaacttctctacttgcttctcagccttctggggttaggataaagccaagaagctaggaatcaatatagcatacaaaatagatatgaatagtgaatgtttggaaacttgagagtccacataagttattaataatagggtcactgtctttggactcagagagcatgctcacacccagacctggcaagcattcctcacaagcagatgtgtcctttgatcccatagggcagggtagaggagagagtgtggcttgtggcttggggcaatctgtcactctatgtctgcatcaactcagagcttgagtgttattaatagtgggccagaagaatttcctttgaataaagtgaatgaggagtaggtaaaatgggcttagtgccacttataaatgataatggtaaaatactacaaaagaatcttaaagtaattttgatagtgatttttttttttttctttttgagacagagtctcactctgtcgcccaggctggagtgcagtggcgtgatctcggctcactgcaacttctgtgtcccaggttcaagtgattcttctgcctcagcctcccgagtagctgggactacaggcatgtgccaccacatccggctaatttttgtatttttagtaaagacggggtttcaccatattggccaggctggtctcaaactcctgaccttgtgatccgccctcttcggcctcccgaagtgctgggatgacaggcatgagccacagcgcccagcccattcttttaacacataacatttccttccattcttcattaaaggtattgctaagataccaaaaagtttttttcttaaggtttttatgttattttgtcttctccataataccttccttgatycagttttagaagaagctatgggaaccaaaaccgaaagtgtgacctctgagaatactccatgcaaaacaaaggtaagggttggctactttatttttagggggaaagtttaaaatttggggartgtttaaaaaaggaatacaaattttcaaaaaattgtgcagtgaccattagaacaatgccagcctgtattaggttsrcttattgttgcaattttgagtgcacaattaaatttccacagcaagtgtcacatcatttgacgcatcaaaagccaaagaaccattcttacaggatcattcccattccaaaaacagccttgtgggcctgcaaagagggcctataaaatatatakagagagaattaaaacggcctaacctccttcctgcttttcctgagggctgcctgacactgcctccgattctcacacactgactttacaatcagcagaagcattagtagggaggttctgaagtgccagagtttggttctaaaacgaactaaagcgtaagcttcgaatggcagtggggcctgggaactgtctggcattgcctggcctagtttctgcatttgatgtgcttccagcagagggccttgccattctctcctgagctgcccagggtgtgagaaagagcaccctgggctgggaaacagaaaggcaaaaacttgagaggctttgttgcataatttgttatttgtttatgagttcgatgcataaaggaacactcagtgcctcgagcccgcctgcgcatccaatggagtcagcaaagtcttttttcatgattaaaatcatcaggctgtttgaatgagagcaagtgattcgctaacagcatggcttctgtttcgtctaacaacacaaaccaattataggaatcaattattctttgatgtcaagaacagtttatcaagtctaagaatcacagctgtaaccactggttccccaagcattaaagagtcctgcaaatgaaacaaaacaaaacaaaagaagtgttcagcacaagaaatcccactttagggttagcaaagttggcacacattttatgaaragttgactcggagtccyggattttctgttgacatcacatttcaaatgtctattgaagatactgaggagagggttagaaaggagcaagcagtgttgttttgtttggtttttctgtgtcctttgtttgtgtgtggacttgttaagtcagtcctgtggaggctggattagaggtggatgcccactggagctttgtgtgcctgtcttgcagatgctgaaagaagcccacatagaactgcttagggacagcaccactgactccaaagaaaatcccagcagaaagagaaatggaatgtgcacggatacacattcactgctcagtaagaggctcaagacatgactgatttgcattttaaagcaagatgygatgtccagagttacagagaatgagtagatgtgtctcatcggttaatagctctattatacctctaaaggtggaattgtcagtttagattcataaatgaaaaggtaaatgagtaatcagaataaaccaagtgataatcaaaccatgtcaagattattagttcagactctagcctgttaattttcttagttgatttctgaagctacctgatttattctattaaattgtaagcttgcaaactcaaaataaattggcagatttacctctcatgttttaatgtgtcaaattagagagcaaagtataacaggtgccttcacttttgagacttagtgccttaaaatatgtattctataatgatttcatatataaaagtatatttattgactgtaataaaataaaatatgatgtaaacaaaaaaaattactagaaaagtgtttacctaccctttgcagggaatattaagggttgggatggtaaaagcaaagtcattcagaaaaaaatcacaaacagcaaatattaaaaagtgatagaataattcaggcctctagcaaggaacttggttaatcaccatcccgtggggattgagaagggaacaaggaatatacacagaaatacacgcataaagacgtttctggaacagcagcagtagctgaagcagggcattcagagtcaggagacttctgctttgtctattcacggattgtatcacccaaaccaagtcatttacctgtcaggtaagaaattatcttttgagacagggtagttgcccaggctggagtgcagtggcactatcctggctcactgcagcctcgacctcccaagctgaagcaatccttccacctcagcctcctgagtagctgggattgcaggtgcacaccactgcgcctggctaatttttgtattttctgtaaagacagggtttcatcatgttgcccaggaggctggtcttgaactcctgggctcaggcaatccgtccgcctcagcctcctagtgctgggattacaggcatgagccactgcacctggccaagaaatcttcttttaaccaatcatcttcctcttaccatcaagtttatcatcacttatgcccaccccctgcatgtactcaagcaggagcacatgagtgcacgtgcacgcgtgcgcgcgcrcrcrcrcrcacacacacacacacacacacacacacaatctctagcccggcactggcaaaaggaagttggaggaaagtaggacatcaaggatcccttagttacatgatgctgccatgagaggttcattcggaggctaatagaccgaactggaagaaatttgaatttcagggttgatttttctcattatctctctattgcctttctaataattattaaactttgtgatttatttttattttattttatttttgagacggagtctcgctctgttgcccaggctggagtgtggtggcacaatctcggctcactgcaacccgtgcctcccaggttcaagggactctcctgcctcagcctcccaagtagctgggattacaggcacgcactaccatgcctggctaacttttgtatttttagtagagatgggggtttcaccatgttggccaggctggtctcatactcctgacctcatgtgatccacctgcctcagcctcccaaagtgctaggattacaggcgtgagccaccatgcccagcctgtgttttattttttattccataaagaaaagataataattttgctacagctgtttaatgatagctaaggaagaggttgagaggaaaattcattgtaaaaagcttccttcctgagttcatcataaaaatgcagggtcttattgttaaacactttttgctcctaaaactacacttgtgactctggatccccgttggataatgctgaggttggttgccaggaactggtgaggaggagatggaagagaggtctctatggtttgctcctagggagcaagagcattttgagataatcagacctttcacagattgacactcctgtgagcatattttgttagcatgctcagagagtgcccaccgcctcttatcggagttgttattatatgcaagagagggggaggaaggagaaagcctcatacctgtgttatgagttctccaagtggaaaataattgaaaactaaggctttactttttgacatactccactcttctttattacctataatttaggtttttataataaggaaggaagatatagaaagaaatgactccttcctgaatacaacagacataccacttgtgagtgaggtttcaggtagctgccttgtttccatggtgtcaaaatcaaggctgtgtcagcgtggtcctctcggaccccagacatgcaaataatcccagggccacaactggactcatcatgtcccttgtccacgattgaaattccactcaccctcagctaacagttctgctcatctggacatgcaccaatcttcattcctaaggagtctgagccctggtgaccatgcccttcttgggccagggctgctatatttgtccattcacagctacaattagacaaggggcacgaaggacaccaaaaatgtgtcctctgggttccacacatatccttcctgcccctactgtggaacagcagccttacctacctgctgatcatggtcaattaaccctgccaacacaggggctcctgctgctccctagacataaggagtcaaaggtgctcaggtgtcagtcctaacttatagtttaacaatacacttgctttttcctttggcaaaagtgcacccccttaccggaccagggcctccaacccccccaaagttgcagggatgaagagaataaaattctccagtgagtcactgaaggtaagtggggccactgccagattttgcctcttggatccaggatcatattggagacccagtgacacatggaaatctctgattcagtgcagctactgcatcctgaaggatggcaccccatgcttgcagacaattgcccctgagctggtgcctcaactgcacctccagtagtatacttcaattctaccaacctggctgcctctggagggtgagagtgtaatacaaccagtcaatctcatgggcacgggcccactcctgcacatcttcactatagtgtggctctgctctttggacaatctgatttatgggattctgtgcctgtgcatcaggcactctgttcctgtgggaacaaatctctggctcctccaggatgaaaggggctcaataaagtcaacttgccgccgagtggctgatcggtttcctcaaggaatagtgtcatattggaggctcagtgttgttctctgctgtgagtagattagctatgccaggggccaatatttaaaactgtcttggtaagtgggagtccgtgctgttgttccttgcatggcccccatctctgccactgtgtccactttgttcatgagtccattgtgcctgttgtggggtggctggtgacaaaaactggctaatgtcaaccagtcaagtcattttgcctactttgttgttcagtctctcttccggggtggacacttcttaatggacattacatgtgatacaaaaataacaagtagtatttactccctataccgatttatatgcctctatcccatatctcctttgtctcaggtattctagtacattcagagtcctggctagctagccaggccattcaccactgctcataactccatatatatatgcaccttactcctccttccacacaaggtggatgaccaagtgtgctactcaaagtgctgccaatgggaagatttttcattgctgctctttcaaggccaccactgagtgtggctagaaagcagccaccatctattttaccaaaatggcaggactctgcatcttcatagggtttatctcccaccctctccagcatgcttgttttacccaggcctccagtgtactgggtcatactgaggagcacctcttactcctcctgctgagtcagcatgatgtcatcagcataatggatcactgtgatactctgcaggatgctcagatagtttgaatctgttcagattattatgacagagggcaggagaattagcatagctctaagacaaaagtgtaaataatattgtccattccataggaatgcaaattatttctgattttcttttgtgattagcttaaaaataagtaaattccccccatttaacagccatatatcgtgtaggtgaggtcttactaatttgccctggcaacaatactgcgcctggcactgcagctgtaactggggctactgcttggctgaatttgcaataatatgcagtcattctccataactgtcatctagtctctgtgccctactggctaatggagagatgtgatgaggaatagaaaccaccactcctgcatcctttagaattttaagagtggcactagtcttccccatcaactccctagaatgtgatgttgtctttgatttatcatcttggttgatgggggaacaggaatgtggagaggtagcttcaggtgctccaaccttgcctacccgaccatgatagctcttattccacaggccaaggacttgggggttactccaactgccaagtacggatgctcctcaacttatgatggtgtgacctcccaataaacacatagtaagttgaaaatattctgtcaaaaatgcacttaatacacctaacctactgaacatcatagcttagttcagcctcccttaaccatactcggaggacttccattagcctgcaggtgggcacagtcatcaggcagcacaatacactgtagatctcacttgtttatccttgtgatgccatggctgtctgggagctgcggctcgttgccactgcccagaatcacaagagagtatcctatgacatagcactagcccaggaaaagatcaaaattcaaaatttgaagtacaatttgtactgaatgagtatcgctttcacaccactgtaaagtgaaagaattccaagcgaacaatggtatgttagggagtgtctgtgtgtccatcccaatcatgcattcaggggctgcggaaatgacataggtggtcttgattagtgaagccttgaggagcagtgaattttcctgctcacgtcctccaacaaggcacgcattcacttgactaagaatataaggctctctttggggcagtacaggcaagcacttaagcaggctttaaacagggcactttgtgaagagggtggagggatattttttcagggagagcaagaaaaaaaatattctcaatatccaagataggacgtcaagctgaagtagaggcaaggaaaatccaggatgctctccaattttctgaaagaaagaatctatgccttgatgggtctacatttggttagttttatttagaggtacttgacagattatggtaccattgcaaatggtatccttttaaaaattccattttctgactgttcttggtatttagaaagtgattttattttattttatttattttgagacagagtgtcactcttgttgcccaggctggagtgcaatggcgtcatcttggctcactgcaatctcctcctcccgggttcaagcgattttcctgcctcatcctcctgagtagctgagattacaggcacatgccaccacaccagtctaatttttgtatttttggtagagacagggtttcaccatgttggtcagactgtgaatgataaattttatcaaaggatgtgtgtatctatttaaaggatgatatgacttcttccttcttctgtacatgtggtgactatactgattttctctttcttctttttaaagcacgtgatctttttctgaccatcaatgctttcagtcctctttgaggaattccttttcattgtgcattctcttaaagtcactttacattatcaccttattttaattgttaatttccttcacatcagtagccattttacattttgttatttaaatttttccttctccaggaaaatccttataaatttttttctatatatttttctccaagtttttatgctaaaaaatttcaaagcttcagtgaagtttcacatcatatccttcacctgaattcaccaattgttcatattttgccccacttgctttactatctatgtacacacacgtgtacgcacacacacacacacacacacacacacagtttgggttttggctcagccattagaaccatttgagatttgtttttggctgagctatttgagatttagttgcagacatcaaggcaatttatccctaaatatttctctttgggatcaggtgtgatgactcacacctgtaatcccagcactttggaaggcgaaggggagaggattgcttgagtcaggagttcaaggccaggctgggcagcataatgagaccctgtctctacaaaaggagacagacaggacaacatggcagaggggacagcacaggggagagcacggtctttgtctctcccca

SEQ ID NO: 94923 - DNA, 72504 bp, Homo sapiens
  misc_feature (1)...(72504): n = A,T,C or G
aacccatgcactctgttggtgagaatgtaaattagtttagccattgtggataactggcagttcctcaaaaaactaaatggaactaccatgtgattcagcaggctcactactgggtatatttctgttgaagagcattgtgatagatgtttcaaaaatattttgagtggtgagaacctcttgtaccgtcattttcttcatgtctgagacctggcgctaggtggactctaaaattcttttcctggcgggagtgcaataaagtgagtatttgcaatacaaggaagagtagaaatatcacaggtaaagcataggaggacagtacaatttcttggaattcctttatttgagcaaatctatgctgtaacaattaccagcaaaaggactacaggtggtgaaggcagtttttacagtggagaaatgcagacatggagcctgataattctttacaattatcacatcagctttggattataaccgggtgtgtccatcagggttccttgctgcaggtaacagaaaccatctgtgggttacctgagcagaaaatgaatgacttagaaagaaagaaatgaggatatggaacaaattgatgcagaaacttcagaataagacttgtaaaatgggctagagtccaaggaccaaaaagatagccaggtcactctgtctgagcattcaggtgagaatggcactgcttgatcccactactttaggtatctgaggccacctctgatggagcctctatgcagctgcctcctctggactctgatatggctcttgtgggatttctcaactgtgcatacatctagttactcttccaaggtcaaatttgcaggttcaagaaactgattgagaaagcctggtcattgtcagagcctgtactgataaggacagtaagagagaggatctggctccttaacttctgaaggaggcagaattctctttcacaccaagactctcactatgaggaatcagccacacacaacatagatttggatgactgtggacaacaacccagcaaaaagaaaaactgagaccaatacaaagacaggaataatctgtttttgcagaattaattgtggggaaagcagtaaactcaaaagttgtacgatagttatataggtatgtcatttatgttattatttatataataagcacttatataacacataggatgtgtgggtcactcttctaagtgctataaaaatattagcttgtccaatgttcacattaatgtattgccatcattatctctattttatggatgggtaaactgaagcccaaagaagttacataacttaaccaaaattacactgctgctaagcaataggagaaagatttgaagccaggagacctggggctccagagccagtattctaactactatactacactgctctttgctatagaagtttttatttgtagttatacttaagaaaatgttcagtaagcaatttataatttatttcattaggtggattctgtcctttgacttattttcattttgtttatataaaatcttgaatgaatagagccttataacatattttagagagaagtcactcagtagggcagtataactaacagttgcaatcaagaaacacgtccagagttgaaagaccagacaaatggcagatgttggatatatactgaaaggaatataagtcattctcccataaagacacatgcaagtggatggtcatttcagcactatttgcaatagcaaagccatggaatcaacctaaatctccatcagtggtctattaatggataaagaaaatgtgttacatatacaacctggaataccatgcagctataaaaaagaatgacaggccaggtgctgtggctcaggcctgtaatcccagcactttggaaagccgaggcgggcagatcacgaggtcaggagttcgagaccagcctgaccaacatggtgaaaccccgtctctattaaaaatacaaaaattagccaggtgtggtggcacaccctgtaatcccagctactcaggaggctgagtcaggagaatcgcttgaacctgggaggcagagattgcagtgagccgagatcgcaccactgcactctagcctggatgacagagcaagactctgtctcaaaaaaaaaaaaaaaaaaaaaaaaagaatgagatcatgttctttgtagcaacatgaatggagctggaggccattaccctaagaagactaacacaggaatagaaaaccaaatactgcatattctcacttataagacggagctgaacatcgagtacatatggacacaaacaacaacgaaacaacaggcactggggccgacttaagggtggaggatgggggatggggaaggatcaaaaaactacctattgagtactatgcttattacctgggtaatgaaataatctgtacatcaaccctaggacatgcaatttacctttgtaacaaacctgcacatgcaccctgaacctaaaataaaaggtaaaaaatatagcagatgttacaggacagttcaagaaaacactccacactcttatgtcccaggggattcctactttaagaaacgtttccaactccttttgtaaataattctttattcgtatccccttatgtgaccattcagtgatttgtcttttagttcaattcaactaatatttattgagtacttagcacagtttgggcactgtgcttaagacatacaaagaagaaataaacttggcctctgccctggaatttctgacagcctaatagcaaaaacatggaatcaacctaaatgcccatcaatggtagactgaaggggaggtggactgatttataaaagtaaagccttttcctgaagtgagacaacagactgctatcataccgttttatgatagtcttggggaaataaaaaaaaaaatccagactgctattagagtttatcaataaattttcattaaaaggcaagatctctgatccttctcaagagactatttgattttgatcacattattttatttagaaaaaggagagatttggggtggctgaagtatagttgtgatacttagaaacacctgttatttaagagaaaaatcatcgtgtttcctttggcagcacatttacaaacactggaatgttacagagatcagtgtggcctctgagcaaggatgacatgcaaattcttgaagtgtttcagattaaaaagacagagagagaaacactgtcattactttttaaactcatttaaaatctgaaaactgggaccttcctttcttaccgtcttatctcactgaccctgatccacagacgcaagggaagctaagcatatgatcactcgtggggtaactgtcatttttctttatctcacatcttgagcacatttgagtgccgtgcccagcactccaaggatttctgtcagcatgtatttattggccttttattagaaactttcttacctcatgtctgctctcatgaatatagatcagaaattagaaacaaaaaatatttatctggtaagcaatttctttggtaactgaactaataggaactactgggacttcctggaagtgaggctaccttttccattagagtttatgcttcctcttttgtagacttcacacattgctcaaatatttgtggcgtgcattccaactacaaggtgcaattgagggacgagaaaagggaaaacttagttgggcagacagctaaagttggtctttggtaaaattcttttaaacagaaagacagcctgaaaaatcaagctacaggcacacatagagtggcctggggaaaactcaggcaacagctgccctgataagaaaggaaggcccaacatagaagccttttgttctttgtgtgattagcaggttcccaggaaaaagtttcttccccttttcaggcacatacatggtgggctctgtgggaacttgcatgggggtggagagggtgattacctagaacccacagttacacaaacaagagaagctgaactttatccttacccaagacatacccacagctgcacagataaggggagctgcacagatagctttacaagtaagttacacaaacagctacagagatgagaggagtttcttataaaagcttttggattcaactgtaaaagtggcaaaatggcaaagaaagaaagctttcttctttcatataataaactttctcttcaacctcactctggtgtccacactccttaattctcttggttgtgagacaacaagcttggtaacacctcagacaacgagaccactgaccactgacccgtttcacaatgacgtactacaggatggtgtatgctgggtattcatacatcgtcatgcaacttcctagttttatgtgtaaggtagtttcctctgtcatcaccttggtatttcccatctagtcacggtattaagtgggtcttatgcgcttgttaagagctggtaagagaagcttaacattcacttgatggaatggttactgtggcttgtatccacaggagctccagctcatgcttaaaatactgtgttagaacaaatggatcagagtgaattctgtaacagtaaatccacagaactgaaaattactgacttgcatcataaactggttgcagtggcaaggcagagagttcagattcgtgttgtactgcggaaagaagaaaccaaagaaaataagtggttcatacacaggggactatttaactgatccaagccagaagactactgagggtgaaaggagcattatcagtaattatgtttagacaaaagttgtgactgtccttagtaaaccaggatagacgtagagtcaattcaaaaagaaagaaagaacaaacatatctaatgtacattaagaacccagggatatcgggttcttaatgtgcatatttattggattgcccagagctttgaccttcaagtataattgagttcttgaaacttagatttaggtttgtggttaaggggcaaaataatcagattccaaatagggttctgcagacaaatcccacaggtcctaaagtctctgggtcttttccttgccattgtggtatctcaggggcttgtgtaggcaatgataaccagttccatacttctgctaagagaaatttggggatcagaaaatctttctctgcagctcttcagagtctctttaatttacttcaataacaaggaaatcagaaatctcaggacagtgctggatgtggcagaaattcagggcaattcacaactttcctaccaatttagagttacctgtctggaatcacttcaactgacagtggaagatagtttataaaattgtaggggaggcaaaatttcaccttcgtccctgtagggtcccagcatggccctagtattaaattgatttaagatattaatagactgacaggagacaaccacacaaatgtttattttacatagcacgggggccctcattaaaaaaaaaaaagacctaaagcagcagttaagagccaattgcttatagagtgaaatggacaaaaaatagtagttgtgaaacatgataaggcgaaggggcttggggtaaagaagcgactagaaagatagggattaacaaattttgtttggacagatttccctcgacttcaactttctgtccttgaagataacaatgttattttatagggaagacatctttcacatgggaatttcatctcctccttttaagacacataatatccatgacagtgatcttgcacctgctgtttttaagtgcctttaatttaaaatagtcaatatgccacagcagcatattttgaggtggtatattattaactccttcaaggctaaaagctttgaatatgccggggtagttaccagactggagaaccttctcagctatttgccacttgtggaatgcattcaaatgtactgagtgcttattaacttttctctcagtccctcactctgctgctcttctcgcctcatctcacataagggaaaactcaggctccaaaagcaaagtgattccaccaagatgacaatggaatcgggacctggtgtccaagcctggtcctcgcacgaggtagatactccctgagatgctggggaagagccatggtagggccactcatggccctcttcctttgrcggaccttggaatccaccttccctgcgttaaagtgctccaccaggtgacgccggaagagaagccagcagtaagtacatgtgaaatccagtagctgaccacagacacgcgagcgataagaaaaagctcgctgcttctttyctcaacactccgccagctgcgtcagaggcccttgacccgcactcaaaatggcggcggcggcgtcagcatcagcggcctcctgcccgtatctatcgtggcggcgacgggacccgcctccctgggcgccggagtcatgtgacccacacaatggctgagtggctactctcggcttcctggcaacgccgagcgaaagctatgactgcggccgcgggttmggcgggccgcgccgcggtgcccttgctgctgtgtgcgctgctggcgcccggcggcgcgtacgtgctcgacgactccgacgggctgggccgggagttcgackgcatcsgcgcggtcagcggcggcggggtgagcggcaagctgcggggatacgcggggggcggcaagagcccgccccgtggggccagccccacaagcccccgcggcgttgccctgcgtttccaccggctccactctccgccgcattcccctagggtgccagtcagcaggcggttggggcgggcccgctgcggggctggggcgggtgctttctcgtttaacacgaaccagacaggcagttaggtttgaacaaatgaggatccggaggtccagagagtataggtgcagagagtaaagtgacaggtctaagtagtgaagtagccggggctggaaccctcgtcccaggcagtggggcacaggctgtcttcatcgcggagatggcagtcggggagcgtcgctccagaaagggccagggagtgcgggagcgtccgtgtgcgaaagagaacgccccagtgggatgctttggctgtgtctctcccttttggaggagttggtgggtggtggagtcgttaagtcccgtgcagttgttagtgcagggtaagaatgggctcctccagagagggtagcgccgaataggatttcgtttggaggcaggactggtgcctcaaggtctctttaaaaggaagataagcgagcggcctgaaactaccgggtactccctctgggcccatgggcttcatggtggccgacctttgggtgagaaggtttttgttttttggttttgtatccgaaattacatctagggctaatgtttcttgaaaatgttaaggttgaactcggatttttggggttgagttggatggagcttgcatccttacattcaactcagaacaagcttgaatgcctgctgcaaggatgacctggtctgtagtgtgaccacaagatataaccttctgctaggggaaatttttttccccctggagttagctgatcctttttgatttttatgttttcattccctaatttgcaatctctccagccgtgctgatgtgtatttcaggggaaacctgtgggccgatgagttaatgcatttattctttgctactactattctcctttttatgtttttgggctaaacctgaaacagccaatatttcatggagtgaggccccatcttttttatagctttacttgtgatactatatctagggtaagagcttaccgaaaaatggaagtmtttgtttccattaggtttattaagcccagtttaaaattactaagatgagaagaatcatttcgtaattcaaagtaggaaactcctacctaatctgatagaatatacaattattagtatccctatatagttcattactcctcataggaactcactaaataatgaaaattcttgcaacattatatttgcataccactttaaacttctttgtggagtccttggttcctagcccaggttgtgccagtaagtgtttagagtgctgtcatttaatcttcatgtcagagagggaaagcggtatggtacagtaagtagttaagaatgtagggccgggcacggtggctcacgcctgtaatcccagcacttcgggcttccgaggcgggcggatcacgaggtcaggagatcaagactatcctggctaacacggtgaaaccccgtctctactaaaaatacaaaaaattagccagtcttggtagcacgcgcctgtagtcccagctactcgggaggctgaggcaggagaatcgcttgaacccgggaggcggaggttgcagtgagccgggatcacaccactgcactccagcctgggcgacagagtgagactccgttcaaaacacaaacaaacaaaaaaacccaaaaaccaaaccaaagcgaaacaaaacaaaaagaatgtagactaaagagaagattgccaagagtgtcttctgggttctgccacttcactgtgtggccttggtgggttatctattataactcctctctgcctcactttctttttttgggatacagttatacctgcatggtaggagcgccgtgaggatagacctaaagtacttaggatgatgtcttgcacattactaattttggttaataaccattttcagggattagggaggaggaagttatttcaaggccactgaatgatgaaatgtccccaaggctttttcctgggcctgtaaacagttccaggcctcattcaggcagtgtggttagtaatcccgtgatttgctattgctagatggtgcattttaacatttggttatattgcctttgacttatgctgttgtgttaggtgtggctataggtttgcaataacatgattggtgtgtttgcctaaagccgatactttctctgttaaatgtgggagtgcatagagggcaaaagaaaccctagacagcaaaacgcacagtattaatggcgtagcgtaggacaggaagcattgtttacctagggtcaaggatatattagtgtgcctatacagtgttcatttaaagagtgcctattttaatattggagcctctgctaggttgtaagctctttgagaaatatgtattttaaaaaatttgtgtatataacacttgcctttattgagaacttactatgtgccaggtaatgtgccaagtcctttacatacatctaattttagtcttacagcagttgaatgagtaagatagcccactttacaataatttgcctatgattacatagcttattaatgatgaaatcaggatacaaactccatttgactcaaagactcctatttatgttgccagtaccagtgcaacaaaagacccataaaatatttaataagtgtttattgaataacaaagaatgaggatacaaacttgaataagatacagtccatgtccttaaggaactaagaggtgagtcagaaaaataaaggagtgccggggttcaaagtgttgtaataaagatatggacctggtgycaaaggagaggcgcttacatcaaatcagtgagcagggccagaaggcatccttccttcaaattccagaggtggaatttgagctgaaaggtgaattggagttgtccaagagaggatgtggggtgcattccaggcataagaatagaaaacgttgtttgatacatctaggtagaaggtgtgagagtgataagggataaagtatcagggttaggagccaaataattaagggatttgggtgcaaaattgagcgatttgaactttatcctgaaagcttttgggaaagggacggtcttagcatgtttacatggaagagtttcgtgattacatttgtattttgggaaggttactctcgtaagtagcatggaagatagaatacagggagaggcagaagggatgtcctgagaccacttatactgttctcataagtgaggagggcctgggtaagtcagtggggttgaagagtagaggagggatttgagagctattgaggatatcttggtgactgagggtacatgggaagtttggacaaaaggtggcccaagtttatggtttcggcaagtgttggttactgagacagcaagttcaggaaaaggagcagatacatgcaaaagtgctatgtttggtttgggatatattgaggtagatggaaagagtggctagagascagctccatgggtgtttgcctcactggtagggactggggatgttttgggygtgacagagtagatatgggcacttaccagaatgtcagtggtagcatatatgagaatataaaatagaaagttgaaccccataaaagtattttgtcccaaccatcatacatacacctggcaaagtgtcagcagtttgaacctaggactgtctggtttacaagcctgaggctactgtttcatgccaaaaaccggcctctttttatttattttttgcttatattgcctcccaaaggatagattatgggtcagttactggttttgtgatttcttttttcaaatagttgtatgccgtggtccaggcatgatccagtattggtccctgcgctgtctacccttgtctttccatgcattctgatgccactcttgtgttaagttttcttagtacagcctggtctggagattattgctagttattcttaatagtaacaggtagaatttatgaggatggggaaagtagtgcttcctttcagcattgctgcttgtgatgtttttccggaagatgttaaggggaaaaattacctgacattcatccctcccattttagtcctgagatattgttgtcaagtggtctcaagatagaaaacctgagtttcaagataagtttgtgatcatgaggttagcaagcttacctcccagttagccctcatgccagaagaagagaacttttttagctgtcggacagacagcagccctacttgcccaatgattggcacagaaagggcagacagacaacttgtgaggaacttttcctcagcctgaccttgcctgaggctaaatatgtgtataccaggtggtgtgcgtgaacactgtagacagatattcatgaytggatttcttttattcatacttttgaaaacttttttttttaggcaacctyccgacttctagtaaattacccagagccctatcgttctcagatrttggattatctctttaaggtaatgaaaacataattatttcatggtacctgtgatattttagaaattggatggtgaatttcaccatagaatttattagcctcacaattctagtttttgaaaaaatgrcacattacttttggaataaattgctatttgaagttttgcttttgtttttgcgtctgtaaaacctaaggcagtaattagtaattgtcttgaagcttcatacaatacaacactatgttaatactgttacttcttttcacagccgaattttggtgcctctttgcatattttaaaagtggaaataggtggtgatgggcagacaacaggtaggagaatttgggagataggatttctcccatcaacattttaatctatacctcagcatatggactgtgatttcagaatatgtgtaaacaataccaacacttttgagattgattgttgcttattagagttttcctcattttttaactgtaattatttaaaaatattatatagaatatgactggtccatcaaaaacaatattcaaacttcaaattgcttatttagttgaagtaatcggtagtaaacaaatccacagttttctaaaacctatatatacaggacagagcatagggacagttttgaattttattgagcagttagaaagattttaatttcgtatagaacaaaaaaagtgttattaacttaaaatatgtggtaaaaatgatacagcttttttttcttttaaaaacaaaacttatctttaatcactaaatcttcagtcttcattgtcactattttgattggctttatgtagtccatgttatcaactggcagtttataggccttttgtttccaggaagaagaaaagaaattctctctatgattagatatagcttattatttacagaacagattccattataatgaactctagagtattacttgtattcctgctagtgatttggaagtaactctttgttgaacagatatgtctrtgtggtggtattagtgtttatgttgaagaaaaagtgcaaagcaaaaacaaaagaaacccccataacagaaactttcttcaagctattgcgttttactgttaaaaccttttaggcagaattgacaatgatggactaatttcacttgctgaagctaaattagaggtagaggtacataaacaggcagttcttgtgaattctgatgtttacctttaagaagaaatgggcaagggcctctcggaaggccctacttagcaagggcagatgttggtgaactgtgggaatatacgaggactttgatagcaattacctacctcagtgctaagacaatgtaacctctactaactgcagatgttagtatagaattttgttatttttagagtggatatgtatactcattcctttttttttyctcaaaactcttcctatatcaagacatattataggctaaaggtgtgggttctgagaacagggctcacgagtccagggattcatatccagcgttgaaaagctgaaagttgaggtaatcagaacttaaagttggacatggggatttgmaaactacagagagatcaaaagcccagaagcatgaatactgggaatttttagttatatgaggtgataacatttctctcagtactgcttgtaayagaaggttgtggttttattaagacttttacaatgcttaagataataaaaaaaggatgaaatgatatgcttttatcatccatcctttagttgtgtaagattatgatttccccaacttcaggattagaactggaatactgcttttgtgaagtgtgtgtctggggtgggggtggggagtgagatggtcctaggaagtaccattcatgratcattacttccgtttttgctctcctctattcagayrrcrctgagccctcccacwtgcattatgcactagatgagaattatttccgaggatacgagtggtggttgatgaaagaagctaagaagaggaatcccaatattacactcattggtaagaaatgaagtttgcaatgtttcttcagtctcktttcctttaacttttaaattctgaatcgtgttggtggaatctctattaatacggaagtactcataatgtcattaatgctaccagtatgctaccagcagcaaagcatgtgccaggggtgatcctttctttgcccttgtatattatgttgaatccttataatacctgtggagtaaggcatgactctttccattttccaggaagaagcagtagaagcttaggaagattatgccactgacctaaggtcatagacagttagtaaatggcaaaatcggtgttagcacctaattccatgtttcctatgatgctaaactactttccttcacaagatctgtcatcagtatttataaaagggtaatactgttcacaaaaatgtatattacatgcagtagtacacctaactagttacaaaattgtatattgcatgtagtagtgaaccctatttttagaaaaggtacatacaaaagtgttttttgtttattagttagtttttgaacttcaataatgtgctggttactgttctgggactcaggaagccaatcccgtccccaattcctgcacctgtggggcttaggttctattgggaggatcattggctagttgcttaaatgggactatgtacatttcacagttctgtgagaatgtgtacagagcttgtgaagtatttcaaacatcaagagtgatgggatactttcatcatttgaaatgaatttgattttttgaaacaggcttaaattcaaactaagttaaatgaaattaatgattcattttaaagacctgatttctagttatttaaaaaataattttctcaacaatcaggttaatgaaaagtaatattttctaagttaaaagaaattaggagtaagtatgttctttataaatgggcttttgtaagagattccagaaatgctgtgagcagtaaaagcatcactgaattcagcacatatccactagactgcttccaaggtcagacctcatttaaatgtagaaaatatggcatgctaaaccatgtcctaacaaagacttggtaggccttcagattgcatttagcatttcattgttttcaagaattctattactttaatgtcacatttcttatgtaatacacttgggtgttcctcctgagtttagaaaataagcattttgtcattttgatttttatttttttcagtggtgaactagtttggtaatatatttattgctgaggaacttaactattgagcctattttaatatattagtagcaagttaaatttagaattataataagtacttttctactcttcttatttttttacttaaacataatcaggattattggaagaatatggacttatttgatgtgtatcacttaacaagggtatatttctctatggagtcattgtcatttatagtgatataagaacaaactagttttgctaaattagattgcctgactgattaatattttaaggaccctaaattgtaagaagatgtacaattgaatgataaatttgtgttatacataactcaaaggagtagtttggcataagccttttakaattctttgatttgacctcaaagaacagaagttgaatattgaacattccaacagtgagtggacatgttaagttaaaacatatggtacatttctttctattggtaagggtcttggagagaggtgtttgtatttgttatttttcttcttcttggaaagaacatttgaaattatgggacctgactctagggatcaataaggaattatagtgtctatagattggaaaggatttcaataatttttatatggtatataaactttcctttagtcagatctgtattggttttttgctagttgaatgcttttcttaaaaaaaatttgttttattttcaatagcrccagcaccgttatacctcctctacctttgcctcctcccttctctctgcagggttgccatggtcattccctggatggctgggaaaaggtttcgactggccttatgtcaatcttcagctgactgcctattatgtcgtgacctggattgtgggcgccaagygttaccatgatttggacattgattatattggagttagtaatatatttaaaatatgattcagttttggacatttgtttgtaatttagaaaataatttgattctgtggtactttttgactaaccattttatgycatgaggctaatttgttctaatggtgtctgataataacacaaactaagtacctgtgacctttaattgctcccctttgcccatcccagtgttcccacttttgaaaactgtgttgagtgtatacctccttcctctgagctgggtttttttttttttttttttgtatcaacccaactcaaattctccttcaaagctttccctgctttctctggttcctacaacagtgttgtgtttcctatacagcttatggggggttagtctcattttatcctcttgttgtcttaagccaaagattggcaaactttttattaaagggccagagcataaatagttttgggtttgtgggccaaaaggcaatattgaggatcttgaggtaaatatatagccatttaaaatgtaactatttaaaactaaaaacacttttagctctcaagttgtaaaattacagatgatgggccagatttggcaggctggctgaaatctgcgttcacctgtcacaaactgttagttaacaccttttaaggatttgaaaagtatgaaaaatgatatcatgtccagcttgtctcttggctgggtggaggcatgccccaggctgcatcgtaccccacagggccttaacacacacatagtgggtctccataatcatttgcttattaatataccatcagttaaaactaatacttaaacattttcatgcaatcatgacttagattatcagcaaacaattattgagttcctactgtgttgcaggaactgtgactgtaatatttgagggctactaagattaataagctsttgtgttcagtaagagaagtagatgctggaacatataaactgtaatactacatgatgatacagggcatgaggatgagccaagggctggaggaagtcagaagaaagaatatactagtttttgctatccttttccaaattatgactgaaaaattagtttatatttgagaactttccttttttttttacactgtcacccggattggagtgcagtgttgtgatcttggctcactgcaacctctgcctcctgggttcaagtgattctcctgcctcaagtagctgggattacaggcacccgccaccacacccagctagtttttttttctttttattagagacggggtttcactatgttggccaggctggtctcaaactcctgacctcgtgatccgcccgcctcggcctcccaaagtgctgggattacaggaatgagccaccacgcctggccggagaactttcttaaatgtcaggacatttataacctgtagtgagactaaatgtaggtttggtctaatagctttctcttatggtacagtcacaagtaatgggtgattcacatcttgtttagactcatgataacaaatgctatgatgaggaggttcattgataaactctttcctgtatcattggagtaaaaagacctgcacctggattctagaatcgtctcttgttattaacagttttctcaactgtggagttatggaagttctttcaattctaaaaccccatgcttcatgactctaaacctaatagatgtatatatgttccttttatccatcctcattcagagttgcttttgtgactagtgtattactgtgattctctgtgtatgcttaaaaatatgccttctatacagtatacatattaatacttggctttcagggatcttgtcataattgttgtaacagtttccctgtctattagttctccaatgcctagtatagtttctggcacacattgtactgtcagtatgtgttgaatgaattaatgaatattccattgttgaaaatctttggaataaattactttttgaaaaatacccactaaatattttaaggtttttaaaaataatattttaatttttaaaaagttgtgctatcttataactatctataaattctatggcaggatatcccataaagttaaaaaatggcgtatcagataatatgaaagatgatgagagaaatggtatcgtaacgataatctrctttctgacattttgtaactttcaattcagacttttttgactttttgttttgcagatttggaatgagaggtcatataatgccaattatattaaggtgtgtacaactttagtatctttytgtttttaactttttagtgaataattccttatggttccwaacacagaaaatagtaggaaatttgtgttggaaayaccgtattttttatactacagttatttattttgctggttgtgacataaaattcaagcaaaatcttaacaatgtttatattcctgatattaaagcatatgtaattctttgtgagccccgaattacctttgtctaaagagttgtgttgaatttttctattttaaaattcattagttttggaattctgataaattttatgaaacaattatatcattttagatttttagaacttcaagaaatgtagctttttttctttgtcttttgtcaaaacttatggcatatattctaattcttgttttctattggagtgtgttatagtacatgtttctctttgtgattagcaaagaggtagcagtaacatctgccaattgtgttatttttgttccacttttcctatttatctccatttaattctcacaaccttacctatgaggtaactactgtaattgctattttccaggaaaggaaaaacagaataataacttctgccattggaaaaaaaatggcagtttcacttttcaggtggagctaatctttagtttacttttcacttccttttgtcttcttgtatgtatcttttctctaagaaatataattttgggacagtattttatttcaagttttcaaaaatttttatattaatttttttttatttccataggtttttggagaataggtggtatttggttacatgagtaagttccttagtggttatttgtgagattttggtgcacccatcactggagcagtatacactgaaccaaatttgtagtcttttatccctcacctccttcccatcctttccccgagtccctaaagtccattgtatcattcttatgcctttgcatcctcgtaacttagctcccacttatgagtgagaacatacgatgttttgttttccattcctgagttgcttcacttagaataatagtctccaatcccatccagcttgctgcaaatgccattaatgcattcctttttgtggctgagtagtactccattgtatacatacaccacagtttctttatccactcgtactgattgatgggtttttgggctatttccatattttcacaaatccatcaatcctgctactgggtatctacccagaggaaaagaagtcattatacaaaaaagatacttgcacatgcgtgtttatagaaaaaaattttctttgaattggatgttttatgttcttaagtagataaggttcaatacatttctttcatctcttcattcggttaatcatagagcatttatttgctcaacactggtttgtcaggcattgtgtgtatggttataatataaggatagagaatactgttttctgcccaaaaggattttttgtattggggagggtggttataaagtcagatatagacaattaaaatgtgtcataatttggaatgtgtcaaataatggaataatacacctacagggttcttaaaaggcgcacagaggagatgacacctctccctgggttgattagggaagtcttttagaggaggtgatgtgtaatttgaatcttcaagaacggatggataggaactctccactttgctaaggcaggggcatagcatgtgcaaagaactgaagattgagaggtaaagggatatgggggaaaaacaagtcatgaaagatggattagacaatggaggaagagtgggggcactgacccccatcagtaagctaatgtattcactggaataatggctttttttttttttttgacagagtctctctctgtcacccaggctggagtgcagtggcgccatcttggctcactgcaacctctgcctcccggatttaagcaattctctgcctcagcctcctgagtagctgggattacaggtgcccaccaccacgcccggctaatttttttgtatttttagtagagacggggattcaccatcttggccaggctggtcttgaattcttgaccttgtgatccgcccgcctcggcctcccaaagtgctgggattacaggcatgagccactgcgcccagccaataatggcatattttaattaatctgtagttgtaggcgtggagaaggcatagattgagaagatctattgcagccagagctaggtactcaagggcaattccaggttgaagtatgctgatgggagtgtggtggtgggagcaggttgggtgggggaggtggggcagtggagctattaataagattggagcacagggattgtaagtggaaagtcatgcctgctgtgagcacaggtctgataagagcagtaaggggacagagcagaagccaagttggtgcatgtatactggataactctgtaatgaggtagatggtgttgctacagcatcttcatagtgaaaggtgatgaactttttaaatacccaaatttgacatttcaaagcttaagttttattttcttgtgattgtacacatgtctctcttgtggtcatttcatttgagggaaacattaaaagtattacggtttccattttcttttaaactaatgaaataagacagggctatattttatgttatttgaacttttttactattaagagtctgttgctgactccagtgcattctaattcaactaacctggtttgaaagactaattgttgctctaagacatattttcagtgtttcagacagttcagacttcatttccttttttttgaaccttgagttttcttgcagtaaaatctctcaggatacaaaaactttttactttgtgtttgccatttttttccagcaagattttattgggatctgtgttccgtttgttgaaatgcctgttgcaggccaggctcagtggctcgtgcctgtaatcccagcactttgggaggctgaggcaggtggatcacctgaggtcaggagtttgagaccagccagaccaacatggtgaaaccccatctctactaaaaatacaaaaaaattagccgggcatggtggcagacgcctgtaatcccatctacttgggaggctgaggcagaaaaattgcttgaacctgggaggcagaggtttcagtgagcactccagcctgggcaaaaagagtgagactctgtctcaaaagaaaagaaaagaaaaaaaaagaaatgcctatcacaaagagttcaataatgacgaatgtaggtgctcagattggataaccttaatgaatgtatattctttatgggataataagatgacccctggaaagaataaggatttgtttttaatagtagaaataaatataatacaaaggagcaatttatataaagatgacaagggtattgtttctttgaagtttttttttttttttgctactgatatgtaagatttatcgtggttttcagtggtgttcttaagttttctaaattgtgtctggaaaatctcatctaggatctgaggatagtggatggaaatggaagtgcctgggtctttggaccttcattcacttcaaccagaacaagttcatttccatttgtcttataaatagagcttctatttaagctttttctggatgagaaagttccaaaacaaaaacataatctgaaaatatgttagataaaactgctcaaaagaatgctgttcgtaatgacttatggagggaaacttatttagaaatcatagcatgtagacttgtaaattttggaatgttattcaaatacaatgtataaaaaagtaagcagtcttactgggattttctaggactaggactagaaagactagatccatccgtagtgaaaaatgcaaatttgactaagttgctcttcctcttctctgtaagaataaagaggccgggtggagtggctcacgcctgtaatcccagcactttgggaagccaaagtggcggaccacctgaggtcaggagttcgagatcagcctgaccaacatggagaaaccctgtctctactaaaaatataaaattagccaggcatggtgccacatgcctgtaatcccagctactcgagaggctgaggcaggagaattgctgatcctgggaggcagaggttgcagtgagccgatatcatgccattacaccccagcctgggcaacargagcgaaactccgtctcaaagaaaaggaagaacttcagggtgatgaaattcaggattgatcctcctgctagagggataggggttctcaatcctactgaatcttgagagttggtctcggtttgctacaaaggatctgttcatgctgtagacttctagggtgtcctagaactcaactgatccagtttgaaagatgaacttagactgccacctctaattttcaccccgttttctaaaatcctataatatatctattttaagaaactgtctgttgaaaagtataccatggatttaattggagcttttattatttgcgtcctaaaagagcacattaattggaaattgccctagttcagagaagttggaatgtgaagagagagcttgtgaaattctttgttctttcttaatttcttcaaccagtagtattgagcatctgctgctatgtgccagagatttccgagtccttgggggctatagtagtgggcttatttgtatccattcatcaagaactgcttgtggtatgaaatctgatcttcctgatcctgagtaaaatgatgtctccttttctctgctcttgatttacatataggcaatccatacattttggtatgtacttgccctttgattttctagtatgccctgttagttttggtgtcctgttgagtgtgtttgccacctaagggtgagggctccctctgatacttcttttagagtcctcatggggcccaagcatagtactgagtagtaaagtaggtactgtttgtgcttygtttatttcctgttaaaatttagcttgttacttttaatttttgtgggtggacagtcctacaggtaaattttatttgctctcctgtttaataatggcagaatatttgaagaccgtggaaaatacttaaaatgataagttaaagcattttgccaaatggtatgattagtatgttacccatttgattattgtgtctgcataggagacttcctggaagaatgcatagcaaaataatggtggttatttcagggtagtaccatttgattatttttgtttcatymccccccccccatatttctatggttaaacgtaattttaaagtcaaagtgaaaatcctctaaaacattttaccccttgtgttttttttttctttttacattcctagtgaagtaggttatcttaaaggtaatgcttttattttccataggagggatgtttctattgagaaaatatagtattgaaattatcatccatgaggtcaggagttcaagaccagcctggccaatatggcgaaaccctgtctctgctaaaaaatacaaaaattagccaggcgtggtggcgcgtgcctgtaatcccagctacttgggaggctgaggcaggagaatcatttgagccctggaggcagaggttgcagtgagctgagatcctgccactgcactccagcctgggcgacgagagaagcctctgtctgagaaaaacaaacaaacaaacaaacaaaagaagctattatccagaacgctgatttgtaaagataactttatctatcttggtcataaattcaacagctaaaaattcatttgtatcctttcatatgttctgtttcttactccaaaagatattaagaaaaatgctgaattatcaaggtctccagcgagtgaaaatcatagcaagtgataatctctggragtccatctctgcatccatgctccttgatgccgaactcttcaaggtggttratgttatagggtaaggcatgttttacttggaaaactagcagtttctgattgcttgctctgtgtatygactatctttttcttgccttctccccatttgattacattctcagaaggtagctctcctgtattyacttacctgaagcatgcatggctcatagttcattattttctcttttaaatatattttaggatctttctatgacaaacawgtattgatagcttttaaaaagcatgttgatgtttggaataataaaacagggctttgttttagattaaggggcagagtaatacctgtatttaattttagaaattataaaggcaaagttgtgaaattagtttcaaactctcagatattctgtggttggaagttcttgcatgaacacttttgtaaatggttcattgtgatcactgacaataacttttgtcatgcctccttagtagtatagttttgatgcctactctttattccatttctgccttttagcactctgggccctgacctcattgggttcattttttttaaaaagtgaatttacattttttctaccatgactcaggatataaacatttgaaaaataggatatgtatgtttgtgtgtgtgtgtgtgtgtatgtatgtgtgtagaatttgttctttatccagtgtgaagactgattgatctctccatgtgctttatttttttaatgaagaattttgaatgtacacaaaaataggcagaataatacaatgaatatctatgttcttatcactcaacctcttgaactgtgaatccatgaccaattcttcatccatgcgtctatctactcctcttcctttcctgcctacattactttgaaagaaatcccagacattatttcttccataaaaatattactgtgtatgtgtctccaaagataaggattatttttctacttaccataaacaataccattattatacctaaaatgtaatagtttttgatattaaatatccattattatcttatagttttatttgattgaatctagatccatttaaaattcatgcattgtgattggttgatatttaaatctattctaatctttatgttcttgctctttttctttcttttaatttgttgaagaacggggttgtttgtcttacaaactttgtgtcagtctggattttactgatttcaacccctacagtttaatataacttgctcatctatcctttttcaatggtttttgaaattggtagtttaggttagatttaggttaggttagatttaggcttaatttttttttgcaagataaaatttcttaattatatttaaacattttatacattgaaattaaaatgaaagttttgctgttgttaaagctttcataaatagttgaagtcttgaaggaaaacaaagttgtgttaatcttaaatatattttcttataaaaatattgcatgaaaatatgggttttactgtatcttcatgaaggacttggatatgtacttcattttttattgatataggtattttaatgtaatgaattttcctctgagtactgctttagttttatctcatagggctgttttatcattaatttctaattttattgcactgtggccatttaataccaaatgtattatttacatttttttgggaaatttctcaggagcttattaaaaaaaaatctgaaaaaataccttcgcttttttcttgactatctcaagagcatattttgatttattaagatgtattctttattaggatacagaattgagtttatatataaccttttggttatattgttcaggtattttgtatcttaacgattttgtccacttgaactgttcagggctacccaggtgtgtttgtttccttatgttagtggggtctatttctcctttcaatcttaggcagtttttgctgtgtggaagcttctgctttgttatttggtacgtaaatactggaagcttctgctttgttatttggtatgtaaatactgatgaatgttttatcttcattatgatttatttcttatcattagaaaatgccattctttgtctcgtttaaagcttcttggcctgaattctgctttctgtgtaactaagagatctatgctttcttttcattaggatttgcctaatatatttttgcccttttattctttacctttcaaggccgttttcttttatgtgcattgcttgcatatagcatagagttagattttgcttttttaaagttcctctgaaaatctttatattttaatgaatgagttaaactcatttttaaatataactgatgtttgtgttttctatactactatattgtcttttgttattgaatgatttatactatccatgtactaatacaagctattctgctatgtgatttgtttactttgcacttatttaaggaggtgtttcttttgttatttagcaaggtttggtttttgttctgtcaattacatttatactgatttataccagtattttcaactgagaataattttgcctcccagacggacatttggcaatgcctggaaatatttttaattgccacaaataggtagggcggtgccactggaatccgatggatggaggccacgaatgtttctaaacatcctttagtacacaggatagttttcccataacaaaaaatgatccagcccaaaatgttaatagtgctgaggttgaggaactgcttcatactaatactcttggtttcttcttcgtttagttattgtctgttggtttactatgagcaatactaaaattatttgataacttcttcctccctttttctcccctaccgtggaattttaattaccagaattatcttagttttaatttttgtactcttacatgaacttaagcttctactatattgatttgacagctacaagttttaactgtttactcccaaataatctgcaaacttagtttacatttcaccttctttccttcttgtcctacttcatgtagctgtattagttgtactttagccaagtgtgtaatagttataatttaattactatttcttttaatctcactctaccattaaacatattaaatgctcaccttcaagtcctttgccaaagtttctccctcattttcttggatatcagaagtgtaattatctattaaatgtctcagaaagtgctaatggaaacaatatttcttgatgtgttcagatgtttgttgatgtttatctatgacctttatacttgaaggacagtttgactggatataatccttttttaattctcaaatatgtgtaaatatatcataaaatttgctccattagttatttacataaaatgttgctattgagaattttgactccagagatatttccttttccttataagtaacttgacacaattcctttatgcccaaagaatatttttattcatctttaaagtttagttgttgtatacactttaccatttccagatatatagtatatgctctcttaatgtctatatttaagtattttcttatttcagtaaggtttacttaagttataagttaaatcattattccactccattactttggttttctttttagaagcaccagttatactttggtcttatttgcatatgcctttattttgtatttctctgaatttttctctatctctttatttatgttttctattattttatccttactattctatattcctcactgtgttttccacagtgtctgttctgtcttatgttccttctagtttagccttcatttccaaagtgtgtttttgaaaataattcttctataattctctcattttaatttcctatattgctaacaattcatctttaaaatttttaattgaagtacagcatacatacatacatatataaaagtacaaaaatcatcggataatagcttaatgaattatcacaaagtgaacgtacctatgtaacagccacccagaaaattatcagtgcccaagaagcttggttactgatatctcctcttggaaagatttttccttggaaatctttccaataattaagctctctttttgccttaaaggtaactactaatctgacctctgacaccatggactaattttgccggtttaaaaactttatttaaatggcatcctatagtagctgttatttcagccaatattatataaatttgtgagattaatgcatgttgttatatatagaggtagttcatatttattgtttagcatccaattgttggatgctaaatgtagcataccacaacttatctgtgtattattttttaatggtcatttagactgtttccaattttgggctattgsaattttgttcaggagatatttcttggctcacatcttcataggaagactattcctccctgcctcattcatgttgtgcttggcctgtgctatatctgcagatttttgttttacagttacagtactttctagggtctgtttctgctgggccccattcttcttagtgactgaaagttgttctccctcaaacaaagcgttcctgccttattcaacttggattctacttcaaacagcttattttcatgttgaagctctaccattcctgattatttgctaccttctcctgaaattgttattgcttaaacctgtattgttcaatacagtagccactagacacatatgtttaggaagcacttgaaatgtggctagtttgagtttaggtgtgtaataagtataaaatatacactgggttttgaaaattgaatataaaaatattatttacaattgttttacactgattacatgttaagtgataatattttggatatattgggttaaatatatcattaaaattatgttctccatgtttttctgctttgtaaattcaattaaattttttccatttatgtgttttattgtggtaaagacctttgctggtttttaatgtggctgctagacaacttaaaattgtctatgtgtggttcatatcatatttctaccagacagatctggtttgaactgttacagtattgggtttgatctcctaatgaattcactgttttgagcattgacccctaacttcaagcctgtgaagatgttcccatcttcctgagttggtcttctatgctcccccttagggtagggtctactccttttgtgtgagtaccggccagtcccctttcacttctagtttccatataccatctgctgatcctgggccatttctgatgctgcgaggctcctggggagagtccctgtcacctggtttgatggcagtgttatctgtgagtttttcctttcccttatctggttggtcagtttggtttcaggaggagtactgaggagcttcagaaactgggctgctgtcatgttctgccttggccagaaattctaattttttaaagtacaaatatgttcctctgttaggataaactataaagttggtttactttcattgatcttaattttgtctgttattgaagtttgaaaaataatgctgtgaagtgatagagaatgtttgcctacttatatacattaaaaatttatattctttttttttttttttttttttgagacagagtctcactctgtcctctgtcgcccaggctggagtgcagtggcgcaatctcggctcactgcaagctttgcctcccaggttcatgccattctcctgcctcagcctcccaagtagctgggactacaggcacacacctccacgcctggctaatttttttttttttttgtatttttagtagagacagggtttcaccatgttagccaggatggtctcaatctcctgacctcgtgatccgcccgccttggcctcccaataaaaatttatattcttaaagagcctttacattttgttgcactagtaataaatctatacattaagaaagacccagattttagtattagttctgcctttctttgctcatatcatgtaataaatcatttgggttttgaatgtggtaacagtttcatcattttctgaatgaaggatatatcacctattcctataacttcaataaagttactttttcattttataaatataatatgctcattatagaaaatttggaaaatgtagaaaagtataaaaatagaatttcctcataatcctaacatctactgattattggtaacatgctagcatattactttacagtgttttctttaatatagaaatatattttaaccaaatacaccaaacatgcatttggcaactagacaactggatgacaactagatgagtattaaaaattaacatttggctgaggtaccaaagctgaatttcatggaaatagaatggagttgtgggatagaagaataaatctaaagtgtaattttttgaatttatattatttaaaagactagtagccagatttttcaggttgggcgttatagttccagaacaatgattgcttaaccctgttagatgctagatttctgttggtatctttgtagtgtagatttgcaatattgaatagatgcctgctttcacctgagtttagtgactcagtaaaatcttagtggaacctcatttttctctaatacttctttttatgttctccagtatatattgkatattattttcttactcatgaaatcctgggatgccaaattgatattgtgccctaattcatcttcactaggtataaagaattaccaaataggattttttcctaaaagatttgtgacctaaaagggaattaaataactaaaaagtaaaacaagtattcacaatcattcttttgatgttataaatactactacaccaaactacaaagattagaattatgatataacttaatctccattattttgcttgcattgttttttgtaaataatttttaaactaaaaagtagatgctcttattcctacagttatttagctagtgtgctctcttattggattgtcaatctattttctattttacatttaaaatttattgtttttattcctataatcagtgtcttccacaatcatcattatgggagtattttactcttgcagtaatgaatatgcatttatacttccaccaactgactcccctcccatcgaatgatagagtgaaggaggcattcattttctggggcagtttctcacctgctgcactattgatattttcaatggataatttttttgttgtaggggttggtcctgtgcattgtaggatgtttagcagcatttttggcctctcttctctagatgctagtagcaaatatccctgaccccaggtgggacggttgaaaaaaatgtctacagatagtgccaaatattccctccagggacaaaaatcatctgggttgagaaccgccactgctctgatacagtaatttagttttcccaaggtagcttattctttttattcaagaaataaccatgtgtgggttttgttttttgtttttggcctgggagtaaatgccaagctatctttctgtgttctaaggacaggagtagtggggagagtactactttatataaaggtttcactagtcttatttttggcctcctcctcactcgtttactattgccccaagctccttagcttcccctgggaagtctgaatcttatctttacttcattctcctcttggagtgttctaggctgtggccctctctgctacctccatccttcaacatgcttccatccatcttgtgagctccagaaatagattgaaatttcttatctattgatgattttccttcctatcctgtatgctgttgtaggtttatccccttttgttttctttgctgtcattttaatggcatgctgagacaaaagggcataaagcagatgcttagattcattatctacctggaagctacccaactgttttaaaatagaaaaccttggagaagactcgtatttttatatactcaacaaatctataygtatataagtgccacgtcgtgaccttttttcattgacttccaccctttttttttctagggctcattatcctggaacccattcagcaaaagatgcaaagttgactgggaagaagctttggtcttctgaagactttagcaytttaaatagtgacatgrgtgcagrctgctggggtcgcattttaaatcagaattatatcaatggctatatgacttygtaagttattaaaaaccttttagagttcttatcaaaaaaaatttaaaaacataagagttagaaaaaaatggaattccttattcttccagcctagattcaatgattgtaaacattttgccttgttagcgtcatctatttgtatacctatacctaatctatatctaattttctatatttgaatatagtctatattaaataaagtcaggtttattgaggtataatttatatgtagcaaaatacatgcagctctctgatttttgacaagctacwtgtatttttaataattataaagtaaatagtatatgtaaggacactttatctctaaatattttagcatgtgtctccaaaacataaggatattcttttacatgatcacagtatcatgttttcatacatgagagtgtttttaattctcagtctatattcagattttcctaattgtttcccaaaaatgtcatttgtagcttttttaaagaaaaggaatagtcaagcacacacatattgcatttaaaagttacacccctcaagtctcctttaatctagagtggtttccttattcctcatttttgatgacagtgatctgttgaaaagaccaggctggttgtgttgtggactgtctgcttcccagcctgtctgattgattcctcatggcatcacttgatatgtgtaattgtttgtttaaaaaacagatgttcttaagggagaacacaactatttttgttcctaagggaagcatttcttaaatgctttgaaaaacacttgaattgtgaatagattccaattagctttttttaamcaatgataaatagaacaaaaacaaaccaatatttatgtatttgttgtgatgttaatgtgggttgctgtatattgtatttgttctttttcttctctttgtgaaagaaaagacacttaggagagtttggttataacttaatttggtcttaaaggtaaggcatcttcatggcagagaatttagaaaactgaagataggtacaaagaaagaagcaaaatcacctacrgtcttatgatccagagctaaccatcctaaacawttttagtgaatgtcctcctgttttatattggcatgtatacattttaaatacaaaattgagaccatactatagaatctgtttaaaaaactgcttttcacttgagacgacattaggaactttttctcacatttacctatatttctacttcatcatttttaatgcattttaaaatattttgttacataaagcaccatttcccagacttgccttaagaagcacccgagacactcgttgttataccttctccttggcagctgcccagacattgtgaatcagaatctacagggaaggctcctggtattctgtccatctagtcagtgccctcaagtgattctgatgccacacaagttgggaaacactgatgtggaaaatatattattgtttattgaatattctcctcttttagaattggaagttgtctctgttttaattaatagctttgtacaaactgaaatgwtcaattgtatacaaatatctttgtatatgcccatgactattttcttaggctgtattcttagaaatggaatggtcagaaatacatagattttgaagggttttgtatgtattttacaaaatgccctccagaaagcttgtcttgagttatacatctatcactagccagaaaggataccacacatcttgcaaaccatgggcaaaattataagaacttaaaatattcactagyagtaaggtgttttgaaaattaggactattatttctactttgtactgatagaattagaaggctttgatttgctaagaatgtcagtctcttttttttatactggatgaggacttgataggaaaaataaaattctgtgggtaagctttgttttttttaatctgtgagggacccaacaataccaagttcaataacttcccttttgtccttggatttcctgagaagcagagagtcaaagttttagggtttagcacctgctctggactgttagggcctgatcatctgagaaagaatgggccacaaagcagatcagcaattagatccaattactacttatagatgaagtggaatcatatttaatagcaatactacggcccagaccttgttccatactcttcctatgcattagtacatttaatccttacaaactcacgtgagagagatataattattatcctcattttacagagaggttaagtggtgaaaccatggtttaaacccaggcagtctgactccaataattctcaattgtaaaactttggaacagttcagagtcaagttcataaaaattatgtcataaaactggggcattaagaaggctgactgttgaaaggaaagtaggtatgcacaaagcctttatttgtatttgactcaaatttgtgatgtgttgggtattggtaaggcatgattcgtcttctggctataccacagttcagtaaaaatttgcacataatacatttgtattttttatcatgtgattcaccattaaaaatattacaatgtaccccacactggatttttcaaaatgtgaataaatttagacaacttatattttcttattttgggtgatccttttattgtcatttatgtagatgtgtattactatgataaagtctttttactccaggtttttagacatttacatttttatcacaagttgtcttggtgtttcttttttatcaaatcttttagcacaatcgcatggaatttagtggctagttactatgaacagttgscttatgggagatgcgggttgatgacggcccaagagccatggagtgggcactacgtggtagaatctcctgtctgggtatcaggtatggttcagttccatctctcactccctaaattcttctctaagagacaaagcagaaaaaaacttagagaagattatataaactgtgtgtctatgcgtgttttaagtatagatttaagttttaagcaagatttgccagtgttttataagaatattttgggtaactagactactctctgattattctaagaccaggcttttagaaaagtgtaggagaggagggggagagagaggaaaaggaggagctgtgtagtgatagagacacaaataaataatcatctaaggatataattacaaatgatgataattgctaataagattatgtatttataaacagagtagaagtcttaagattagctttgaagacattttgttctcttatattaatagagtttcaattacaatcgtatgctagcaaaatcaaagggagatgattaaaaatactgtattattgaatcatcaaatgaataagtaaatatgaaagttatgtgaaatatggctttatattgtcccctaaatctgtgaaatgtgggttgtgaaaaggtaaatttcaaaataggtaacaatgtaaagctcaaaagattttaaaagtgagcacgtactgaagattttatgttactcatatgatatgaaggatcctggcagatwgatggtagatgttagaaacagttgaaatgaaaagtcaacatagcacaaattttcgtagtgtaagggaattggagatgaattgtcaatggaggcaaattgggtttcccacawcagggaagaaattaattaaatttctaccagacaagacataatttacatagctcagagacaatgaacagggctatagataatacatccgtttttattgaaacacaaaagttttactacagtatcattcattagtcacaagggaaattgagattatgcagggatggatggcatagtgtcactttttcatgaggagataataaccatactaatagtgattatattttaaacaaagtaacaaaatctattgctgaataatgttgaaacttttctgcagtttttttgtaaaagattataaacatttattaccattttgttttaaaattctaacaatctttctaaaaagctaatttctttaaaggtaaaatgctttcagaagaaaattatgaatttggagtgaatttgtttttattttaaacttaaatttggtggttttcccttttagttgtgctctcctaagacagatttgtaatcatattaatcatgtaatcatgatattattctaaactccttaaattgtcctccaaaaaatataagaaaattaaggttagacttgtatattggacttgtatattctaatattgagaattatatgagaaaaytaaggttagacttgtatattggacttgtatattctaatattgagaattatatgagaaaattaaggttagacttgtatatcagcgccttgaatgttgaaattgttggccccacattatctagatgaactaatgtactcttaattttgtgatttttccaagggttgggacatggtatattgcttagtgcattttcaggaygagcttaggaggtgaccaataaatgtacatgtggtggaaataaatatgtttgaaaccataaagttagtttctgaaattcattattaactttttaaacctttttttggtagctattttaggatggattaaatagtgatgaaccaagtttggggggggaataactattttattcttaaaaaaaagactgatcatattcttgaactgacaggttcatttatttttacccatcattccaggaatcttcttgcaattgtaccatttatctagattaattatttaaaaatttaaacatgaggttgacggatatattcctgcaaaatagaaaatagcttgtttggatgaatcagactcaaattgatatacagctttttttttttcccaaaagaaatactattattaccatttttgtcttatttggaactttctgtttttctatagctcataccactcagtttactcaacctggctggtattacctgaagacagttggccatttagagaaaggaggaagctacgtagctctgactgatggcttagggaacctcaccatcatcattgaaaccatggtaaacttttgttgttgctattggattaactcacttctttactattggaaaaataaaatataaaactgaatacttttgttttacatgtaaatacataagcatacagacagatgccaagatcttatggctttcatttaaaaaattttagccatgagtcgtaaaacatagcacacaactcactgatttgtacaaaatagttggctctcatcttttctccactttgttcctggcagttgggataaaattaaggttacctgtgtaccaatatttgtggagacgaccttcacgaccttcccttgcyctgatatgtatatggaggctgtggctttttcctttttcatcctcaggttgttttggggagaccttaagtctgttgagagcaaygagcttaaaattcaagtgattgaggggcttgagtaggaarggaataggtctgacaggtggacagaggcatgggaggaggtaggggcttgaaagcagacatatcaaggattcaagggaactgaatgaaagaatgaaggtgaaaaaacatggaagcagaagcagaagccagtggagagaagaagaagtctgagaggtgccagtgtggggagatctcaagcttcccaaagaggtcaatgaagttccaacaagaaggaggtagacagaataggaagtgcatatagtcagcagggctttgtgaagaaggatttctrgcaactaagttcccatgggagaagcaagatccaaaacagagaacagagtagccttaaaaaaatggtgtgtgtgtgtgtgtgtgtgtgtgtgtgtgtgtgtgtatcatatcaggttctgaatgtcagcctacagtttggccaactcctgaccatagactcttaaaaaacaaattctttcaaatatcctactatcaggtttgagccaggacaaacagtaaatattcctggcagtattgaccttttcaaaccaaaggtgtctattaagtgactcacaacacaaaccaataagccttttatgtcttatcgtggatgaagaggatcctcaaaagagggtgtaaaaagatgcagccctcccagaatctacacttcatcgtagtcaaaaggttgagaagtgatcctccaaagacctagaaccactcccaaggatagtcaaaagaaagacccagataacctccctactccccactccctgtcagagctrgcgatagttggtaaactggctgcaaatagggtgcgaatcacatttttgtctggttatattcttggggcccccaacttgaagttggctgcctgcatacacaaaactgacagctcacacatccctaacaggtgggaagtcaagccaggttctcagtacacaaaatgagacaaataggaaagcaatagctgaccctgggaaggaagggatctacaggtaatgagcacccaaaactaaatttatacaggaatcacaaaccaaacgaatgtttttcttctgygaatctgcatttggagaggaagggatgaggaggtttttgtttgtttgtttgtttgtttaattgtcttctctcgrtcgggtacttcaggcagagatccagaagagcaggccttggtgagaattcttaacctttctgccacctttttgtcagtgtctcaggatctcatctgcaggctcttagagtgagtaggcatctcatcttcttcaccagaaactgtcttcagagataaggaaaatagggagagcacctgttgagtgagggtcttatgacctgcttcagaggagaaaggagaaggtcagagagtaaacttcctgcttctacatttttctcaaattatttcactttaaaatatttgcggggagtgtgtcttgaaccccatcatggctgttatgactaatggtgtggattagcatatgtgtacaagtttttctgtgaacgtgttttcagttctcttgggtatgtatgtaggagtggaattgctgggtcacatggtaactctgtctttaggattttgaggaactaccaaattgttttccaaagttactgcaccattttacattgccaccagcagttttatgaaacttacaattctccacatcctccctaacagttcttactgtccatgcctttgattatagccatcctagtgaatgtgaagtgctatgttattgtagttcratatgcattttcctagggactaatgatgtggggatcttttcatgtgcttattggctagtagtatatcttctttggagaaatgtctatttaaactctgcccatttttaaattgggatatttgtgtttttattattgagtcataagtgttctttgttctatataaaaattccttatcagaaatataatttgcagatattttctccctttgtatgggttgtctttcattttcttaatggtaccctttgaattaaaaaaagttttaaattgtgatgaagcccactttgttttctcttttgtttcttgtgcttttggtgtcatatctaagaagctattgcctaattcaaggttctgaagatttatatttatgtattcctttaagagttttagagttttaaatcttaaatttaggtttttggtccattttctttcttaactggggttatatgtgtgtccaacttgattctcttgcattttaatatccagttgtccctgcactattttttgaaaagactaytcctttttcattgaattgtcttggcatccttgttgaaaatcaattggcaataaatttgagggtttatttctagaacctcaatttttttctgttgacytatatatctgtcctgacgtgagcaccacactgtcttaggtactgtagctgtctgataaattttgaagtgaggaaatgtgagtatttcaactttgtcatatttttattttttattgacacagggtacaatttgatgttttgatacatacatgtggtataatggtcaaatcagggtatgcccatcacctcatgaatttatcattcctttgtgatgaaagcattcaaaagcctctcttctagctgttttgtaatacacaaaaccttactgttaaccgtcttcaccctagtgtgcaagaaaacaccagaacttacacctcctgtccaatagttactttgtacctgttgaccgacctcttcctgtccttcccttcccagccccaccctagtgtctggtaaccactgttctactctctgcatctgtgatatcaacttacacctcctgtccaatagttactttgtacccgttgaccgacctcttcctgtccttcccttcccagccccaccccagtgtctggtaaccactgttctactttctgcatctgtgatatcaactcttctttttttttaattctacatgtaagtgtgatcatgaggtatttgtcttattgtgtctggcttatttcacttaacatcatatcctccatattcctccatttgttgcaaatatcaggatttcattctatgactaatagtactccattgtgtatatatatatcacattttctttattcatgcattcattgttgaacactcaggttgattccatatcttggctattgtaaatagtgttttaataaacatgggagtgcagatacctctttaacrtatatattttattttggggggatatatacacagtagtgggattactggatcatatggtagttctacttttaattttttttttttttttttgaggcagaatcttactctgcacttccaggctggagtacagtggtgcaatcttggctcrctgcaacctctgcctcctgggttcaagtgattcttctgcctcagcctcccaagtggctgggattacaggcgtctgccaccacacctggctcatttttgtatttttagtagagacggggtttcaccgtgttggccaggctggtctcaaactcctgacctcaagtgatctgcccgcctcagcctcccaaaatgctgggattatgggcgtgagccaccacgtgccccgcctatttttaattttttaggaatctccacactgttttttatagtggctgtaccaatttacaaccctaacaacatgaagtaagtatttctttttttccacatcctcaccaacacttgttttcttttgtttttttggtaatagccattctaagtagagggaagtgatatcccattgtggttttgatttgcatttccctgatgattagtgatgttgagtattttttcatgtacccattggccatttgtatgtcttcttctgagaaatgtctatwacagtcttttgcccaattttaaactgggctattttgttgtcgttgtttaagttctttacatagtctagatattaaccccttgtctcatgtataatttgcaaatatttcctcccattttgtaggctgttttactttgtttcttttgctgtgcaaaagcttttcagtytgatgtcatcccctttgtctatttttgcgttgtctgtgcttttgaggtcttatttaaaaaattcttgcccagctcattgtcataaagcactttccctttgttttttttctagttttatagtttcaggttttatatttaagtatgtaatcaattttgagttgactgtgtatattgtgagagacaggagtccagtttcgttcttctgcatggggctatccatttttcccagtgctgtttatggaagagactgtcctttttcctagcgtgttcttggcacctttgttgaaaattagttggtcatagggcatgaatttatttctggactttctattctgttccattggtctgtgtgcctgcttttagacaaaaccatgctgttttattaatcgttactatagccttttagtatatgttgaagtcaggtagtgtgatgccttcagctttgttctttttgctcagggttgcattgactgtttgtggtcttttgtgttcctatataaattttatggttgtgttttctatttatgtgaagaatgtccttggcattttgatacagattgcattaaatctgtagattgctttgggtaatatggctgtgttaacaatattaattattcactatatttttgtgagttttttttagtgattattctggggcttaccatatacatcttaacttattggactcacttcagatttaaactaaccgaattacagtagattatgctgaattcccttgttgctctgttccctttctccttttgttctattattagcacacatgtcacaacactgcgtgctgcgaactcaataggacattgttactttatacataaatttatatgtttttaaaccagtaacatgctgttttggttactatagccttgtagtataatttgaagttagataatgtgatacctccagattgttctttttgtttargattgctttggctgtttggactcttttttggttccatatgaattttargattgttttttctaattctgtgaaagatgatgttggtattttgataggaattacactgaatatgtagattgctttgggcwttgtggtctcattttcacaatattgattcttccaatccatgagcatgggatgtatttccatgkgtttgcatcatctattatttctttcagccatgttttgtataatagttctccttttagaactattggttcttggttaagtatattcttatatrtttttgtagctattctaaaagagattgagttattggtttgattctcagttttgtcattattggtatatagcagtgctgctgatttatatacattatttgtgtacattgattttgtaacttgaaactttactgaattcatttatcagatctagcagtcatgtatcaacagagcagaatacagaacccaaaaataaagccaaatacttaaaaccaactgatctttgacaaagcattcaaaaatataaatttggggaaaggacatcctatttaataaatggttctgggaaaattggatagcaacatatagaataatgaaactgcatccctacctctcacctcaccgtatacagaaattaactcaagatggattaaaggcttcaatctaagacctgaaaccataaaaattctagaagaaaatctaggaaaaattcttctgtacattggcctaggcaaataatttataactaagaccccaaaagcaaatgcaacaaaaccaaaataaataaatgggacctaattaaactaaaaagcttctgcaaagcaaagaatcattggagtaaacagacaacccacagaatgggagaagacatttacaaattatgcatctgacaaaagactagcatccagaatctataaggaactcaaaccagcaagaaaaacacaaatcccattaaaaagtggcaggtgacatgaatagacatttcttaaaagaagatatgtctatagccagaaaaacagttaaaaaaaatgctcaacatcactaatcatcagagaaatgcaaattagaaccacaacgagataccaccttactccagccagaatggccattaagaaacatcaaaaaacaatagatgttggcatacatgtggtgaaaagagaatgcttatccactgctggtgagaatgaagttagtacaacctatatggaaaacaatgtggagatttatcaaagaactaaattgattgatctgccattcattcctgcaatcctactactggatatctacccaaaagaaaagaagtcactgtatcagaaagtcacctgcacacatatgtttatgtagcacaattcacaattgaaacatatggaatcaacctaagtgcccatcaactgatgagtggataaaggaaatatatatataccatatatatatgrtgtgtgtgtgtgtgtgtgtgtgtrtrtatatatatatggtgtgtgtgtatrtatatatatatggtgcgtgtatatatatatggtgtatgtatatacatatacacacacacatcatgaaatactcttcagcatagaaagaatgaaataatgcctatttctttgaatgtctcattttttgtgtgtgttgttggaaactggaccttatatataatatatggtagcaactcgtatataatatatgctatcaactctgggcattgatcctctcccccttgaggcttgttgttgtttatttatttacttagtgatttgctggagtattttagttaactctgttccctccttcttcccctccacacactgtaaagcctgaaatgttgctccttggagaatgtggytttgggcatatccacagtcaccctgggatttgtttttccaggactctgtctggttccttgatcacacctcactgtaagttacactaattgctggtggatttctgtattgttttaaacaatgccctggggacttaaattgttccaaagactgatccaattaaattccagctcattttcaggggtggtttgaagttagtgttttagttttcttctgaccacaggagatttttttttttaaactgtcacttttttttttcatttcatcataaatttattttcaggcagtatgataatctattaatactcggcatactctgarcttacmgaataagtaccactctatacttcctcattaatgactatcattttacatgagcttctwctacaatcacagtgagagaacagattgctacatgtttgctaaatrcattcagtaaggcactcaaatcctagacacgaactaascacagaaygctcttccccgctttaataaattgaaacatgatctcatttccttcgytttcaatgcttttyatagaaagacacgcttgtcttgaacttgtctaaacagaggtttatataaactaatccattatcatgtatagttgtaatcaaggaaatgatttcacattgayggttttttaggtagggataagtaaaagcactgcagcagtttctgagggaatgtcttccctgtggttcctcatacttagtacaatgcctggaacgtagcagggactaaatacagtgaacaaatgggcaaacctttaattcccagggatctgctacatattgccttgactggtagatcatttctccagaagaaaggaagaaaccaaaaaacaaaaataatctttttaaacctcacaggattttyttagaaaaaagttttaattgaaattctctttgtaaaatgtatttaataaaaaatccaaagcaaaaaccctatcgtttatttacttcaaaagacaaatcatttcagtacttcttccttgaaatgcctgccatttcttcctctggcctcagaaaagggcatcggctccatgctttacagtgtcaggataaaaatccaggagggagaaatcttgttgtaatggatagctgctttcatctaacacaaaaaggctctgaatctttgatacacaaggttctgcgctgactgccgacaaggagtgtaacaggtctgccatgaccatcccataggtgatctctgaggaagtaactatcactctgttgaggcagtctgcaaaaatgttgagaagaatcttctctatcagctttgagtctacacggatgtaaacatcatgtcttccatcaactacagtcattaaagctggcctatagtatattttcttcatagtaaatggcaagcagctaaaacattgtttgtagatcctgttctyatctgtttctagttccaatccatattttgcrcagccagtatatatgatgttgggaagagaagaaaagaaatactcttcagagaactgtgagcatttagagctatcttctgagctgccgtaataggaaatgacagctctgaaatctgggctttaattagaaccactcctgaacatttatcctctaggtgggttgctaagtctgatatcttccaaaaggaaggtgcacttttttgaaattttgctttaaatgtaattgcccttacatcatcatcaaacaagcactcacaggatgaccaaggcattgtatgcgattttaggttttctagtgtgtaattgcgctgaacaaaaagatatttaaattcccaaatataaccttttttcctttgcagttgagggtaccaggctgctccaggactccataatacaagcacataatgttgatcttgggcctgttccactgttaacataactttttctgcttctgtcctctataactgtatactgcctctgtcagtatagtgaaatcaacaactcttagtattgtgtggactaatacatcaggctgaaggtgctccaattctataaagtctatactgttcaccctctgaggctgcctcggaggaagatctctgaggtaggaatgttttgaggacacctgtgccagtaggtcttgaagtacaacatcacwaactacactggaatattcttcaggctgaatagatgaataactcccaagatttaataactgactgctaaatgttgattgtagtactgtctcgccaacccattggtcctcatgaataacaacatctgcgagtaaaattatatctccaagaaacactgtatatgcccaaaatgctgcagtcctctacagaaaaaccttcttagtttctgattgatcaattactgtaactgttgctaaaggcactttagagccagaatttggtccgaattttatgtttatttccttcacatgacatggagatagcaccatgactaaacaatcatacttctggcttttagaatcacagttttttattaatgactttttttaatacccttaaattcagacacattcctctgatccatttctacaacagaatctcctgcattagaaatcaacttcattttcttagctacttgaaggactctagatagagcttcagactggcccactttatcttcagaggtgcagcttcttttaatagcacttttgtggaaggtgtttagttgggaacacagtattcctgagctacacaactcaatacgtatctcatttggtggcagttcatcttcagaactgaaaagttcttgagatcctgtattttcttcaggacctttgtcagagtttatgtgaatgtggctattttctgttttaggaaaaacaggactaaaatgttcaagagaatatgcttggttttgtccactttcatatgcttctgtaaaatcatcaagttgaatggaattctcttcagatattcttatcttcccgtaacttgcctttggttcagtctccatgtttacattccctttatttataggactccgccctttatctttcttttgagctaaaaaagcaacctggctggaggtaattatacagagaaattccgtatcagttgacattttaaggtctgagaccttcctaactgctgcttcagacttcagaccttggcttatctactgtgttcaaggaaaataatcccaaacactggttttgtatttcatgatattctgttggcacacactctctttgtaccacttcaggccctatattaatttgtttagtactrcaaaccaaatccaacrtagctgcacatttgtggtctaactgaaacaaatttgagtgaaagttctgaccacagatatctgactgatgtttaggctgttcatctataattttattttcactgagaagcttttgatacttttcagttaaatgcagaactatgctttcaaatccacatatttgcatattagagctcgttacctcactcagtctagaggagtgaatcttctgggattctatattctgtgtttcagaaacagaatgtacaaagtaatctttcacatgaacatgtctattcatacagtttgctaagtaagaaatgaccactaagatctggagaccaatagattctgggacttcatagttttcaagatwtttgtgctgtttttcatccttcagatataaagaatgttgactgtataaaagctgaatttttttccgggggtcagcaacggacattaaagaaactgtgtgttgtgatactgtcatttttagtggagcaacaggatactaggctgggtggttctcaacaggatattaggcagggttgtggtttagcttatgcctatagtgaagccactggtttcttttttcttttcaccaaaacctccattattttttagaacaacattagtcttaaacctctctatgctctgtgtcaaatatcaattcctttaagaaaaggtttgaagctatttcatgccttgcctctccccctaggtaaatctctaatctctagtaatgtcacctttcttattgttgaagtgtatgttttctcttaacstgattttttattagtctggctagaagtttttcaactgtattgatcttctcgaagaatcagcttttggttttattattttcttgtggtttttaaatttgtttttgtttaattcttctttgctcattattattttctttgcctattttggttttttctttatttttatttttactttttaaaaaaattttatttccacagttttttggggaacaagtggtatttggttacataagttctttagtggtgatttgtgagattttggttcacccatccccgagcagtatacattgaacccaatttgtaatcttttaaaatttgctcctatttttctagtatctcaagacagaagctgaactctcaaatcctttcttggtttctaatctaggtatttagtgctgtaaatgtcctcctaagtattgctttagtggcataccacaaattgtgatatgttgtgttttcattttcataaagctgaaaattctaatttctctttttatttttcctttgatctattgattatttagaaatttgatagtttgtaaatatttttgacttttccagaaggttttcagttattcatttctgatttaattctatagtggttaaaaaagtactttgtgtgacttgaatcttcctgtatttatgaggacttgctttatggatcagagtatggtgtagtttggtcagtgttccatgtgcgcttgaaaagaatgtgcatcctgctgttgctagatggaggcatttatagatggcatgttgtttggtagtgttgwtcaaatctcttatatccttgctgattgtccatctagttgtactatcaattactaagagatggatattgaaatctctgattatgaaagtaattttttaatggtctgcaaagcctgaaatagaactgtgtactataagtattctgtgactgtggaatctcttaaagtagggattatgtctcatacttcttttgatcccagcccatagttgtgactatttagtaaacagtgatggcaatgtgagaactatgttacatatatttagctgaccttagtgtgtatttgatatctatatatactatatatrcacacacccatacatatatatatatattttttacttcttacatgagaacgaaagttatatttagatgagatgtcttttcagtgaaaacatccttacttttgctttttatttgatgtattttagttggaaaacagttataacaaaaaattaatctgtatgccatatatgtctctacagtttagctacgaattcaaaatttgatccagttgaaacgccattgacctttgyatttgactaggaacatacaatacacattcagtaaatattatattrtaaaaaagtctttaaaaatgtgaaataaactcatatttgttatctagtatatgtaaatttctgttaatcttgggcattaactrttgaactttttttcccctaaggtagcttatacatcatttggataatgtatgtgattttttttttcagagtcataaacattctaagtgcatacggccatttcttccttatttcaatgtgtcacaacaatttgccacctttgttcttaagggatcttttgtaagtaaatatgtttaactttattttagttttgatttaagaatttatatattctgtcacaggccagtagttcttaagtgaagccttatattatgaacttttaacagtttgcatatgaattgacagaggccctggtgtcttctgtcttcygacttgctttaatctagcaggacagaagccagtaggaggtaaaatgctctgtgactttgaggaacacttacaaaagtcacttgcaagaaagttgttcttggtggtagaagcattttatggtctagggaactttcaagcattgatatttacagtatactatgccaaaaatattgtttaaaagtaccagatacttgctatttctgtgaattgttaggtttgaattgacaaactgcagtaccctttctgattactaatggcataagaattgttttttaataccagaaagttattttaatttagaagttattacacaggtacagtaatgaatgtttttgaagcaaagacactgtaatttttttatcatttgccaaaattctttagtgtttagagaataaagtatttgcttgaacartgttttcctatttttaaaaatattattatttaatatttgaggtgtttctcytgataaatagagataatattgtcattggtacattcttgctggtactgattttggaaatcctcaaagaggatgtgatgaattactcagccatgcttttttgtcttttctttacagagtgaaataccagagctacaggtatggtataccaaacttggaaaaacatcygaaagatttctttttaagcagctggattctctatgggtaattttaaagtaaattcttatattttgggtattccaacagtaaaacagtaaaagggcacagaaatgtcattaattaagaatttttatttttataagtttgtgtgtttatagatgtgtttagctcttagacatttagtttgtcttggtggatggtgaygccatcacctggyttcccaggttggaaatttaagtcccatttgagactctctgtctttcccactcaccctctgtatcccgccagtggtcaagtatagacagttgtatccacacatttctcttactcactccttattctccattaccaccgttacttcttgtttcagttcttcattatcgctctcytggatttcagaaactgcctcttgtttttccagtctgactttccaggtcacccatcacactgctacagagtgaaatgtcaaaaatgcagatctgayttttgtgaccactgtgctcagaggacctcagtgattattttcttagaagttaacattccttagtgtagcacatggccctcattatcctcccagaaggtagaagactggtcttcttcctagagatgtgtcctactaaactggcctctcttcacatactaaacttacatttttcaaagcatagcatgcctgtttatttacctctgtgactttgcacatactgtgttcttcacctagaatggcctctcctcawctttgtcatcttttgagactcaattcaagtgtcttttcctctgacgcttcctcaccagtcttagctcatattcacctrgggccatgtgcttacctagttaaatgcttttcctgcaccactggacaccttgaagactgagccttgccttatttagctttatatcccaggtgcttcccacagtgcctcatccatggtgctttctggggaaaggtttcaaagaacgaattggcccaaacaagcacattatttcacttaattgacacaagtctaccactttttctggttattattaatgttctsataaccaactagtcactaacagtgataaaacaccttattatrtattaagttctgaaaaaaaagttcatactttttgtgtaacaaattgctaggaatggcataataaaattgattttcctcataagaaaaataatgtcatttggggttattcttcaacctgaatataacgtcaggtatttcatagatctgatcatcaatttaccattaaaacaaggataataactccttttattcaaaatagaaaaaaactgttcaaatttcataaaaggattccagtgtcttcagagatctacatttagcatagaacaactttgatactgggarcgttttccattggtcacacactargcttagcactttaaaagcattatctggtttaatcctcacagcagtctatraggtatgtattttttcctcattttgtagatgaggagattgtgacttaaagagattaagttgccaagatcgtaagtgtgacataagcctaacttgctagttgaaatatatattgatcataaaatgagcaggatttttctctcttaattgtaaaaggatttctgtgattaacagctgggtcgacagtgatattttatgartttttttaccttagtaaattactgagagaaaaaagcaggtctcttagttgcatgtatcgaatatatccaagctttaaggagcttactgtgtagtggaaragaataggctaatagaaatagattttgagattatttagtccttccttccatgaagtaaggwtgtttaaaattataaagcataattttataaagttttctaaaatacttaggaaaaaaagattccaagggccttgatattggtgagttttccacaaatgtttaggaagttctaacagaaatgatttggacttttctttaagctratttttttaaagctattntgtccacatgagatgagctatagtacctggtcctgaatacagtagtgtcttctttttcagctccttgacagygatggcagtttcacactgagcctgcatgaagatgagctgttcacactcaccastctcaccactggtcgcaaaggcagctacccgcttcctccaaaatcccagcccttcccaagtacctataaggatgatttcaatgttggtgagtatttttcactaaaacttaacttggtctctatatttaacagtagtgtgttgatttctacctgtcaaactgggtgcatgatggagtggctgtcaaaagcacattcatttacctcctacatctcatatgyrgtaaaaggagggctaattttttgcattactttatggtaaatctaaatttgagkaccctgtatttttcagtttcagaaaaaaatatagggttcattgttagaatgaaagttatagttctgatttgtttttggtgaaacttaaactttgtaactttgctactgccccattagccattactgacatcttccttctgtgtggaggttaagacacattcatatctgtctttctgcagtgctagtgaactgagtgcttatgggcagttatgttgtccttggctgatccaactcattatataccatcccgtgcttttttttttaattgagctttcttggttttctaggaagatctgtcctaaagttgttagaaaagtttttggttataggtgatttaggaaaaccacttggaaaaaagttagaagacatggtcattgtagttatattcctagtgagtaagtaacaaaatttgttgactgcttggtggtgttctgtaggtttatgggtctcacggacagggtcaggtggctttgtaatctgctcctaaaatctgtagcagcaggagagtaatarggagggagctggcattgctggagcatcacttgaagctcctgtttgctgcagagctgcttgttccaccaaagatggacactcctatcaccctttcccagtcactgctacagggtctcgcctccctttctcaggaaatgatctagttggctggagtataaggccttttggactgtgtaatggagtcctctcarctataatacagacaacagtgatcctcagggggagcttggtggtttgtttttctgcaactctttgaaatggcctcttagataaacccattaattttgtgaaacacagggtctttaaaatctgttgctcgcttggttctctgttagcaaaagtgacttttgccttcagtaagtgaggaatctgtgtgggatatggcctagataatgagattgaagaacttctgccagcaccaagaccaatattttgtgaccctgaagactaagaggcaatttcaaaccttcaaatataaaatgtaatactttatgagctacaatataaatttaaaactaaagttaaatattataagctaggctctggagatacttgttagggttctaaatgtctcaaatgaggtaatgaatgcaaaaacacttggaaaagcatgaggtataagagctataagatatrtaaaatttctcctctacagcattcattattgtaagactataatttaatttagtaaaactaaaaagggattgataacttaggcccaaaactggtttttgckgcagtttagaagtagaagaaaatttgtaaattttatgcttgatatagtaaacctttcttatgctcttttggcagatgattgtgacgcatgatttggaaccttgcttgacagatattagaaataataaagctrtcccttattgagcccttgccaggtgctggcttatgtacctgttatcttttctttaattctcttgtcctcctgcaaacctggaaatgaagaaactttagatgcagggcagttaaatagcttgtccagggcgacagactgaactcgaatttgaatctaggtcttacttcaaaactcatgacctttcctctacaccagatgyctggattaaatattatgcagcatctatatgtcgaactcatcatcttgatatttagtaatgatgatacaaaaattaatgtatctttattagacctaggccctaaactttggtttagattttatttatttatttaaaagctttcagaagtgtttcagacatactataaaatatcagcaaggagagcttctgaaggatttgatactaaacagagaatttcttacattctgaacagattacccattttttagtgaagctccaaactttgctgatcaaactggtgtatytgaatattttacaaatattgaagaccctggcgagcatcacttcaygctayrccaagttctcaaccagagacccattacrtgggctgccratgcatccaacacaatcagtattatargagactacaactggtaagattgatgttctcaatgtggatctggctgaaatacccttgtaatattgtcaggtanattttgaagtgaagagttttcaatggtcctcctntttcaagaacctaatagatgtgtaatatgtaatattaagggttgttgaatagtatggtgatgaccacaaagctgcaaattgttttgctgccccagtgtccttccctcatntttgccctatttaatagtgattattacaggagcaatttgattccagtataaaaactaaggacttttggmcccaattataatttaatatttgtttataaatagacggatttgtgaggtatttttaagtttttgttttgctggagagttgatttgttgatctggtgttgccatctagtggaccaatcttagaattacacygtcttagccttattaaaagatctatttaccaggtgacagtagatggcaatagtaaaaagctaatcagctttagtcgcctagtgaatttaactttttatttagtcatctggtaaagagacaagttayattattcacataaaatataatkccaaactaaaactttcccttcctcttttagttacagaatttctatgtgctgacttaytccacctgtcatgtgtttctttttcattttttcctataactagtatgattccactgtgggaaaagaaacacatamacattccaggtttagagctagtactagtaataccaagccaccaaaaagccatatccgaagcttggaaactggagagggaagagaaaagaattctgaaaagagccttgaattgcctgtctatggagtgtgcagaaagtgtttatccctcctgaagtgccttactcccagttagaaatcctgattctagtcccaagctctgacataagtcttaagaaacttttagttatccagagcccctggaacccttataacactatgaagagttattgaggtgcagtgaagaattcyttcctaatttaggatgacatttgtggcttgtgtttttacrcagaatttctgcttgtcccattgtctctgaggtggaaactttacctagattttccrrttatggyagtggagttcttggcakccttatttgtgactgatggtcttattttaagtccagtggctgggtttaagtgtccaaggcctgggtcccattgttttgatctccagttttgaagtcgccgtataggaaacttttttttctgtgacatcccctataccccatgcacttgaataccatagagggctctttctaaactcaaactcaatcttatttctggctgggactccaaaaagattgagaagccccttaattgtagtatagaagtgagatatagcaccatccaaagatttactcccccaratcttcatatatttgaatcttcatatacatcttcacaatttaaatagcaatactcagtttttactaggatctattgcagtgggtaaggaggtggggaygagggatggggaagggtgtagaagggaagagagtgacatattctgaaaggaaaggaaccgggaagttgcaattttgcgtgtcaagaaaggcctgccttcatctttctgaagccctgttttcatcatgttattcccctgctcaggaagatgcagtgactctstcctgctacctgtgttttccactwmtaggcttgatttccaagaccstttataatttggtctcatctaytatgtgttattttccagtaytccaccctctatttgaggcagccagatctgctcagagatccacacaaatcccttgttcatttctgttgtctggctgctgtgcccacttattgtgggaaaaggagggaataaaaattgggtaatagtaggcactttgatggatttcccacacaaccactttatggtggagatatcatcgtccccaccttgcagactgagaaactgcatctttggaataagatktacccaatatttcacttgtaartggcagaacmaggrctagaagccgggtctgtgtgactgagtagccyattctctttggagtacatctcacagcctcattttaatcatcttcttcctaaaggtaggaaatgrgaaatttgtttagtttatctgtagtgctattttagtaaatctgctctcaatgagtgcacactactcacagtttttagacttgtgttttgagtagaayttcctctcttatacctagatttagtmatttaccagcacagtaatttgattatatgggatagattgtactataactggctacttctrtcttgatagtgagcattggttggaatcctttaaagacaatcacaaaattacctttccctgcacacagatgaactctcttkgatcaaatttgccttatgtattggctagtttttgttctttmagcattactgagagattgtggctgtggaagaataaaccacacttttattccatttcattcattatctgtgaaattgcctggcaagttctgatgcaagaatcacttattctggaatgtggtatatagaaaaggaaagtttgatcttctctcattccaactctaaatagaataattttatggtgctgatggtatttgtagcactttcaaacttctgatgaaccagaaaggaggtaagggatgtaagtaccagtgttgattgccagtggtttcatgctggtgataatctatggagagaaaactccctctgatgtcagaggacatacaagagagamtgggcttgagttacttagcatttatcttcctgtaaagtagtccagctctgcttagataattaagtgtggattgtcctccctgtgtagctgatgtaggtacttctgtaatattttcctttatgtagtaaaatttcactgtgcaaaattcactgataagacacagaaatgtaaaagccacataattctagatctcattccccccagcccatttccagaatggatttcttggtgtttccagttttatgtgagatatattgcttgatttatgactkggttatgtgcaggctttctttttcttcccacttgcagttagatactgagtaggaagtgaaatattttcagagatcatgttggtttggggtggttgtagcattccagaaggaaagtgttgtacctggtagcatttgtaagaggaaacctggaggagagctcactgtaaaagctctggtagtccctggacagctgaatcttttcccatctttgatagactgctgtggatcagtgagcctagaaccaggattttattgcttccttatagacagatacttcataggggaaaatggtcctccaagtggcattcctggaygagcagcatcagcatcacctgggaacttgttagacatgcacattcaaggggctgccccagatgtactgaatcacgctgtggggtagggccagtgaactgagtttaagaagccctccaggtgatttcagtgctgttcaggtgtgagaagccctcctagagagtcaactctgtggtctttgcagaaaaataattttagatcttttctyctggagttttaaagttttgttagatttaaatgtaaaagttggccccggaatagcttrtgttctcycaaaggctcctagcatgccttcattgcctctctttgttgatggaagtttgaataaacattttccctcagaattgtgtggaactttttactttttaatgtgttcatagacaatagtrgcattttaaaatattgtattcttaagatgagaagttgttttattgtagaaaaaaaattttctcaggaaacttaaaaatcataactattattgtccagtaatcatttaaagaggcaatgaaatgacttaagtcatgtaacatttaaaactgttgtcartaaagattcttgaagcccatctctgctacaggcttagacttagcaaatcacattctcacctcaattagaagtttggaagcatgtgctgtgaaatgacatatctgtactatgttacaaagggcatattttaaagagtactaatcaactgttttattttgcaggaccaatctgactayaaagtgtgatgtwtacatagagacccctgacacaggaggtgtgttcattgmaggaagagtaaataaaggtggtattttgattagaagtkccagaggaattttcttctggatttttgcaaatggatcttacagggttacaggtgatttaggtaastgactttttttkttktttaatagcatatgacttatgggctatgttactttgagcacctacttgttatttgtgggagtgataaaaagaattcaacccaaggtgtttggacatctaattgggaagggatgtaagcaaataccaaatagtttacaattatagaaagttatttaattcctagagatgggggcagctctgtggaagggaaaataattgtacaaagcttttaagggtattgtagagttgaactgggctgtgaggataggatttgcatagatagtatcaaaaccatctgaggtagtggtggtagggagagaatgctcaggaggcaccataaataaaagcaagagtatacgactgttgctgctgtacctatagaaatataaggaggggaattgatcggcttaaaatggaaaaatctcatttttgaatttagttaatacttgaaaatagcttgacttttctcagtcatctttacagccyttgtgttaggtaggataatattttatccagaataggtgcttcaaatatgttcagattgaactgtgtccacttcagattggttttgatacacaccactcctttgaagctagaccttactggtagtgacttttcttgattctcagtctcttgactttcgtcttaccttaatttaaraatatctcttttatagttttctgctctttgctttgactccataaataaaataaaaattaaagaggaagtaggtagyaaggatattagaacaagagttacatattcatagcattaccaatctgaacttacctcagtgataytgaaatcgaaaacatagaaccagtgaggttaattgagtggcctaatgactcaaagctagttagtggcagaactggaactaggaatttaaatctgtgtctgcagtccctattgtctgttttaaacygcctacttgaaattttrtcctgggkttctcataggcattcaaataacactaattccaaaaattaacttactattttctccctctaagttaatactattaccatgtgaccaattagactggctggaaattttatattctgtctctcttgtcttccatattcaatccagtcatgtataaatgtgtacttgaactacagatgctaacacctcatactatcactggtttttaagtttatttcactggttctgttgtgagctcacatatagtatatggctcagagtaggatctcagtatatgctattaaatgcatggctaaatgaaaaatgttttggcttaactcagttgtagatctgggaatgaagggacatagctctctgttgaggctgactttactacatacagatgccactcragaaccccactgaattatatgattctgtgattgagatctcaaaattatatctattgggataatatttttgtgttacagctggatggattatatatgctttaggacgtgttgaagttacagcaaaaaaatggtatacactcaygtyaactattaaggtaagtattgctgattggagtctggaggtaaaatgctcttttgttgtgcatttctataattttctgttataaaataggagggggaaagtgtgacatataatgaagrgagacaaagaatctgccttggtgccgggaagccactcatccctaggatagttacatgtgtgagggtaacctatgtgagaaccatcagcagttgactttatcaggtcactatttttttaaaaaattttattttgttttttaaactgaggcataattgatagagtcaataattgaactatttttttcaagtttgcttgaaccaagactgtacmtggagcttatagatgtaagcaaagccatatgcatttatttttgatggttaagaataatttggttttcaattataagcataatttttagaaattggtttccatgaatattttagtcagagaaaataccagattaattttagtataatagaaatataaaaatgttcctgagaatcactgggtgatcatgagttactgctcgacagtgcttccaagggatgctgtgcagataaatttttgtgtataatgtgttggtctctcccaagatagctctctcacaattttgtttagagtgcagtagaaattaaaaatcagattccaataactttggaatttgttctctcaaccaccaaaaatgacagcactaattattttttagcattaacaatatgtatattgaagatttggtttggatgtagcatagattatttaactataccayactagccaaattgtagccattttatagcaattataataatattcactattattgaatttgaagattttttccaaactcatagatatgatttgtatttccttgataattagggagcttgcacrtctaatgtttactggctatttgtattttctcttctctgaagttgcctgttcacttctttcttcatttttctatyrtgttgtctttttctggcaaatttgtgtgaatttaatatgtattctggatagtaacccattgtctgttacatacgtcacaactatgctcttccttcatgtgtattctaattttgcttatggtatttttgatgattataagttttacattttgatactgtcaaatatttcactttttattcattgcttttatgtttcatgttttaaataaggccttcttgtttctcaaggttaggaacattttkcccccaagctaaacaaagtttaggatttatttttatgtgtaagtctttaatacgtcagaaatttacttgtgaattgtaaggggaagtactgaatataattttttaaaaaatggatagccatcatttattayaatggactatccttttgcccataatttaaaggctacctttttgatgtaacaaatcagcacatgtgcacatgcttgtttctgaacttttttctgttctccatattgatgtttgtctattattatccaaaatcacrcttttaattggtgttcacattctaaaagctttgatgatacagctactcccttgcttccttcagagttttcttasctgaccacytgatagaaaacagcrccccatctcactctctaactcctttctgttgctttatttttctccaaaagttttatcccaagctgacatcacacatattctgttaattgttcatgtgttttcctactcccttcactagcacatagctcctttagtgacaggcttttctccatattcctcactgctggctctgtagcacctagaaaagtgcctgacagccaggcagagcaagagtccgaataatacttggtaaatgaatgaatggatatctggtggggcaacttcctcattgtttctttttcaaaattatctttgctattccactatatatattattcgatttgacttttaaaaaacaaactttcagttacttgaaaaatggtgctggtattacattaaatttacacatcaatttaggaaaaaatgacttttttttttttaacaataatgtgtttccccatgagagaacacaggaacaaaagcatgctatatttcaccatttattaagatttgccactatgtccttcagttttatttttgcaaacttttgattaggtttgttttagtaattttatgagtttttttgaaatcatgaatgagattttaaaaattttcttaatttttttcaggtactttgcatacctggttaaaatatcaataggatgtgaggcatcytgcctcacatcctgttccttcttcttgaccccattctgtgtcttgtacttctgatacagccactcttcactattttagctgtttcttctggtgtgtctttaatayaatgtgattcattacttttaaaaattggctcttgtcttgctactaggatggataggactttgctggcttgcacccacctcactcccctactcctgttattttgtgtttcatcaactatgggcattctgtttcctcttgaatctcagcttttgccacatactctgagggtcttctgtaactatctgcactaaagtagtctgtcaggcacccattgtcaccttgacctggcttaatttttacatgctacttatcttttagctctcattttgtgtgtgtgtgcatatctgtccatctccttctactagaatataagctccataagagcagggaccttgtctttcttgttcatcttaaattcccagtgcattaaacagtatttgacatataaatcttctttgcgtaaataaaaaaaacaaaacatcatcttctatgttgcccatattccaaattacagctaatgtgaggattttgtcactgactatcagccacctgttgaattcttctcagcrcttgtcaggtgacttgtcccagttctgttgcatggtgggtagcacaatggactttgaagtctactatattctacttgcaagtattttatattgcacagcttcaattttcccatccatgatatcatgaagaacacttttcttatgaagattcaatgagaaaatatatatatatatatatatatatatatatatatatagtacctgatatgtggtaagcacttaatgagtcaagttaatatttttaggagtaggagtgtttggaaccagacagaccagcattcrtatttcctcactaacacatgctgagacttctagcaagttattccacctctttgagtatccatttccttatctgcaaaatggagataacttctgtgaggttgttttgagggttaaatgtgtttcattcttatattcaacacatttttattaagcccctactgtatgcactttactaagtcctagggatacagcagcgaacgaaacagacaagattcctgctctcttagagcatatattcttctaggacaggggttggcaactttttctgtaaagggccagatagtaaatattttagacttcgtgggccatgtggtctctgctgtggctacccagtwcggctattgtaatgagtaaaaaagccatagacaatagacaataatgagaaaaaaagccatagacaatggatgtggctgtgtttcagtaagattttatttattaaaaaaagggcggttggcatgtaggtcatagtttgctgagccctatccygagataataaacttgtaaataagtttataaatgattatgaagaaaaaatagagtcatgagataaagtagctctgttaccctgattctctaaccagggaggtgaggaaagacctcactgagtgggtagtacttgagtgcagacctgaatgctgggaagaacaatttgagcagaccaagtggcaggtgcaaaaggcaggtgtagctgacattgtgtgaagagcagcctggaggctggggtggctgaagtctggggagtcaggagagataaggtcctgttagacaggttttgtgcttaatgtgatctgtgatttgagtcccttggctcggtgttaatattgagygtttgatggcagcagaagatgttcagtaagcacttctagagctgaagatagctgtgcaagtctgtagtaataggaatgtggctctgaatttggagctaggtaacttggagtgaaaacctgtgactttgagctttaatctattaagcctcagtgtttccaygcataaaataaaagaactaaattaaggcccattacrttatacttccaagacttaaaagcagatttattctggttcttggcccagtgctttgagttttgagctcttcaccttctgagagtagctagttttatatgattgactgtagttagtatgctgtgaatatgtgctcataaatrtactatcataaagataataagagctgagatttattgtttaccatgtgccaggcactgagctaagtagaatggcaacattckgaggaagktgtaattttttctttcactgtcagtgaccagtaagtcacaccttatagatgcctcccttcttccacccgctgcaccctactccagcatcactttaactgatggttactgtttttccaacttaagggtaggagcttcatatggctttgaagtgatattctattcatggcaacaaaacacaaaaactaaggttaattrtttttcttctggctgggcagaggctccttaatgaaaaccttaaggaagcaatgaggtagaagcagatgttttgactccagcagtcatgtctgaagagctggtggctgttagccacaccacttgtacatgtgactacttataaataacttttgttaaattttaatgagcttttttctaaaactttataataatgcctgaaaagttttgcattttgttggttttaaattttggtggagcacaggaaatattgaggtattccttgtaykttgggaacgatttaagtaggtagataagaatttcttcctagagttttttyctgtattttaaacttttgctcaaacttgtggaattgtgttttgctgtggttaagtcttgagtgagtagtacatttgctccactaagtagtgggccatacatgatcaagaaacagacttcagaggaccattttcatatggtttcaaggaatgtgtttctttctactctagggtcatttcrcctctggcatgctgaatgacaagtctctgtggacagacatccctgtgaattttccaaagaatggctgggctgcaattggamctcactcctttgaatttgcacagtttgacaactttcttgtggaagccacacgctaatacttaacagggcatcatagaatactctggattttcttcccttctttttggttttggttcagagccaattcttgtttcattggaacagtatatgaggcttttgagactaaaaataatgaagagtaaaaggggagagaaatttatttttaatttaccctgtggaagattttattagaattaattccaaggggaaaactggtgaatctttaacattacctggtgtgttccctaacattcaaactgtgcattggccatacccttaggagtggtttgagtagtacagacctcgaagccttgctgctaacactgaggtagctctcttcatcttatttgcaagcggtcctgtagatggcagtaacttgatcatcactgagatgtatttatgcatgctgacygtgtgtccaagtgagccagtgtcttcatcacaagatgatgctgccataatagaaagctgaagaacactagaagtagctttttgaaaaccacttcaacctgttatgctttatgctctaaaaagtatttttttattttcctttttaagatgatacttttgaaatgcaggatatgatgagtgggatgattttaaaaaygcctstttaataaactacctctaacactatttctgyrgtaatagatattagcagattaattgggttatttgcattatttaatttttttgattccaagttttggtcttgtaaccactataactctctgtgaacrtttttccaggtggctggaagaaggaagaaaacctgatatagccaatgctgttgtagtcgtttcctcagcctcatctcactgtgctgtggtctgtcctcacatgtgcactggtaacagactcacacagctgatgaatgctkttctctccttatgtgtggaaggaggggagcacttagacatttgctaactcccagaattggatcatctcctaagatgtacttactttttaaagtccaaatatgtttatatttaaatatacgtgagcrtgttcatcatgttgtatgatttatactaagcattaatgtggctctatgtagcaaatcagttattcatgtaggtaaagtaaatctagaattatttataagaattactcattgaactaattctactatttaggaatttrtaagagtctaacataggcttagctacagtgaagttttgcattgcttttgaagacaagaagataagtgctagaataaataagattacagagaaaattttttgttaaaaccaagtgatttccagctgatgtatctaatattttttaaaacraacattatagaggtgtaatttatttacaataaaatgttcctactttaaatatacaattcagtgagttttgataaattgatatacccatgtaaccaacactccagtcaagcttcagaatatttccatcaccccagaaggttctcttgtatacctgctcagtcagttcctttcactcccrattgttggcagccattgataggaattctatcactataggttagttttctttgttccagaacatcatgaaagcggcgtcatgtactgtgtattcttatgaatggtttctttccatcagcataatgatttgakattkgtccatgttgtgtgattcagtggtttgttccttcttatttctgaagagttttccattgtatgaatataccacaatttgtttcctccccaccagtttctgatactacaattaaaactgtctacatttacaatctttgtgtcaaatatatttttatttcttctggatgaatactgaggagtgaaattcctgggtcttatgttaattgtatgtttaactttataagaaactaccaaactgttttccaaaatgattgtatggttttacacttctatcaacaatgtttaaaagttccagttactctgcattcttgtcagtgcttcatgttgtcattctttttaattttaacccttaattgtgggtgtatagtatgtacatttctctgatgactaaagctattgagcagatgtcatggacttaatggacatttatgtactttgttttatgtaatatctattcaaatattttgctcatctaaaaaattctgttttttccattgagttttaagagctctttacatcttccagatacatgttttttttttaaaaaaaaaaagttttgaaaattattttctctatttctgcaaagagcctgatggaattttcattgtgattgcatttaaattatagataaatctggagagaactgatatctgactaatatggacccttcaaatccatgagcagttacacctttttaaaaattttattttactttaagttccaggatacatgtgcagaaggtgcaggtttgttacataggtatacgtgtgccatggtggtttgctgcacctattgacccattcttttaagttccctcccctcgccccccaccccccaacaggccctggtatgtgttgttcccctccctgtgtccttgtgttctcattgttcagctcccacttatgagtgagaacatgcagtgtttgattttctcttcctgtgttagtttgctgagcatgatggcttccagcttcatccatgtccctgcaaaggaaatgatctcattcttttttatggctgcgtagtattccatggtgtatatgtatcatgttttctttatccagtctatggttgatggatatttgggttggttccataactttgctattgtaaatggtgctgcagtaaacttatgtgtgcatgtgtctttatagcagaatgatttatattcctttgggtgtatacccagtaatgggattgctgggtcaaatggtatttctggttctagatccttgaggaatcaccacactgtcttccacaatggttgaactaatttacattcccaccaacagtgtaaaagcacttctatttctccacagcctcacctgcatctgttctttcttgactttttaataattgccattctgactggcatgagatggtatctcattgtggttttgatttgcatttctctaatgattagtgatgttgagctttttttcatgtttgttgggtaggtaaatgtcttctatttgagtagtgtctgttcatattctttgcccacttttcgatggagttgtttttttcttgtacatttaagtactctgtaaattctgtatattagacctttgtcagatggatagactgcaaaaatgttttctcattctgtaggttgcctgttcaatgtgatgatagtttcttttgctgtgcagaagctctttagtttaattagatcctgtttgtcaattttggctgtttcgcaattgcttttggcattttcatcatgaagtctttgcccatgcctatgtccttggtggtattgcctagattttcttctagggtttttatagtttgggttttacatttaagtcttttattcatcttgagttaatttttctataaggtgtagggaaggggtccagtttcagttttctgcatatggctagccagttttcccagcaccatttattgaataggagatccttttcccactgcttgtttttgtcaggtttgtcgaagagcagatggttgtagatgtgtggtgttatttctgaagtctctgttctgttccattgatctatatgtctgttttggtaccagtaccatgctggtttggttactgtagtcttatagtatagtttgacatcagctaacatgatgcttccagctttgttctttttgcttacgattttcttggctatatggggtcttctttgatttcatatgaaatttaaagtagttttttctaattctgtgaaaaatgtcaagggtagtttgatgggaatagcattgaatctataaattactttgggcagtgtggccatcttcatgatattgattcttcctatccatgaggatggaatgtttttccatttgtttgtgtcctctgttacttccttgagcagtggtttgtagttgtccttgaagaggtccttcacatcccttgttagctgtattcgtaggtattttattctctgtgtagcaattgtgaatgagagttcattcatgatttggctctctgcttgtctattgttggtgtaaaggaatgcttgtgatttttccacatttattttgtatcccgagactttgctgaagttgcttatcagcttaaggagtttttggactgagatgatggggttttctaaatttagaatcatgttatctgcaaacagagacaattagactttctctcttcctatctgaataccctttatttctttctcttgcctgattgccctggccagaacttctgatactatgttgaatgggagtgttgagagagggtatccttgccttggtgctggttttcaaagggaatgcttccagttttttcccattcaatatgatattggctgtgggtttgtcataaatagctcttcttattttgagatatgttccatcaatacctagtttattgacagtttttaacataaagagatgttgaattttatcaaagtccttttctgcctctattatcatgtggtttttgtctttggttctgtttatgtgatggattgtgtttattgatttgcataggttgaaccagcctcgcatcccagggatgaagccaacttgatcgtggtggatgaattttttgatgtgctgctggattcggtttgccagtattttattgaggattttcatgttgatgttcatcagggatattggcctgaagttttctttttttgttatgtctcttcccagtttttggtatcaggatgatgtgttgtacagtgagttagggaggagtctctccttttcaattgtttggaatagtttcagaaggaatgataccagttcctctttatacctctggtagaatttggctgtgaatccatcttgtcctgggcttttttgttggtaggctattaattgctgcctcaagttcagaacttgttattggtctattcagggattcgacttcctcctagtttagtcttgggagggtatatgtgtccagaaatttatccgtttctgctagattttctagtttatgtgcatagaaatgtttatagtattctgtgatggtagtttgtatttctgtggggtcagtggtgatacccctttatcattttttattgtgtctatttgattcttccctcttctttattagtctagctagtggtctatccattttattaattttttcaaaaaactagctccttgattcattgatttttttgtagggcttttcgtgtctctatctccttcaattcttctctgatgttatttcttgtcttctgctagtttttggattagtttgctcttgcttctctagctcttttaattgtgatgttaaaatgtcaatttgagatctttctcactttctgatgtgggcatttagtggtataaatttccctcttaacactgctttagctgtgtcccccagattctcgtatgttctctttgttctcattggtttcaaagaacttcttgatttctgccttaattacattatttacctaggagtcattcaggagcaggttgttcaatttccatgtaattgtgtagttttgagtgagtttcataatcctgagttctaatttgattgcactgtggtctgagagactatgatttcagttctttggcatttgctgaggagcagtgacaccttttcatacattaagtctgtaatttctctcagcagtttctgtagttttcagcatacagatcttgaagatgttttttattaaatgtatccttaaatagtttatgtttttgatgctattgtaaatagtgtttattatttgttactcatacatagaaatacagttggtttttgtatattgacctgcaatccagctgccttgcgaaatycactttttagtttagctttttttgggtaaattctttagaattttctacatatataattatgtcatctgtgaatatagacaattctgcttcttccttttcaatatttctgctgtgtttctgatgcttttgttgccttattgcactgacccggacttcaagtacaatgttgagaagtggtaagaacagatgtatcagccttgttcctcatcttaggaagagtctctttcaccattaagtgtgaagttagttctagagttttctttctttttttcttttttagattccctttagggaatttttttcmtacttcctgcttgcttatgaatgagtactgaatgttaaatgctttttttctacatctaatgagatagttatactatcttctttattacgttaatgtgatatatcacatggtttgattttcagatattaaagcaactttgcatttgtgagatatgtcatgacgaagtggggtttgttaccctgtttatgtactggtgaattcaatctgccaatatttggctaaaagtgtttgtgtctgtgttcctgtggaatattgatctagttttattttctcctaatgtctttatctggtttggtggcagggtgatacctcataaattcagtttggaaatgctgcctccttctttattctctgaaagtttgtgaggttcttaaatcttagaattcatcagttgtatcagtcagggtccagtcaggagacagaaaccatgccaggaccaatctaatcttaagaattattaacagtaatgagattagcagctaaggggtagagagaactccaaagaatacaggaagagcagatgtagagaccagccacttcctaggccggggcagagtactcacagcgggaacaaactcggaagagatcctccttacatggctgaggctcagatctcaactgcagatgatatagtgttgatatagtgtgaccctggaatggcctagagtttgctgagatgctgtgtgctggggctggcaagtgggaaactgtcttctggggtatgtgtcagactcctggggaagctcctcctaaggcgctgctgaaactcactaggaaaccaccctttgtggtgctggtgaaactttctgggaaaccacctgtaggattgttggtgaaaatcccggcaaagtaagtgccactggttgttccaactcctactggaagaggtgcttcactgggtgtcccaaatgctgcttgctagtagccacatgccacagaagcaggaaggaaaaagcacactgggacagagaagagaagctgcttcctcctgcagtgtctttataaccttcactgataaagcttaagtatgccatctgacacaggagaaatgttggcaggacccagctccagtatcataaagcaggtcaaacgagtgggtttgaggctgagaagatttaacagatacagggctattccaatttttctttcttttttttttttattttttttaagagtcttgctctatctccaggctggagtgcagtggcgcaatctcagctcactacaacctctgcctcccgggttcaagtgattctcctgcctcagcctcccgagtagctgggattacaggtgcgcaccaccatgcccagctaatttttgtatttttagtagagacggagtttcaccatgttggccaggatggtctcgatctcctgacctcgtgatccacccaccttggcctcccaaggtgctgggattacaggcgtgagccactgctcctggccaatttttctatttcttatgtcagttttgacaatttgtcttttaaggaatttgtcaacttcatctaaattgtctaatttattggcataacattgtttaaaatattcctttattttaatatcaata

SEQ ID NO: 94924 - DNA, 96539 bp, Homo sapiens
  misc_feature (1)...(96539): n = A,T,C or G
ttgtttttttattcttttttcttttgtctcttctgactgtgtattttcaaatagcctgtcttcaagctctctaattctttcttctgctcgatcaattctgctattaagatactctgatgcattcttcatcagctgtgtagcctggggttggtgaggcgggacaaagagggagaggtgcaagcactcttagcttccccagctggtatcttaataggtcacacgtcccaccctccaactcaatctactggctttgagcccagctcaataccaggacttgcataagaattgcagttcttgtggcctaaactgcccctcaagttcacttagggccccagtgcctccagcccacagtggcaagccttgccagaactcaagctccaattgctggaatgggcaattaccctctgccttgggccggtccaaatgccccctccatgggcaggcatcagctgagtacagctcagtttgctttctgctgtgatggggcagcactgagtctaatgcaaagcctcatgaccgctgtgctccccctctctgaagcacagagattctctccaacagggagctgctgctggggaatgggggaggagacagggatggcatcagcaatttaagactgtctttcctaccctctttggtgcctctttcagtcatgtgaaatcaaagccaggcactgagagtgctcccttgatttttggttcctatgaagattactccctttgtgtagacagttgtcaagctaggtgttcctgagaaggaatgattggcagagccttctattcggctatctcactccgcccctcccctggaatcactttttaaaatgtttgtcagttgcacgttacattgcttgaataagatttgtaggtaatattgccttagcatggctgctttcctcacagggatggagcttaaaactttcctaaagccccctctagtgacaaacagcaaattattatccattatttcatacctccaagctctaaatacctccaagctctaaagttccattttctcatttagttattagatgaatcaattgctacattatttcaattagagaatgactgagaaatagttaatagctcaaattctcaagcattcttaaatcactgaaacctaagcaattttgttttgagactgaggtcagcacagtgcacatttaactctataattttactctgccctcatacatataatttttaaggattccctaaatttccttcatttttgtctttcaggaactttaagggttaaaatatgttcgcaataactcaataaatagaaaaatgttgttttgaactttggcttcttgttgttttcactgtatttactggaacattttctaaacacacaaatataaattccaggaatcctctgaattatgaaactaagggtcatccataaagacatagattaaatatataataataacataatgcttaaaataataatatataataaaacagaataaacaataaactatatattatttgcataactataggttatggtattaaaatatatagtttatttcacttatataaaattgaaatatattgtatatttcaaatatataaaagcccatttccaaagggcttagagctcatccaataagacaggcctaattaaaccattaaaagaagaagtcatattcctaataaagggaattaacgagataaatttttaaaaggctatgaatatttatttcaactgagcacaaatcttagttttgaggttcctgtaagctaatacaaaaaaagaaacccagtaattgattagttcatgccaattcattaagggaaacaaagtatttccgtctaaaacacacatatgggtcaggcacagtggctcatgcctgtaatcccagaactttaggaggctatggcaggtggatcactttaggcctggagtttcagaccagcctggccaacatggcaaaaccctgtctctactaaaaatacaaaaattagccaggcatggtggctcacgcctgtaatccagcactttgggaggctgaggcgggtggattgcctgagctcaggagttcaagaccagcctgagcaacacagcgaaaccccgtctctactaaaatacaaaagaaattagctgggtgtggtggcatgcacctgtagtcccaattactcggcaggctgaggcaggaggattgcttgaatccgggaggcggaggttgcagtgagtcaagatcacaccaccgcactccgcctgagcgatggagcgagatttcgtctctacaaaaataaataaataaataaacaaacaaaaacacatatgcagatttctaaatgtcaataacaagattatagcattggaataatttcagaacatgaaattcaggtgtaaacatatatattcaacaaaaggtcttcagaatgcctactctccaaggccattgcagctggtgatgattttcccaatagaagggtgtttcttgggagctcaccctataataaactcataccagctgtatccatcacccatgatcatgaattatttcctgggaatagcaaccagaaagaatcttctctcttgtttacatacatagagccaaagcaaaggacaaattaaattgcacttaggataacatgttcattgctaaaatttgagagacatagaccctattatgcacacattcttgaaataattggaacaaaatattgaaagggaaataatgaaatagatggcttcagacaaagttgggtaccagacaatatggtctccagaagtttctcccattctgctgccctctccagatcacgcacccccccgttctacttgaaaacaaaatctacttgtcatcctaaagtctacttttctaagaggagctggtatcaccttccctgagtcaagtcactgtgttgcttatcccaagggtgtttgccttgggttccttgtttctaattcaatttaacaaatgcttactggaggcctattatatgcaaagtatttgctagctgccagtagtgaaataaaggccttcatgatcttagaaatggatttcaggcaataatgagtacctaggaaggagtttttgttctctgcatgatatgatttggctctgtgtccccctccaaatttcatgttgaactgtaatccccatgttgggggaggtacctagtgagaggtaattggatcatgggggtggattttccccttgtcgttctcatgatagtgagttctcatgagatatgtttgttaaaacatgtgtagcactttcctcttcgctctctctccctcctactctgccatgtgaagaagctacttgcttcccctttgcccttccaccatgatagtgtttcctgaggcctccccagccatgctttctgtacagcctatggaactgtgagtcaattaaacctcttttcttcataaattacccagtctcaggtagttctttacagtaatgtgagaatgaactaatagactgcataacatctgactccctgcccctgtatccttccaaattacttttgttgttggggccacagagccatcacacacacttcaacatgcctccaattttgaatcattgtctgcctaccctgggttttaggaaaacaggggttcaagcgttattataaccgggtttctgatttatttctccttccttgttacagagtttctgacttactccctcaagcctgaattccctgatacccagctctgctgagataggaatctcagaagagagaaagctaacatttattgaatacattcttttatttgccaggcactgttaattcttttaactataaaattagtagcatcattttttcatcccaagcaacagagaggtagactgttgatgaaaagagtcaaactctgtaaaatatttttagagatttattctgagccaaatatgagtgaccctcaggaggtcctgagaacatgtgcccaaagtggttgaggtgcagcttggttttatacattttagggaggcatgagacatcaatcaaataagaaatacattggtttggttcagaaaggtgggacaactcaatgagtatgtaaatttaaacatttcctggttgacaattggttgagtttatctgaaggcctgggatcaataaaaaggaaatgttggggttaagataaaagattgtggagaccaagtttattgtgcagaggaagctctcagtatagcagacctcagagagagagcagattgtaaaatttgtcttgtcggacctaaaagggtgcctggctcttagttggttatctcctggatttggaaaggaaagaaggaaaacaaaggggaaaagagattctctatagaatgtggttttttcccacaagagattttgcagggcaatttcaagatatggcaaggaaatatatcttggggttaaatattttgatttttttttccttgtctcataatattatgccagaatcagattggaaagtaagtcatggtatatagagtcaaataaaacccatctgataagaatttatggtttctagggcatgactccctagacaccttagataggaatttgggcaagataaaaaaattagagcttagtcctcaactctacagaagaaaatgacatttacccaggaatgggcattgcaataggaatatgcgtgccatggcaaactgtttgcatattcaaggaattaaaggaaaaaaaagtttttttaaaaaataaaaaaaggagaggattacataattgttttgaggtaattagccttggctccaagcatcaataacaagggtgatgtcagttcaaggttggacagacaattgctggacagatgtcctcatagaagtatctttttgggtaaggtggaggtctttgtgcaaggttgtggttttcgcagtattttgtgatagttttattatcaggcattcatggatgagaactctccttcatggccttctccagttccacttgtcaggttttctaacacatgtgactctatttttgattctgacaactttcacaatctacattagaaaagagaaaactggggctcagaaagttttagaaactaattcaagatcaagctggtaagtagcaaaaaatttagaattaagttctacatatctggttccaaaaccaggactcttttcattacagcagtggttctcaacagagttgcgattttgccccccagggaatatttcacaatgtctggagacatttatgactgtcaggattggaggtggagtgggtggggtctgcttctgagaagctacttgcttctagtgaacggaggacagggatgctacaaaacagttcatagggacagcacccccacaacagagaattatacaaccagcccaaaatgtcaatggacatttgggctgagaagtcttacatgacagaatgcttcctaccctgatctgacgttatttccaaggattcaaaggtaactgcttcaaaattaaacaaattatagaaagccatcaataaatcaaccccttattcatgttgcagctctcttccattataaataaaaatggattgaaacttacgataaaagggaggcagggacaggagcggggaagcttggcgagcagaaaggaaattcaaacttattattaaggttaagaattaagatgtaaatatgtagatgtttttcacccctaggattttcactaatccaaaagttcacggactgctttgaaatttaattatttggaactggttaaatgttaccctgacctcagctaacatttgtgtttcacttttctccgggacccaggggacgtggatgccagatgagtccacctcctctccctgctcttcccgcagggacagagcctgccaggtgctggtgactcggatcctgacaggaggtcgctctgcggaagactggcaggatcccagagcaacagactggggctcgatgccccttccccgccaggtctctccgtccgcaactgtcctcctagtaccgggtatcccgcaggcggggctgcggaacgcacgtcccctgcgccgtgacgtcacaatagcgactcactggacccagcccttagcaacggcctggcracggtttccctgctgctgcagcccccgtcggctcctyttttccagtcctccactgccggggctgggcccggccgcgggaaggaccgaaggggatacagcgtgtccctgcgrcggctgcaagaggactaagcatgratggcagccggagaggtaaagggcagctgtcaggggctaccgccgcctcgcccctcgctccaggcggcgctcccagcctcgggtccgggcagctgagtgcaaggccgccccttgggcgcttcctacccctggctgagtcgccagtgttgcctggagctgcccaggcctgcgcaaaggaagagggagagcctgcttgccagcctcgcaggtccgcttctttgccctgaatttgtcgccctgacaccaggggcccctgtctcctgaactcagggtcgtgcagcctttaaaacctcagtagctcccaggcagaggaaccaggtttggtctttggagtcagacctccccgggccccaaatcaaacccctctgctctccatggagacgaccctcagttttcttatctcttgaacgtgagggtcaaatacccaggccatggagttcttgaggattaaatgcagataatatagagaagatcctggcgcatttgaagtggtcagtaaatacgaaatctcccagtaacgaactacctcccccaaagctactgagtaacccagggtttctgtaactttctgtgaataggaatcccctcagggtcatgttaaaatgcagattatgattcagtaggtcccttgggggtggctgagattttgcatttataataaattccaagtaatgcggtgttgctggtcagcggactgcagttttagcagcaatccgtactcaccatatacacctgttctctactgatttcttgagtcaggtggacatcatgtggtggggttgggggtggggaaatacaatcttaaatatctacaaatcggcccaaaccaaataatttgcattttcacactttctgagccagtatcattctttcctcgagtcaaatgaggcaatctttatagactccccgcccctcccaattcagtgtttttatctatttaaaagactgcctttaaaccaagctgctagatgattccttgatgtctttctttgaatgagtctgcctttattatatagtcattgatcaaaataagtgctactccgaatgtaggagataactattcattgatcagcaaactattctgacacttcaccaacctaggtttcagaaaaagcaaatcaaaacgctttatgatcttaagaaattttgcatataaactaacattaaacccttgctatgtactaggaactatttccaaattatctcatttaatgtacaaaaataccttgataggcattagccttatttcatagtgaagaaactaaagcaaaagatcacaaataacttgccaagatcacagcggcagaacaggatttgaatctaggtgaagaatataaatctgaagccaatgcatttacttactatcccatggtagggatgggcagggggaaaggataaatgtaacatttagagtatggtagatttagtaagttgtcagtatttgtttattgaattattttaaaaattgggttcatgccaaatgtaaaaaggtttatatttttacaacttgcacaatttaattagcttcatttttaggaaataatatatgataatgtcaaatactgttattttgaatttttaaaataaatgtaatcaccaaataaccagggcagtcagctttcatgtactgtaaattaataggaaaccataaataattttagacacagctaaaataattgagaataaatttcttagatttcattaggaggtgcttttagttatttcagagcataaaatattaaaacatctaaagaaaaattatcttttgtcatgctcttactgtaatcacgttttagacattcttttgtaaggcaagccttctaaatggtggtatagtacagcaccagactgaaaaacsgttagtcttgtttgtaatctttgtttcctactaactaactaggtaatcttcagcatgtcactgtacgtccctgggcctcagttatttataaaatgggggcttggactaggtatatataaggcatggtttccagcttcctatgggggaaggtgaagaaaagattgagaataacaaactgccattcactctaatatcaatgacctttaggaaggagaggagacaacctattagtatattactgaaagtaacttgaaaaaaaattttttcccagcactctgggaggctgaggcaggtggatcacttgaggtcaggagtttgagaccagcctgggcaacagaattaaaccctgtctccaccaaaaaatacaaaaattagccaggcatggtggcgtgcgcctgtagtcccagctactcgggaggctaaggcaggagaatcacttgaacctgggagggggaggttgcagtgagccaagatcatgccactgccctccagcctgggcaacagagcaagactccatctcaaaaaaaaaattgttttgatctgttggtctcatagagacacttatcaatggtagatttccaaacctttggttttccagagaaaccttgccacaagaaacactttcatctttcctcactggactttcttctggctattttaatcaaattgtgtaggaaaatgggctgctctcatataccagtgaatttcaccactaagaccttcaatctcattgacaagattttagtcctaatagttagagaatgatgttcttttccttggcatttggtttgaggctacttctccatgcccctttggctcattctgggtccagtccagtcaggagatagaaaccatacagtgatttttatacaaggaaaagttaaagaattgttatactttcataaaagagtaactataagatgtaaggggctgggcgtgtcagctcatgcctgtaatctcagcattttaggaggctgaggcaggagcatcacttgaggtcagtggtttgtaatcagcctgggtaacatagcaagaccctgtctctagtatataaaacaaattaatgaattaattaaaaagataagaaaactgtatttggtacctagaattacgggaaagtactcaaagaaggacaatttgaaagagagtttctcccaaagactggggttcagacctcattagagaaggcgtgattgtgcacttgcccaaagcttcatcaccgaggagtgatatcggaggcttcacattccatgggaaatagactttgataaattgcttagccaagtcactaaacaaacaagtgaacaacaatgaaaacaagctcaggagaggattctgtatctagagttgctgcaatatattacctaaaatgttaacttttcaacaaaaagaaattgcaagtcatgcaaaaaaacaaaaacaaaaaaacaggaaaatgtgacctatacacaggacacaaaggaggaaccagaaactatgagagggtagatgaattaaatcgtcttatttctcccctcaattctgttaggtttttttttttcctttctctttcttttttcttttttcgagacagggtcttattctgttacccagactggagtgcattgcagcctcctgggctcaatcatcctcccatctcagcctcctgtgtagctgggactacaggcacacaccaccacacccagctaattttgtatttttttgtgcagttagagtttcgccatgttgtccaggctggtctttgaacttctgggcttaggtgatcagcctgcctcagtctcccaaagtgctgggattacaagcacgagccattgtgctcagccctaattctgtcatttttaatatgacatgtatctataggaatattagaaaccaatgagtatatgccttggtgtacgtctgatggtaaatagacaagggaacatagacatcaaggaacatctaaattccatgtttgttcttatcaccatcttatgctaaagagcagctggattgattcctggggccaaatattaaccaccttgttcacagctgtcacttacagatgggtggggaagcatttctatccagagcattatcactaggttccagccttttttcattctcttttcatcctttcacacttctctgggtatacctgtttttcctttttctgtgacctatagtgaaacatacatagaatagaatggaatttggagggaataaactacatacagctgagatatcttcttggtctgtttcacatgatttagtagcttagaacatggttcaagtactgagcagtttatattggtcaagatagtgtaatgattaagacccaggaaacagactgcttgggttcagatcccaaatctgtcacattcttgtgtaatctttggcaaattacaagtttaacctctgtgcttcaattaccctcatctataaagtagggagaattatagtattgtaaggattaaatgaatttataccagcaaagtgcttggagcactgcctggcagggttaccactcaataaattagccttttgactacaaatgaagaaatcaactcatactggtttaagctaaaatgggaatttttttttttttttggctaatgtaaagaaacgtctagggaaggaagagcttcaaacatggttggcctcaggtactcaaatgatgtcaccaagaaatcgctttctatcttggttccacttgactgtgtaggcttcattctcagacaggttcctttataaggttcaggatggccaccagcaatacagggcttgcttagacccttcactgggtttagcaagcccagtgaaatgaaagtacctttcctaatagttcctgtcaaaggcccaggattgtgtatctcatgttgggacttggatcgcatagcattgctgacgctgtcaacacagctgtccacatttgggttttatgcctaaccctgacagtggggtcagctctatttgaaccacctgggctaagagtaagggaagagtcgcccaaaggaaagttgagttgtcatttccaggtgaagaggcattgaattctggacaagaaaaaagtcacagttctttctatctggagaaatgaggtttttctgagagtttgttggtattttttcttatgtttaggtcttaccctccttctttcttggtagaagctatgctcatttcatgactatcttttttcccagttcagatggcatcaccttgacttgtattgtcctaaatatttttttccttcctgcactctgacctgtgacatagaaagagcttcatagatattctgacctcagtttgtttttctgttttaatctattctgacaagctttgttctctggtcttagattttagttctcctagctcgatacttcttttttctatatttagtcatccatatatcttctagactttctatgtgtcctccttgttatagcttttaacagcccacctgatagcaaactagccrtcttaccctcttaaaacatctctgtttgggggataaagcatttatattttgcatattaaattacatttaatgctgtaactcagacttcctgttttggagattactactaaaaacgcaatcaccttttaggaaagaaattattttgtgataaatttattatttaaaaaatattgaatattgttgtttttgtaaaagttgtgtttcatttatcctaatttatgatttttttttcttgttaaaagtcagagcaacctctgtccttcccagatatggtccaccgtgcctatttaaaggacacttgagcaccaaaagtaatggtaagtgaggtgcttaaaayggcagctttgttagaagattgtctgagtgtttcctttactggcaaattatatgacatgatggaaaaattgtttcatttgacgaatatttgaacttcatattattaattttaatgaaatataggcgttcttgagattagagaattttggagtctatgatttcaaactattattgtgccctggatgtggacttggctgtctcctgctcccagctgctacagcagcccagctctacttttgccaggaaactaccctgatttaaggcatacctgccttgttaaaatggtgagtagcaggtattaaagacgcaagcactgaaaaggaaaagctgtgcagagaaaaagagcacttgaataatacatttcctattaggagcaaaggcctatgggcctctttatccaactggatttctrggtgctgtgatatttttatattttaaagctttcaaggtacatttttaaggtaggttttaaaataaatttttgtaattataccttagaagtataagtctatgtccttaggcaaaataattaaagccttattttccttatttacaggaaaaatctttgatactgttacctccaaatgtggtggaaggatctcattttcagttgcctcacttatttctttgtattacagtgtattttttaaagtttatgattgtggctatgtatgtatgtaacatatatatgtatgtaacatagccataatgataaactttaaaaactaaattttaaataaaaagttaaaactagatttaaaatatacatacatagaaatcaggataaagaacaatatgtaaagtttgctaactttcttttaaagaatatatatatagagctggtataggtatggtggttttaagtatgaggctgccttggrtcacatggaagctgcatcctttatcagcagtgtaaccttgaagatgtaactcatatctctgtgcctcagttttcacttcgattaaatgataataataatgactagataagtttatacatataaagagtttagaacaatgcatggtaaatggcatttattcagtaaatatttttagtagtggcatcaagctcgtaattattgcataggcttgtattatgcacagagtctctggaaggatgcatttaaacagtaacatagtatatttctgggaagggagactaaaggtcagggtagagaaatcrcttctttttcaaactccatatgccattttagctgttgaatttttttaaccacattgcgtgtattacttctcaaaaactgtttttaatgtttaaaaaagctttgcctatatttatattttatacttgtgtgtaagtgcttaactatttctaagatttcttttaaacagtttgaatgaggaccaaggagtttaatgtcatggaatttctttgcgattacacttgttataagatagttttagtacttcaaaaagaatgtagtaaactggtatgtagatcttgttttcaggtttaagttagaaatttgcttcttggaatataatttttgtatgtagggttttgggatttggtagtcattgaatttctgaaattccgttgattragtattaacaatggtaactaattaagcaagcagctaaacatccttagttagaagattgagagctgtcaaaaaaaaaatagttctgtaaatgtaatgacagatcatatcctagaatctcttccccagagtctcaggcttgtaaaattttattctcaggaaggtttgaacccaaatggtcaatagctcattggcattatcagtgcaagattaaagcttcacatcacaatgtcatatatcaatatctctggttgaatttcagaacwttttataagaatgagttaaakaatcagtgccttgtttatctcatgatttttatattagttttaaatatataatgattatgttttaatttttagctttttgcactgactcctcttctctcagactaagcactctccagctggtcaagaatcacatggctgttcactataataaaatcctttcagccaaaggtaaaaatgtgcaaatgtgaactctctgtactcaatttaaacctccagcttcacttctcattaaaatatatctatagcaaaaatgaataccttatatatatgagaggatttgtatttgtttggtttagtgtgatacaaactattgactctaggtacttagcaaattcatacccatttttgttaactatatttgaaatctatatattgcctattttatttcgttttttatctctattgctaataatattttgttagatattgcttttaatatgaaaatatataatctgcttttttgtttacacatctatggaagttgcacaaagaagatgctatttttctgtttaatttttttcttttgtcagctttattgagataaaacttacattataaaatgcattgattataatgtgtacagataaatattttgaaaaatgaacacatttgtataaatactactacaaccatgctgtaaaacaggaatcagctaactacaccgttcaggccaaaccctcctaccacctgtttctgtacagcccatgaactaagaatggtgttcatatttttaaatggtagcaaaaaatttaaaaaaaagtattttgtgacctgaaattcaaatgtagttatccatagacaaacaatcwttttcaatcttttacatattgtctgtggcagcttttacactaaaaagcagagttgaccagttgtaacagactgtatcaccctgcaaatcctgaagcatttrctacctggccctttgtagaaaaaatttgccaacccttgatatagaaaaagtccattacctcaaagagttccccctagtcctttgccgtcagtcccctcctgacaaatccctggcaaccactgatctgctctttcgcctatagttttaccttttctataagttcatagaaatggaatcatgtatcgttttgggtctggcttttttcagttatcttaatgatcttgagactaattcacactgttctgtgtaccaccatttattcttttgtattgttaaggagtatttcatttaatgaatagaccacaatttgtttatgattcaccagttgttaaacatttggattgttttgactcacttttggccattaggaataaagctgctataaacattcacatataattttggcgcatgtgtttacgtttcactcgggtaaatttatgtgtcaggagtagaactgtgaggtaatatattaagtataagtttaattttataagaaactacagttttccagagtgaatataccatttacatttccattacttctgcacccttaccaacccttggcgttgacagtccttttttaaccattctagtgaatatgaaatagtatcacttcatagttttagtttgcatttccctgatttctagtgatgttgccttattacttcccatctgtatatcttctttggtgaaatgactgttcaaatcttttacccattattaaaaatgggttgtttgtctctttagtattaagttgtgagtttctttatatacagattctatatcagatatatgttttgcagatatttttttcccaatctgtagctggtgttttcattttcttgttaaaattcgtattctggagaaatttttagacttacataaacatttaaaaattgtatagggagttaccatataccctgtactctgctcttccactaatgttaaaaatcttaaaaaccgtggtatagttatcaaaaccaggaaatcaatattgatgcaatcccattaactacagaccttatttgaatttcaccaatttttgactaatgtcttttaaatttttattttctcatttaaatagctaaagtttttaaattttagtttatattttatgatgcttatatttttaaatgactaaaaaaacaaaagaaaaatattttgtgacatgaaaatcgtgaagtcgtttagttttttagttttataaactaaacaggttatttcataacctgttcaagaaatatttgcctaaccttaggtcactcagaatttcttaatatgttttcttctagaagttttaaagttttagcccttacatttaaatttgcgatccattttgagttagtttttgtatatggtgtgatataagggttttgaggttttttgtttgttttgtttttttgcctcttcatatccaaatttcccagtaccatttgttgaagaggttatcttttctctatttaattgtcctagtactttttgaaagtcagttgaccatatgtgtgggtctgtttctggacttaactccttggttctgttgatctatatgtctatctttaagccccatgccacactgccttaattattgtagcattacagtaagtcttgaaatcaggtagtgtaagtcttccattttgcttttttttccccaagcttgttttgggactacattataagtatgttaagtctgtttcattttgagtagtttatattgctatgtcttcaagttcactagtattttcttctgcagtattgaatgagttattaatcccaacagtgtatttttaatcaaggatcttgtgttttccatcgctagaagtatgataaacagctgcaaggtctggaacattttgtgatttccacatttggtatttgtcatttataaatactgacaatattattaaactattacctttctctttcagctgcagtagactgctcggttccagtaagcrtgagtaccagcataaagtgtaagtaatttttggacattattacctttttaaaaaaaaattaaggtaaatatacataacataaaatttactgtcttaaccatttttaagtgtccagttcaatattaagtacattaatattgtggtacaatgataactactacctccagaactctctttatactgcaaaactgaaattcctgtgccacataaacaataatttcctcccataggccctggaaaccaacattcttttctatcactatgaatttgactactgtcaccattgtacttactatctctatgaatctattttaggtaccttatataagtggaatcatatcgtgtttgttctgttgtgactggcttatttcacctagcatgatgttctcaaggttcacccatattgtaatgagtcagaatctcctttttaaaggctgaataaaattccattctgtgtatataccacattttacttatgcattcgtcagttgatggacacttgagttacagtcaccttttggctgttgtgaataaactatactgctatggacatgagtatacaaatacctcttcaagaccctccttttaaagattttgggtgtatatttagaagtggaattgctaaatcatatattctatttttaattttttgagaaactaccatactattttcttttcttttcttttttcttttttttttttttttgagacagggtctcactctattgccctggggctaaagtgcagtggaacgatctcacctcactgtaacctccacctcctgggctcaagcaatcctcccacctcagcctcccaacagcctcccaagtaggtgggactacaggcgcaagccaccacgcacagctaattttgccacagcctttttacatagagacagggttttaccatgttgcccaggcttgtctcaaactcctgagctcaagtgatccacctgactcagtcccccaaagtgctgggattataggcgtgagccactgcacccagtgaccatattgctttctatagcagctgcaccattttccattatgactaatgatgctcaagtattcagatttccccatgtcctccccaacacttgctttttcctatttgtttaatagtagccatactaaaaggtgttgacacattgccttttgagaaagcatttctaacttaaaaattatccaaaaatacccaggcacagtggctcacacctatgggagacagaggcaagtggatcacttgagcccaggcatttaagagtagcctaggcaacatggtgaaaccctgtctcttcaaaaaatacaaaaattagctggatgtggtggcatgcaactctggtcccagctactcaggaggctaaggtgggaagattacttgagccagggaggtcaaggctgcagtaagccatgatcatgccactgcactctggcctaggtgacagggagatgctgtctcaagaaaaaaaaaaaaaaaggaaaaagaaaacccataatgttgacacaggatatatagaatccttatatatctaccctttgaccaggttatcttcatttttaaatcatcagaccaaaaatttgaaaaccctgtttaaaaatttctgaagaataccatttgaaacctttgtttttgatttcaattaagaaatgtatactttatgggaggccgaggcaggcrgatcacgaggtcaggagatcgagaccaacctggctaacagggtgaaaccccgtctctactaaaaaacaaaaaattagctgggtgtggtggtgggcacctgtagtcccagctactctggaggctgaggcaggagaatggcgtgaacccgggaggtggagcttgcagtgagcagagatcgcatcactgcactccagcctgggcgagagagcaagacaccgtctcaaaaaaaaaaaagaaatgtatcctttaaaaataggcaaaaaacatggctgtcacagcctttgattgtcgtattaatcatataaaaatcagtgttatacgtatgtttattgcagcactattcacaatagcaaagacttggaaccaacccaaatgtccaacaatgatagactggattaagaaaatgtggcacatatacaccatggaatactatgcagccataaaaaatgatgagttcatgtcctttgtagggacagggatgaaattggaaatcatcattctcagtaaactatcacaagaccaaaaaactaaacaccgcatattctcactcataggtgagaattgaacaatgagatcacatggacacaggaaggggaacatcacactctggggactgttgtggggtggggggaggggggagggatagcattgggagatatacctaatgctagatgacgagttagtgggtgcrgcgcaccagcgtggcacatgtatacatatgtaactaacctgcacaatgtgcacatgtaccctaaaacttaaagtataataataaaatttttaaaaaaagataaaaaaaaatcagtgttataaattttaagtttagtgttttctaagtttctaagttttctaagttaatatttgaatttatgtagagtttgagaacatttctacattaaaaaagtaaatatcagccaggygcagtggctcatgcctgtaatcccagcactttgggaggctgaggcgggcggatcacgaggtcaggagatcgagactatcctggctaacacggtgaaaccctgtctctactaaaagtacaaaaaattagctgggcatggtggcaggcgcctgtagtcccagctgctcgggaggctgaggcaggagaatggcgtgaacccaggaggcggagcttgcagtgagccgagatgatgccactgcactccagcctgggcaacagtgcaagactccgtctcaaaaaaaaaaaaaaagaaaaaaaagtaaatatcaacctaaggttaattcatgctaaatgataaatgaataaaagcatacatagggaaatgccttttgggtgcaatctaggaaagatcacaaacagtaggaatggttaactcatctctgcttgtatatcttagttgaagagatagaaggtaggggagaaagtaactaccagctataggtcatagctacaaacacagtgtctgtctcaggccttgtgcttgacactttgtattctcccttttctattctttttatgtttgcaacaaaccttcgtgtaggctgtcatatttttgaaggaaaattagattcaaataattttaaaggaggaaaaaaggcatgttaggcaagagtagagacttcttagtacatatttttaaagaccagtttggtcgctacatacaagttatatgggcaagtcattttacctctgaccttccttttttgtgaaatgaaaggtaattagatgatttctaaggacccttccagatttttaatttctgtgctttacatttttttcttctgtatcatattagtaacttttttgtagcacaaaactggttcagtgtttacatgctttaaatatctggatcatttgaattaagttggttgggattacaggcgtgagccaccgcgcctggccttaaaatgatctctagagacaatgacagccattatataatttttaaagggtcaacttaacaggaagatgtaacaattatctacatacccaacatcagaactcctaaatatatcatgcaattgtggacaaatctgagggagaaattgactttaatacaataatagaagacttcaataatccactttcaatagtggatacatattataagacccagacagaaatcatttaaaccgctgacttgaacaacataatagaccaaaggaatttaacagatatatacagacctttataccctattgaagaatacgcactcctcaagtgcacatgaaaccttcttcagaatagatctcatattaggccataaaatcagacgtaacatatttaagaagataaaaatcatttcaagtatctttttcaaccagaatggaataaaactaataattaatagctgtaagaaaatgggaaattcacaaatacatggcaactaaacaacacattcttgaacaagtattgagtcaaagaagaaataaaaacagaattttgatatcttgaggcaaaggaaaacaaaaccacaatataccaaaacttacagaatgcagcaaaattagtactaagagagtggtttatagtgatgaatacttacattaaaagaggggatctcaaacaactcaactgtatacctcaaggaactagaaaaagaagaataaactaagcccacctcggtaaatccctagaaacatacaaccttcaaaaactgaatcaagaagaaatatcctgaatagactaatagaaaaaaggagattgaatcagtaatcaaaaacttcccaacagaggccacatgtggtggctcatgcctgtaatcccagcactttgggaggccaagacaggcagatcacttgaggtcaggagttcaagaccctctggccaacatggtgaaaccccgactctactaaaaaatacaaaaaattagccagatgtggtgttgcacacctgtaatcccagctactcaggaggctgaggcaggagaatcacttgaatccaggaggtggaggttgcagtgagctgagatcatgcccctgcactccagcctgggtgacagaatgggataaaatctcaaaaaaataaaattaaaaattaaaaaaaacttcccaacaaagaatagcccaggaccagatatcttcataggtaaatctaccaaatattcaaagaaaggatagcaccagtccttcttaaacttttataaaaatagaagtgggaatacctccaaactcattttatgaggctagcaccaccctgatgccaaaaccaaacaaagacaacacaagaaaagaaagctacaggccaatatatctgattgatataagtgcagaaatcttcagtaaaataccagcaaactgaattcaattgcatgttaaaagagtcaaacaccatgaccaagtcagatttatccctgggatacaaaggtggttcaacatatgcaaatcaaccaatgtgatataccacagtaacatagtgaaagattaaaaaccacacaatcatctcaatacatgcagaaaaaccatttgacaaaattcagcatccattcatgataaactctctcaacaaaataggaatagaaggaacttacttcaacagcatgaaagctatatatgaaaatctcacaggtaacatgatgcttaatgaagaaaaacaaagcttttcctctaagatctggtataaggcaaggattcctcacttttgccacttctgtttaacatagtattggaagtcctagccagagcaattagacaagaaaaagaaataaaaggcatacgaattagaaagaaagcagtagagctgggtgtggtggttcactcctgtaattgcaatactttgggggaccaaggtggagagatcacttgaggccaggagtggccagcctgggcaacatagtaagaccatgcctctacaaaataaaaaaactaaaaattaaccaggcatggtgacacatacctgtagtcctagctacattggaggctgaggcagtaggatcacttgagcccaggaattcaaggtcacagtgggctttgaccgtgccactgaattccagcttgggcagcagagaaagaccctgtctcaaaaaaaaaaaaaaaaaaaaaaaaaagtaaggttacttctgtttgtgatgacatgatatatatgtagaataccctaatgcccaataaaaaagaactgttgcaataaattcaatatagttttaggatacaaaattaatgtacaaaaaccagtggcatttctgtacacaaacaactgtctgaaaaggaaattaagaaaacaatgccatttgcaacagcaacagaaaggataaaatgcttaggaataaccttaaacaaaaaggttgaaaacttgtacactgaaaactataaaacatcaataaaggaaattttagaagacacagataaatggaagacatccatatttatgaattggaataattaatattgttataatttttgtactacccaaagtagtctataaattcactgcaatccctatagaaatcccaaagacattctttacagaaatagaacaaacaatcgtaaaattcatgtgggaccacaaaagaccacaaataaaacaatcttgagcaagaaaaacaaggctggagaaatcacactttctaaatttcaaaatatatttcaaagctacaataatcaaaacagtatggaactggcaaaaaaaacacataccagaccaatggaaaagaatggagaacccagaaataaatccatgtgtttatagtcaacttatcttcaaaagggtaccaaacacacacagtggggaaaggatagtgtcatcaatgaatgactctgggaaacctggatagtcccatgcagaaggatgaaaatggactcttaaaccatagacaaaaatcaactcatacaaaaatcagctcaaaatggatttaaaaacttaaatataaggtcctaatccataaaactactagaagagaacatagaaaaaaagcttcttggctttagtctgggcaataatatttttggatatgactctgaaagccaggcaacaaaagcaaaaatagacaagtggaattcaccaaactcaaaagcttttgtacagcaaaggaaacaatcgacagagtgcataggcaacttacagaatgggaggaaatatttgcaaaccatgtatctgataagaggttaatatcccaactgtgtaagtaataagtacaactcaatagcaaaaaaaaaaaaaaaaaaaaaaaaaacccaaaaccttgctataaaaatgcatgaaggacctgagtagacattctcaaaggaagacatacaagtggccaataagtgtatgaaaaggtgcttaacattactaattatcagggaaatgcaaatcaaaaccttaatgagatatcactcacacctgtgagaatggctatcaaaaagacaacatgtaacaagtgttggcaaggatgtggaggaaagggaacacttgtgcactgttgctaggaatgtaagttggtacagccattaggcaaatcaatatagaggctcctcgagaaattgaaaatagaactaccatacgattaagcaatcccacttctgaatatatatccaaaggaaatgaaatcagtatgtcaaggagatatctgttctcccatgtttgttacagcattatagcaaatagtcaagatatagaaacaacctaaatgttgacagatgaatggataaagaaaatgtggtatgtgtataaagaaatactacacacacatacacacaacccacaccacatttataacatacacagacacatgcaaaacccacaccacatagcctttaaaaagaaggaaatcctgtcatttctgtcatttgtgacaacacagatgaacctgagggttcattttagcttccacatataagtgagatcacgtggtacttgcctgtgtctggattattaaacatgtgtatgtgcaatctaaagtgggcaacctcagagaggcagagagtagaatggaagttgccaggggctacaggaaggaggaaatggggagatgttggtcaaagagtacaaagttttagttaatgcaagttgagtaagttctggagatctaatgtacagcattaattagagttaacagtactgtataatatacttgaaatttgctaagacagtacatctgtgttctcaccacaaaaaaaagaaaaagtagcaactatgttaggtgatagatgtattaattatcttgattatgatcattcacaatgtatatcagaatatcaaattaaatgcctgaaacatatacagtttgtctgctataccttaacaaagctgaaaaaattattacctaagcaacctgatatatatataaacttaaatagaatggccatctggtcatgactggaaagaatatattaaccagatatatttggttaatgtattgactggaccaaaagaaaaggcatatcttgttataagatagaaagactctatataatgcaaatatattgatacatactttttaaagtattgatactttttaaagtaatttctaaattcaatgtgagctcaattaagatgccaaaaatcagtattgttcatacactacttgacaaaatgttccaaaattaacctacatatatatgagaaaatagccagaaataatctgaacatgaatagaaaagagtagtagagtagccctactaagtatttaaaagtattttaggtcaggcgttgtggctcacgcctgtaatcccagcactttgggaggccaagacgggaggatcacttgaggtcatgagttcgagaccagcctggccaacataatgaaacccgttctctactaaaaatacagaaattagccaggtgtggtggcatgcacctgtagttccagctactcgggaggctgagacatgagaatcacttgaacccgggagggggaggttgcagtgagccaagatcatgccattgcactccagcctgggcaacaagagtgaaactctgtctcaaaaaaaataaagtcaaaatcacaaatttaaaatggtcatttaatttattttgctagagtaacaaaataacatttaatttagtttgctagagtttattcattgatttattcagcatatatttattgggcccctgctatgtgctagacattgttctaagggctgggactaaagaggtgaacaggacaaatttcctgcttttgtagagtttacattgtagttggagaagacaaacaataagcaaatacaaataaataaagaatatgtcatatggtaataaatgcaatggaaaaaaaatgactgagagtcccttggaggagaagcccttgctgataaggtgacaattgagcagagacctgaaagaattaaggaagaggcatgtggctatctggggaaaaagcaatccagacagaggaaacagcaagtttaaaagccttgaaatggtgtcatgattggtgttttcaaaaaacagcaaggagggctgtgtagctagtatggaataagccaactgaagagtaatagatgaagtcactgagatgggacagagggatgcagagaataaaaggcagtggccattgcaaagactttggccttcactctgaatgaaattgcaagccattggagggtcttgaagagaggagtagcagggctacttttacttttaaaagcatccctttggcttcatagttgggaatagtctgaagcagaatgactagttagaaracagtaaataatccagatgagaaataatggtgactgggaccagagtggttgcagtggagagagattgaaataatcagattctggaaacatttcaaatgtgtgtccatagtatttactgatgggttggatgtagatgtagtgtgagagagaaaagaggattgggtcaaaaatgacttccaagacttagaacctctcagccaaaaggatggagttatgatttactgaagtgagcaataccataggaaaagattgagaggagaaagcaaagcagtagttcagtgttggtcattacatttgaaataaatgcctattacatagccagttggcaacccttaggaggcagttggagtgcaagtctggaattcaagagacaatttcaggatagagctaaaaatgtgggatttgacagcatatagggggtatttaaagaattgcttgcactttttgtttttaaaatgtagatttagctagtgcttatttatccatggtattttctgcttttagtcaattaaggcaggaatttttcctttttgctacataaaccaaattgtgatggcttagagtaattgcaaatattataatcaccaagttaagtgtaattaataatcattcttcattatatatgatttttcattataatgaatttggcttagaaacaggctttctagacacataaaaagagaagtctctggatttgagccatctctgtttttataagctactctgtacttttctgtcatagcagactactgacttgatcagttcctaacctggaatatagtttattgaattatttaaataatttaatttttatagaagttttattgaaaaataatttacatactataagattcactgattttttactaaatttacagaattgtgcaaccacaaaccaattttagaacattttcatcattttatgaagatcccttgtacccatttgcagccacgctgcaaattcctacccctagccccaggcaaccactaatctactttttttttttttttagcattctattttttgttattgggaaaagaagaaattctattaaataaatatatttacaaatcaaaatgatctttaatcaatttgtaactagtttccacaattgcatttgtatacagtttctttagagaagaaaaatattgactaaaaaatgtccaggtgttctttttttattattattattatacgttaagttctgggatacatgtgcagaacatgcaggtttgttacataggtatacatgtgccatggtggtttgctgcacccatcaacctgtcatctacattaggtatttctcctaatactatcccttccccagtcccccaacaggccccagtgtgtgatgttcccctcctggtgtccatgtgttcttattgttcagctcccacttatgagtgagaacatgcagtgtttggttttctgttcctgtgttagtttgctgagaatgatagtttccagcttcatccatgttcctgcaaaggacatgaactcattcttttttatggctgcatagtattctatggtgtatatgtgccacattttctttatccagaaagaaatatacccattgatgggcatttgtgttggttccaagtctttggtattgtgaacagtgctgcaataaacatatgtgtgcatgtgtctttatagtagaatgagttataatcctttgggtatatacccagtaatgggattcctgggtcaaatggtatctctggtcctagatccttgaggaattgccacacggtcttccacaatggttgaactaatttacagtcccactaacagtgtaaaagcgttcatatttctccacatcatgtctagcatctgttgtttcctgactttttaatgatcgctattctaactggcatgagatggtatctcattgtggttttgatttgcatttctctaatgaccagtgatgattagctttttttcatgtttgttggccacatcagtgtcttcttttgaaaagtgtctgttcatatccttcgcccactttttgatagggttggttttttcttgtaaatttaagttccttgtggattctggatattagccctttgtcagatggatagattgcaaaatttttctcccattttgtgggttgtttgtccactctgatgacggtttcttttgctgtgcagaagctctttagtttaattagatcccatttgtcaattttggcttttgttgccattgcttttggtgttttagtcatgaagtctgtgcacatgcctatgtcctgaatggtattgcctaggttttcttctagggtttttatggttttaggtcttacatttaagtctttaatccatcttgagttaatttttgtataaggtgtaaggaaggggtccagtttcagttttctgcatatggctagccagttttcccaacactgtttgttaaatagggactcctttccccattgcttatttttctcagatttgtcaaagatcagatggttgtagatgtgtggcgttacttctgagacctctgttctattccattggtctatatatgtgttttggtaccagtatcatgctgttttggttactgtagccttgcagtatagtttgaagtcaggtagtgtgatgcctccagctttgttcttttggcttaggattgtcttggatatacgggccctttttttggttccatatgaaatttaaaatagtttttttctaattctgtgaagaaagtcaatggtagtttgatggggatagcactgagtctataaattactttggacagtgtggccattttcacaatattgattcttcctatccatgagcatgtaatggttttccatttgtttgtgtcctctcttatttccttgagcagtggtttgtagttctctttgaagaggtccttcacatcccttttaagttctattcttaggtattttattctctttgtagcaattgtgaatgggagttcactcatgatttggctgtctgtctgttgttggtgtatagaaatgcttgtgattttttgcacattgattttgtatcctgagactttgctgaagttacttatcagcttaaggagattttgggctgagatgatgggggtttctgaatatacaatcatgtcatctgcaaacagagacaatttgactttctctcttcctatgtgaataccctgcatttctttctcttgcctgattgccctggcctaaacttccgttactgtgttgaataggagtgatgagagagggcatccttgtcttgggccggttttcaaagggaatgcttccagcttttgtccattcagtatgatattggctgtgggtttgtcataaatagctcttattattttgagatacattctatcaacacctagtttattgagggtttttagcatgaagcgctgttgaattttgtcraaggccttttctgcatctgttgaggtaatcctgtggtttttgtcattggttctgtttatgtgatgaattatgtttattgatttgcatatgttgaagcagccttgcatcccagggatgaagccaacttgatcgtggtggataagctttttgatgtgctgctggattcgatttgctggtattttattgaggattttcacatcaatgttagtcaggaatattggcctgaaatttttttttcttgtgtctctgccagggtttggtatcaggatgatgcaaaatgagttagagaggagtccctctttgtctgttgtttggaatagcttcaaaaggaatggtaccagctcctctttgtacctatagaggaattagactgtgaatccatctggttttgggcttttttgggttggtaggctattaattactgcctcaatttcagaacttgttatgggtctattcagggattcgacttcttgtttagtctcaggaggatgtatgtgtccaggaatttatccatttcttctagattttctaatttatttgcatagaggtgtttatagtattctctggtggtagtttgtatttctgtgggatcagtggtgatatcccctttgtcgttttttattgtgcctttttgattctctattttcttctttattagtctggctagtggtctatctattttgttcatcttttcaaaaaaacagctcctggatttattgattttttgaagggtttttcacatctgtatctccttcatttctgctctgatcttagttatttcttgtcttctgctagcttttgagttagtttgctctcgctcctctagttctttaaattgtgatgttagggtgtcgattttagatctttcccactttctcctgtgggcatttagtgctgtaaatatccctctaaacactgctttagctgtgtcccagagattctggtacattgtgtctttgttctcattggtttcaaagaacttatttatttctaccttaattttgttatttacccagtagttattcaggagcaggttgttcagtttccatgtagttgtgtggctttgagtgagtttcttaatcctgagttctaatttgattgcactgtggtctgagagactgtttgttatgatttccgttcttttgcaattgctgaggagtgttttacttccaattatgtggtcaattttggaataaatgtgatatgctgctgagaagaatgtatattctgttgatttgggatggagagttctgtagatgtctagtaggtctgcttggtccagaactgagttcaagtcctgaatatccttgttaattttctgtcttgttgatctctttaatattgacagtggggtgataaagtctcccactgttattgtgtggcagtctaagtctctttgtaggtctcaagaacttggtttatgaacctgggtgctcctgtattgggtgcatatgtatttaggatagttagctcttcttgttgcattgatccctttaccattatgtaatgcccttctttgtcttttttttatctttgttggtttaaagtctgtttttttcagagactaggattgcaacccctgcgttttttgttcccttgctggtgaggagttgtgatcctttggaggagaagaggcgttctggtttttggaattttcaacctttttgcactgttttttcctcatcttcgtggatttatctacttttggtctttgctgttggtgatctttggatggggtctctgtgtggatgtcctttttgttgatgttgatgctattcctttctgtttgttagttttccttctaacagtcaggcttctctgctgcaggtctgccgtagtttgctggaggtccactccagaccctgtttgcctaggtatcaccagcggaggctgcagaacagcaaagattgctgcctgtttttccttcaggaagcttcgtcccagaggggcacccgccatatgccagccggagctctcctgtatgaggtgtctgtcaacccctgctgggaggcatgggggtcagggacccacctgaggaggcagtctgtcccttagcagagctcaagcactggctgggagatccgctgctctcttcagagctggcaggcaggaacatttaagtctgctgaagctgtgcccacagccaccccttctcccaggtgctctgtcccagggagttttatctataagcccctgagggaggctgctgcctttctttcagagatgccctgcccagagaggaggaatctagagaggcagtctggctacagtggccttgtggcgctgtggtgggctccgcccagtctgaacttcctggcggctttgtttacactgtgagggaaaaaccacctactcaagcctcaataaggtggatgcccctccccccaccaagctctagagtcccaggtcaacttcagactgctgtgctggcagggagaatttcacgccagtggatcttagctagctgggttctatggggtggaatatgctgagctagaccattcgcctccctggcttcagacccctttccaggggagtgaatggttctgcctcactggcattccagttgccactggggtatggaaaaaaactcctatagctagctcagtgtctgcccaaacagccacccagttttgtgcttgaaacccagggccttggtggtgtaggcacctgagggaatctcctggtccgtgggttgcaaagaccatgggtaaagcatagtatctgggccagagtgcacaccgttcctcacaggatagtccctcatggcttcccttggctaggggaaggagttcccctaccccttgcgcttcctgggtgaggcaacaccacaccctgcttcagctcaccctcygtgggctgcacatatacagtatttcatcctgtatatgtaccacattttctttatccaattcaccattaatggacacccaggttggttccatatctttgctattgtggatagtgctgtgttggatatgagggcatgtgtctttttggtagaatgattttttggggggggtttatacatggtaatgggattgctgggttgaatggtaggtctatttttagttatttgagaagtcttcaaactttcctcagtggctcagtcttcagctttcctcagtggctgaactcacattcccaagaacagtgtgtaattcctttttccccgcaaccttgccacatctactattttttgacttcttagtaatagccattctggctggtatgaaatagtatctcattgtgattttatttgcatttctctgatgattagtgatgttgagtacttttttatttgttggctgcttttatgtcttcttttgataagtgtctatgtccttttctcactttttaatggggttatttgtttttcttcttgctttttyttttttttttaagttcctcatagattcttgtattagggttctctagagggacagaactaatgaaatatatatataaaggggagtttattaagtattaactcacatgatcacaaggtcccacaataggccgtctgcaggctgaggagcaaggagagccagtctgagttccacaactgaagaatttggagtccgatgtttgagggcaggaagcatccagcacaggaggaagatgtaggctgtgagagtaggccagcctcaacccttcacgtttttctgcctgctttatgttcgctcgmagctgattagatggtgcccacccagattaagggtgggtctgccttccccaacccactgactcaaatgttaatcttctttgtcagcaccctcacagatatacccagtaccaatactttgcatccttcaatccaatcaagttgacattcagtattagccatcacaattcttgatattagttttttgtcagatgcatagtttacaaatatattctcccattctgttggttgtctgtttactctgttgatagtttcttttgcattgcacaagctttttaatttaattaggtctcacttgtcaatttttgtttttgttgcaattgcttttgaggacttggtcacaaattctttgccaaggccaatgtccagcagagtatatcctaggttttcttatagaatttttatagttttaggtcttacatttaaatctttaatccatcttgtagccttgtagtgtagtttgaagtcgggtaatgtgatgcctccagttttgttctttttgcttaggactgctcttttttggttccatataaattttagaatagtattttcaatttctgtgaaaaatgatgtgagtagtttgataggaatagtgctaaatctctagattgctttgggcagtatggacattttaatgatattgactcttccaatccacgaacatggaatgtttttccgtttgtgtgtgtcagctctgatttctttcagcagtattttgtaattcttttagatatccttcacctccttagatattttcctaggtattttattttgtgtgtgtgtaactattgtaaatgagattgtgttcttgatttggctctcagcttgaatatcattggtgtatagaaatgctactgattttkgcacattgattttgtgtcctaaaactttactggaatcgtttattagttcargaagccttttggcagcatctttagggttttctaattatagaatcatatcatcaggaaagagataatttgactactacttttccaatttggatgtgttttatttctttctcttrcctaattactctggctaggactccagtagtatgttgaataagagtggtgatagtgggcatccttaygctgttccagttcaaaagaggaatgcttccagcttttgctcattcagtatgatgttggctgtggacttgtaatagatggctcttattattttgaggtatgttcttttgatgcctaatttgttgagggtttttttttttaatcatgaaggattgctagattttattgaagctttttgctacatctgttgagatgatcataaggtttttgtttttaattctgtttatatggtgaatcgcatttattgatttgcatatgttgaaccagcctttcattccaggaatgaagcctacttgactgtggtttattaactttttgatgtgctgttggattcagtttgctactatttgttgagcatttttgtgtctatgttaatcagggatattggcctatagctttcgtttttggtgtgtctttaccagattttggtgttagaattatgctggtttcatagattgggtttcatagaatgagttagggaagagtccttcctcaagtttttggaatagtttcagtaggattaataccaactattggtatgtctggtagaatttggctgtgaatctctctggtccagggctttttatggttggtaggttttttttattactggttcgattttggaactcagtatttctcttcagggtttcaatttcttctgaattcaatattgggaaattgtatgtttccagaaatttatctatttcctctagatttcctagtttctatgcataaaagtcttcttaatagtctctaaggatcttttctatttctgtggggtctgttgtaatgttgcctttgtcatatctggttgtacttatttggatcttctcttttatctttgttaatcttgctaacagtctgttgatctgtttatcctttcaaaaaaccaactttttgtttcattgaacatttatatggattttggaatctcaatttcaattatttctgcttttagataattattttctactactagctttgggattagttcttgttattctacttcctctagttgcaatgttagattaatttgagatctttctgtcttcttgatgtaggtatttagcactgtaaacttgcctcttaacactgcttttgctgcatcccagaaattttggtatgttgtgtttctgtttttatttatttcaaagagtttttttgtttttttttaatttcaccttctgttgtttacccaaaagtcattcaggagcaagttggtttaatttccatgtaaaattatgtggttttgaggagtactcttggtattgatttctacctttttttccacygtggtccaaaaatatgtttggygtggtttcaatttttttacatttattgaaacttgctttgtcttcgagcatgtggttgatcttagagtatgttccacatgcagatgagaagaatgtttattctgtggttgttgggtggagtattcttctgtagatgtctattaggtccagttggtcaggtgtcaaatttaaatccagaatttctttgttagttttctgctttgagggtctatctaacactgccagtgggatgttgaagtcccccattattaatgtgtggctgtctaaatcttttcataggtctagaagtacttgtatgaatctgggtgctccagtgttgggtgcaaatatacctaggataggtaagtcttgtggaattgaatccttcgtcattatgtaatgcccatctttgtccttattgctgttggtttaaagtctgttttatctgatacaagaatagcaacccctgctcttctatttactgtttgcatgataggtctttcttcatcactttacttcaggcctataggtgtcattacatgtgtgatgggcctcttgaagatagtagaaggttgggtcttgttttttgtttttttttaaataaaatattattttattttttaaataaaaaaawtaaaaagtggttcttgccactctgtgccttttaactgggtacatttagaccacttacattcaaggttaatattgatatgtgaggtttgatcctgtcatggtggtgtttgctgtttgctttgtagtcttgattgcgtatttgctttataggatctgtgaacctctgtatttatgtgttcttttatggtagtgagtatcattcttatgtatgcatgtttagaacttccttgagcatttcctataggctaggtgatgtagtttgggtatttgtccccacccaaatgtcacattgaaatgtaacccctagtgttggagttggcgcctgatgggaggtgattggatcatgtctgtgaatttctcatgaatggcttagcgccacccccttgatgctgtccttgtgatagtgagtgggttcttgcaagatctggttgtttaaaagtgtatgcccccacagccttcccctctcgttcttgccatatgaaatgcacattccctcttcgccttccaccacgagcaaaagcttcctgtggtctcccctgaagcagatgctggcattgtgcttcctgtacagcctgcagaatcatgagccaattaaacttcttaccttataaattacccagtcttgggtatttctaatagcaatgcaagaacagtctaacacactaggtctagatataacaaattcctttagcgtttgcttgtcaggaaagactttatttcttctttgtttgtgaagcttagtatttggtgattacatagtcataaataacatggttaagcatttgtaaccttcatatctctgtgaataactgctaagagttgctttcttatgcccttaggcttggccagtttgtcatatcttgttggcattctttttttttttttttttttttggkaactacacaaatctcactatattgtttgtattatttaaatagttaatccatttaraatttctataaattaaatgtgttagttaatatctagaggcacatgtgaaataaataatttttaaaatgtgttagtaactctttatataggaaaataaatggatttttatttacatatcataacattttaacaagaaaaatgttccatttattactctaacaagaccaaaaaaccaattttctattttgttccatattttgaaagatttgttttcccttttagatgcagaccaacaacgaagagagaaactcaaaaaggaattagcacratgtgaaaaagagttcaaattaactaaaactgcaatgcgagccaattataaaaataattccaagtcacttttkaataccttacaaaaggtaagatagtatttttattttttaaaagcaaatgtttctaaggtacttctttagtggtacaatctgactttgtttactatagtttagggtcagcaaatttttcctgtaaagatccagatagttaatattttaaaaggctgttcaggcctctgtcacaactactctgccattggaaggcrgacatagacagtacataaataaatgagtatagccgtgttctgctgaaactttattaactgaagacattgggtcagatttggcctgaaggttatagtttgcagaccccagttataggttttttgtgataccttcgaacatctggttaaataagttctattcctagtttgtgaagtttttttttccctttctcctgaatggatattaattttatgaaatgcttttttgcatctcttggaatgatgatattatgatataatttttctcttttaatctgtggggttttttttttttatatatatatatatagtctcactctgttgcccaggctggagtgcagtggcatgatcttggctcactacaacctccacttcctgggttgaaacaattctcctccctcagcctccccagtagctaggatcacaggcacccaccacgactccagctaatttttgtgttttcagtagagatggggtctcgccatgttggccaggttggtctcaaactcctgacctcaagtgatctgcccacctcggcctcccaaaaagtgctaggattacargcatgagccactatgctgagcctcttttaatctgttaatgtaatgaattacaaacaattgactttaatgttaaaccaactttgcattcctgttgtaaacagaacttagtcatggtacattaccttttttattcattgctagatttacttactaatatttgtttagaattttggcatctgtccattattgatactggcctgtcattttctttttttgtactccttgtgtctggttatgctatcctcataaaataaactgggcactatttcttctttctgtactctagcttgtgtacatttggtttatttgttccttaaatttggtggaactcaacattaaaattgtctaggcctaaagtattttttatgagaagattttgactactgattcaattttttaagtcattatagaatgatttcaatgttagatttatgtaggaagttgttcattttatgtaaatttttggcagagaattgttcatactattctcttaatctcttctgaatatgtattatttccccttgttattcctaaggtagtttatttgtgccttcattcttcttcttcatcattctcatcagagattgagtcagtttttttaaaggacacactttttattgtgttagtcttctctattgtattttgttttctgttttgttaatatctgtgtttatctttatttccctctctctgggtttattttgctgtactatctctaattttatttaatttattaattctctgccttacttctttgctagtgtaagcatttttaatgctataaattttccaccaagtacagctttagctgcatcccacaagttttgataggtggtatttttattatgtttcaattcgaagtattttacaattttctttttgtttgtttgtttttgttttgttttttgagataatgtcttgctctgttgcccaggctggcatgcagtagtgtgatctcggctcactgcaacctccgcctcctgggttgaagcaattctcgtgcctcagcctcccaagtagctgggactacaggtgcctgccaccatgcccagctaatttttgtgtttttagtagagtctagtttcaccatgttggccaggttggtctctaactcctgacctcaagtgatctgcttgcctcagcctcccaaagtgctgggattacaggcgtgagccaccatgcccggcctacaattttcattatgatttttttatttaacccagaaatcatttagaactatttcttaatctctgtatctgctttttccttagtatctgtttgttacagatttctagcctaattgtactgtgattaggaaacatctatattatatccatttcttgaaatttattgagcacttgttttatgtcccagtaggtggacaattttttaaaaatgtcctgtcattatatgtttgaaaataaaatatattctatagtttttgcatgtagtatttgatatatagtatattcattaaactttgtattttccagatattcaaatcttttatatcatattgattatttttgtctggttaatctatcagttattgagagaaatcttccacatacttacatatttagctatttctccttgtggtactattaatttttgatttacatattttgaatgcatgttattacattagagatattagagatacagaatacagatttagaaaatcctgaaggaggtagtttcttggtgaactgaacctgttatcactgtgctttgaatttctttaccttaatgctttttctattaatattttctgatagtgatataattaaattagctttattttgactagtatttacttggtatatcattttccattttttgatcttaatgttttcttctttttttttttttaatgtcacttgccaatctcaatgttttaggttagtatttggtgggtcagattattcaatctgataatcattgtctttttttttttttgagacagagtctcgcttttttacccaggccagactgcagtggcgctatcttggctcactgcaagctctgcctcccgggttcacgccattctcctgcctcagcctccgagtagctgggactacaggcacccgccaccacgcctggctaattttttgtatttttagtagagacggggttccaccatgttagccaggatggtctcgatctcctgacctcgtgatctgcctgcctcggcctcccaaagtgctgkgataatcattgtctttttaatggggcatttaatatgtttttatttctggcttcttatttcataccttctatttgactcaatgtggtagacaaaatttgaagacaacacccccacagtgacccacacccttaagcaatcccctcctcttcagtgcaggtaggacctgtaacttgcttctacccagtagaatatgggaaagatgataggatgtcacttctgtgattctgttatgtggcaaaagtgaagggatattttcccctgcagattaaggtttttgttccttaaaagagaatggaaaaataagtctgggaagattttccacagtgactgctgtttctctccccaagccacaccaagagaaggtgggaaagggattctctctactcttccctataagcttcgagtaggtttcctggaggaaaagcctgcaagaggtacaaactccccaagtcctcaggtccggtacagacctgagcacatcactagtccacactcagtctttaggaaattaacaaatatttataacataatcttatcaatttatgtggcattccatggcatctttcccaagtaagcaagtgctgggatacttatctctctccatatttcaggttagttgtttgctctgtgacctcagttctctcattagttcaagaaaaatcattaatgtgcagatcgttcagcttttttcttcttgtaatggtgagagctgtgttctttccatctctatctctcagctgaaacagtaagtttgttttatttttatgtgtggtttcattttttgaacttttaaattttgaaaaccttagcatttacaaaaatatagtataataagcccacatgttcctatcacctaggttgtagcaatgatcagctcagagccagtgttatttcacctatatgcccactcactctcctaggttgttttgatgcaaaccccagacaccatataattttatccataaatatttgagtatatatctaaaagatagacttttaaaaccacaacaatactattatgccttaaaaattaataacaggctgggtgtggtggcccacacctgtaatcccagcactttgggaggccaaggtgggtggatcaccaggtcaggagatcaagaccatcctggccaacatggtgaaacctcgtctctactaaaatacaaaaaaaaattagccaggagtggtggtgcgcacttgtagtcccagctactcgggaggctgaggcaggggaatcgaacccaggaggtgggaggtctcaatgagctgagttaacgccactgcactccagcctggtgacagagcgaaactccgtctcaaaaaaaaaaataattaattaataacagttctttaataataaatatctgatgtttagatttccccactgtctcctttttgagtttgttagagttggtattagaaggccagcagtctccttcaactcagtgccagggttcaggatggggaagtttccttgcaagtcatctagttgaggagtagccattgagagaatcccagattctcaagcatgatctcttaagagctttgttttctgcccctagcacccatgatgtggtttaaaaaaaactatggactgctgggcaaaagccagattgactgctctgcttaccaaataccaaggctgtaataatgagtctggatttttttccttgagaaatgctgggagccatagaccagtttttagttgggaagttatgtcatcatactgacactacacagactacactgacaacagtggaggacagttacgagacagttgcagtaatctgggaagcagtaattaagacatgattctatgacagcagagagagcataaggaatacatttaagaaataattagaaagtagaatctcggccgggcgtggtggctcatggctgtaatcccagcactttgggaggctgaggcgggcggatcacaaggtcaggagttcgagaccagcctggccaatatggtgaaaccctgtctctgctaaaaatacaaaaattagctgggcatggtggcatgcacctgtactcctasctactcaggaggctgaggcagaasaatcgcttgagtccaggaggcggggttgcagtgagccaagattgtgccactgcactccagcctgggcgacagagcgagactccatctcaaaaaaaaaaaaaaaaagtagaatctgcaggacttggtgactgagtggatgatgtgaagagtaagaagcaggagttaaaatcctaagtttctgccttgggcaactgggagaatagtaatatatcattcacagaaatataataggatgaggtgcaggttttctttggggctggaggtaataagagataggagtttattgtttggctgtgtttgatttgagatgcttttggaacatctagtatatttagtagacacttggatataagcatctgtgtcagcaaagaggtctgggctgaaaatagacttgggagtcatcaggggaagcagtgaatatgattgagagccccagggctattatgtagataaaaagaccagcaatagagctgcttcctttagaataaatctgttatctgctctgtattatactttgctatctgggattctgttcctcaatatttgaatcacaggtgtattttcatttttagtgattgtactttttaacagaaaatttaaaatttgtttctattattcagcatgagtataaattactaattaaattttgagataagaatggggtttcttgaaaatacaaatcatatattttaatatatctttttaatgtattttatatatctatttatatataataaagtaaaaatatatattatttacatattatatatttttaatatatttctgtaaatgttagatgttttcatttttccaatagcaactataaccctatataactttttgcctccataaagttgttaatttattattttatctgtatttttattgactccatttaggattcatagtaacttgcactttgcctacatttttgataagccctgataataaatattttagatacactcagattgtcttaagagccttattttgggtagtatattttgataattgaatgggtgttatggttaacagacacctgttatggttataatttgtattcactgtaaaggctgctatagttaaaatgctggctttaacctctgaatgtattagccctttatatacattataaaggtcatatatcaaaaaccttttatgataattgcccaattctcttgccacttttcttctcccatactctgactcacatgctgtcaccctcagaaccctcctaagcccttccagtcttcaccctgtaactcttgagtcattcactacttagtcaatgctcccatactactcgtttgcttcactggtgtagcacttactgygtgcttttaagattaagtgaatatgtgggtgtgagctttatttctgaataaatctagaaaagaggcgggagcagtggctcacacctgtgatcccaacactttgagagactgaggcagacagatcacttgagcccaggagtttgagaccagcctggacaacatggcaaaaccccatctctacaaaaaaaaaaaaaaaaatacaagaaaaaaaaaaaagccaggcatgatggtgtgtatctgttgtcccagctactcaggaggctgaggcaggcagattaattgagcccaggaggtcgtggctgcagtgagccatgatcaggccactgcactccagcctgggtaacaaagtaagattaaaaaaaaaaaatctgggaaactttttaaaaacagtacaaaatagtgaaaatcaagagctatatttgttttataaaatataatttgaaacttttttgcaaacagatgttagattttaaaataatttatacccatccaattctacaattgaattgactcttcaagtgtttaaaaatccgacaattggaaaattattgtaggttatgtcttctgacatccttaaaaaagattgatttagtactgagttctgtattgtaaaattcttgacatgaaagtatgatgagtatataaactatgttatggttattactttacataaatcttgaaatcacagaaacagtgcacaacaaacctcgtaaactaagaataacctaagaaagtgagtgttcagggtaccaccagactctttgctccattggcacataattgatgaacccttttctgatttcagaactttacagtgatctgctgttcatgttttgggattctaccagtgtgttacatatattctgcacaaatatctttatccaagtttcatgatattcatagctaaaggaaacaagatgcagattggtacagtggattttatactgtagtctactggtttccaaggaaagaaaaaataggatacaaggtagaaattataagatacaaaaatgggaaaagtttcatgctttctataagttcagaagcaatttttccatcccatttcagagagatagcttaacatatacttctaccttttaaaaagactttcttcagtgtttcattttgtttattaaataaccattaccgataacatttctttacaggcaatcataatggcttatgcatttctttctccttcctctgatctcagtttgtgctgttcttctaagtgtaaataattcctgtgcttattaattaattgccctataggatatttttagactgtacttagaaatttcttctttgagagctaaactcttctggtacataagctgtagtgtgagtatcatttaggactacttataaaaactaacatcttgaagtcatttaccaaatagtaccctagtgactcaaaatttaatgccagcatacttacttgctttgagtaatgttgtcttgtatttggaataaggttataaaacagttggaaaggaaaggtgatttgacatattttagatagtagtcacaatgtccagttatctgcaatttttttgctttgataaatcagcactttaggttagctgacttatttgttcccagaaaaagagttaaaatcagtttaaaattttttatgctgtaaaaaaaatctaaaatcatataattttcaaataagtttttaagtagacaatatgataaagtggcaaagaacatgggctctgcctctgttcaaatctgtgagacactgcacctcagagcagtgtttttatctacaaaatagggtaataattgtactacctctcagaagttgatgttaggattaaatgagctatacatgaaaatgagtacagtaccttgcacatagtaagcacaccatacatattagtagcagtgatagaagttcttattattcctcttctattcaatgtcaagagcagtacctttcatacaggaagcctttttccttactcaacttgtccatcttccccttgttattcctcccaatgaggtaataagacagatataattggctaaatcctagcgatttttaacctcaatttctgtaacctccatgtaatttcccctctacctaatgaaagtgcctcagagttttgcaaaggatatacagatgtgtccgtaagggctgaagtcataggcaaagcttcttagacattttcagtttataaaacaataaaatactatctgtgtttttagactttacaaataacctgtagaaatggttttcctaaagtaaagccaaaaagaaatggagcaagtcaaaatgcctcccttttcawagtattacccccaccccaatgaaaagaagttgagaaatatatatgaaattattatggaataaatatttattaattatatttaaattatcaattacctaaatcagggctccatacattatgaggagaagttccttttcgtttctttaaaggcttaacatcacaaagggatggcttacactgcactctccaataatgacaagacaggacagtgaggatgatgtcactaatagtggttgagaagggcattggtgctcacaatttgtgtggaagctttcagataaaactgacatctcccaataaatcttaatatgcaagttgaagatcccaaatatagatatgttattcatctttttttcgtttcagaaaggaaattgattgctctattacttatatttggaattaaatgttaatatcttagtttaaatacttgactagaacttcarataaaatattaacatcttcaggaacatatcagttaattttgtaaacccttgaggctatcatttttttaatgtataatctcaaaatccccaattacatgaattcgtaatgcagttgatgactgtcatatcgaatgttcttagccctcaggcgaaccgcaaattgaggatgacatgttaaaagaagaaatgaatggattttcatcctttgcaaggtcactagtaccctcttcagagagactacacctaagtctacataaatccartaaagtcatcacaaatggtcctgagaagaactccagttcctccccgtccagygtggattatgcagcctccgggccccggaaactgagctctggagccctgtatggcagaaggcccagaagcacattcccaaattcccaccggtttcagttagtcatttcgaaagcacccagtggggatcttttggataaacattctgaactcttttctaacaaacaattgccattcactcctcgcactttaaaaacagaagcaaaatctttcctgtcacagtatcgctattatacacctgccaaaagaaaaaaggattttacagatcaacrgatagaagctgaaacccagactgaattaaggtatgacacatcagcaaccaacagtaaatccttcaggaaattaaatgaaaattaatgaattaatattccttgttttctgctgccagccttaagatctgatagtgcccttttgattggaatgagatgaatgtgacttttccttttccatgtatcactagaactatcagagtaattgctgaaaaatagctattaaactggtcaagcaccttatgcgtatgaattacatattttattatttcaagcgtggttcaagaattgtgtatgtttttaaatattatactttcagagaattcttaaaataggtcatcagacagcatttgtggaaatatgcatattgattcatgttaaaagtggcgaaacaatgggctatagaggggaagaaactaaccctttatccatctaaccctctgctccatttcctgcagatattccggccagtcttcatagcaacaactgccaagaataattttaaattgggataatttctagaaattaagtataatttgcctcaataatgttttcaaatacagtagtgcctggcacaagatgaatgttcaataaaagtttgccagatgactaaagaaaaaaacaaatcttgtcaagttttgagatttagcagatttgtgattgtgattgtttttctagtattacataaacaatttatctggcagtaggttttagttgttttagaaagtaaaaacaatttaagattagtatttttttctttgaatatagrtaagtacagtgatatcagatgagtctgcagatatttaatcaaataaaatcaaataattcaaaattatgtattttataagaatagatggrtctcattctttttgagtttattttttctagccagtaaaccttgttaccacagtgcttatattttgaaggattaacaattatttattttaaattattacagctttaaatctgagttggggacagctgagactaaaaacatgacagattcagaaatgaacataaagcaggtaataagtatgaaatcttttggtattgctacatttgaattacagatgtttttcagtaaatagaatatgtacagctatttagactgtgaagaataatctgttggtggcacttatcatacatgatatagccagtatacagaaggtctgcctatttacaaatggttatagckctctctgaatggccaggtggatcctgccaaatctgggaagtcatttgttactaacatctttcctagatgattggttggctggctggacaaatggaaggatcagtaaaataccttaagtattgttttcaaagatgcagacctggattactagaggagccagcagagtagtgcagaagttgagtttttataccttttttttttttgtaaagaattgccacatattatataattggaaattatacattttataagaataagtagctgttattctcttatgtttgcctctgctttttctagaccatgaagctgtttattacagggtttatattttgaattcttagcatcatttcttttaaaatattgcaactttgagtctgattttgagataaattgttttatttttggagtttcagtcttgcacttgtgtcctgacttaaatttgttgcttataaaaatggtttgtctattaaaatgtcaaacacagatccagagatagaagaataaaatataatcatactcaacttcccccttcccttctgaaaatgggtagaaggtggtagttttccatctcagctattaatcgctgtttgacatagggccctgccacttaaggcccaaggacaaatcacttatcctctgagagctgaatttcctcatctagaaaaactgtacttaacttgcaggattattaggaggagtaaatgatgtaggcaaagtgcctagcctggtaagggcttaataaatgatagctattactagcttgaaatttttggaaagagttagctttgcagataactacgtaaacatgaaaaaatatttatttacaatcctgcaagaaaatgtgtgtccccatattccatagatagtgccatcagtacttgacttgaagaagccagtagagtattaactgcagtagatccatattttaacagcacctttaaaactgtaaagcactatacataaattgtcattgtaaagattgaatctaatgatgtgagtaaatgcttggcacagtttgtggtgtgtagtaaggagtctataaaagtaagctgccattatttttgtttgttaatattattgttcatgctgccagcgctaccactgcttctacatatttgacatgttggcatttaaaacagatgagctatttgaatttctgaataatgagattttgttccctcaaacttacttaaaagttgaaaatttgcttcatttttccctttatatgtttatttgtggcaatttcttaatgtcatttaaatgccactcattaaaatacaagaaataagtcattttatctttaagtttaagaaaaaagtgctggatggatagaaaaattattctaaaatattctttgtcgtactgtataatttttatctactggatatctctgttcaatcacttaaaatttgctgtgttatattctgctttcgtaatgtatttttaagcaaaaataaakattttttttattgcatccccaggcatctaattgtgtgacatatgatgccaaagaaaaaatagctcctttacctttagaagggcatgactcaacatgggatgagattaaggatgatgctcttcagcattcctcaccaaggtaaacagttcacaggagaaataatttcaactgtctttaattgccttcttgtataacagacatatagtatttgccgcataagtactatttaattgcatgctccaatctattttggtgttatgtaattcaataacagttttagttttaccaaggaaattttacaaattgaagtgcttagtaaaagttgaaatgaattaattttgctaattcattagtaaaggaaaaaaccacaccaacttgtattatttattatcactgttcattaaaaaaatgattttccccaagacaagtcctctggcagtgatgctaaccagtttacatgccacaaatagtactgaagagctttaccatttgaggagtcataatttgtgattttgaatattcatcatatcctagtgcttgaccaatctgtgctatatgaagacactatttatttatttatttatttatttatttatttatttatttatgagacagtctctctctgttgtccaggctggagtgcagtggtgcggtctcagctcactgcaatggaggcactctttaaaaactactcatcatgttgagtaattaaggaatattatacattaattagcaggtagtagaaaacctaaaagatgcctcgatagtttcagttgtcaaatgtatttccagtgtcagagagtggatatgaaatgccggtggaaggggtagaagaaaggaaggagtagagattaaaaagagggcaagaataaggtgttagtagcagaccactagggaagtacacacaatcccctcaggctctggcttctccctcargcctttgctagggagatctcacctgctaaggccatggagagttcattgttaactaccctgtctttgaaatttctgatgtttcaacacatataacttattatttattaatataactgctcttgagccagtcttcattgaatattaagaatgacttaaggaaaggaatatttatcttttctaatactttctaaaagaagtaaagtagaatagtatagttgagtatacctgaataaaatttagcttcaaattaattattggtaacataactgaataataacaaaatttatcatgatgaccacctttaaaaatattttcataataatgtatctatatccagcattatctatacattaaccttagtcaaattgtcattgtttatactagagaagtgccgtagtgtagttttaaaaagaattgtgaatttatacctagaaaagtagtttaaaaacctgtctttgctgcttactaacattaaccttggaaagttacttagcctttctgacccttggtgaactaatcagtaaatgggaaaaataatacacagcccacatgcctgactgggttgtttagaagattaaattagatatgggtatgagagtgctttaaaaattgctgaaacatgtaattacaggttgagcatcccaaatttgaaaatctgtaattcaccatactccaaaatccgacatgatgcccaaaggaaatgctcattggaacatttttggatttcagatttttggattgagatgctcaactactaagtatataatggaaatattccaaaatccaaattctgaaacacttctggttccaaacatctaagataagggctattcagtgtgtactaatatacaatgttattgagtacttattgtatgccaaccactgttttgctcaactactttaacttcctctttctagggcaatgtgtcagtattccctgaagcccccttcaactcgtaaaatctactctgagtaagatcttttttaagtcttcgttttgcatagtggaatcaaggattaagaatcaaagaaaccatattaaataagtcaggattgaacaataatctctttttttaaaactggcaagtaataaatgtacatattcatggagtacctagtgatattttgatacatatactgtacagtgattagaacagtttaattagcatatccatcatctcgaacattttatcatttctttgtgttggaaacattgagtatccttcttctagctatttgaaactatgtattattgttaaccatggtagtcatcctatagtggtatagaacactagaacttactcctcctatctagctataattttgtatcttgtaacaaatctcagcttgtccctcattcccgtctacccttcccagcctccagtaccttctgttctactttctacttctatgaaatcaactgtttttagcttccacatatgagtgagaacatgcgatgtttaactttctgttgctggcttatttcaccagcatccatccatgttccatccatgttgccacaaatgacatgattttatttgtttttatggctgaatagtatttcatggtgtatatatacattttctttatccattcatctgtgaacactaatctctcttacaaccagctttgggatatcaatcgtataatacatactaaatttgagaaactgacctgaataattttctcgaatttttttgagaaataataacaactttctggaataattatcaatcacgtcatttttatctccagtagaaatttgtccccaggtattacctgatactttttaataatcagtatccatgattcttacttattttttaagtaaaaataataaaataataaagaagagttttagagaaatgcagacttttaatagttcaggatactctttccagaggtttctaacctcagcagttctttgcagatattttatttgtagattttaatgttgttttaattaagttactctttttagggaaaataatttataaaattttatttattttcaaatatgctgtttttaaataagcaagaccctgtgaatcagtttgaaagtgtaactttttattaaacatttaaatctattatttgatttgcttattaactcttcccttatatttgcttattcagtaatttagttacttgctacttacatttggtattaattcactaatttcagctaattaaaatcaaacgtacaataatatcctaattttcttgtaatagctactaaaatatagttataatagagaagtgtgttcaagtagttaaaaattaccacaagatttatgttcacaaattttcctatgagaatttttcgtctccaaacgttttgagagaaaaaataaatttttctgcttagtaaatttctcaaccttaaaacaagatgctggcctagggctaggagaggacttcttagttgwagctcctgcttctctggacaactttcctcttccttcttgcaaatgctttgcagagggacttgcacctctgctgctggacctggtcaggagcaagaggaaatttaaaacattcctcgggagtgcttgctcccagtggattgcatttgattgcgccttgtccttcgttgctttctttttgtgttgtttaattctgcttgttttttactgctatggatgttgcagatatctgtgaaattttactctattaggtcatcacctttagtaaatatttatccttgcataatttgagaaggtagacatgtttgttttgtaatattccccttagtaatatgagatagaagtacattggtaatggtagagatagatatttctaattaggtactaatgtttcttacagttttcagaataagtaagnaataatttttatgctatatattgccttccttttacagtgaagaagaactgttgtatctgagtttcattgaagatgtaacagatgaaattttgaaacttggtttattttcaaacaggttagtttttttaatggtgttatgttaattcaggagtacattaaatattcttcatatttcttcatatgatgttaaaattttaaagttattttcccatattaggaaatgaaaaaatatattgctttcttggaaacttattattataattgatagcaagttgtaaagaatgtttaattcatactctaggggaagttcaccacttgggagaattaaagaatagagcttttattcattttaatattatatcccttgagttataagtgactagtgaaggaagatctttatcacttatttgcaaagctccataatcccattttactacctaaaattgtcatgagaatcaaaagcaagcatttttggtgcaaccattattagtattagatctagtaaaatgagaacaaattaagagctaggtttgcacgctgtaagttaaatggaaagtttgcaaaaccagattagctattgcatagcttaaggaaactgtgtgtcctgaattttgcttgaacatttatgtatctaagattcattgagcaytgagctctactttgtgttatgtaacctaggaccctattatgtatactacttgctttctctgtcataataatatgccaagcatagacatttttaataaattatttctatcctctacatcaagttttttaaaaaattaaagcaaacattttcattattggtataaaaaggcatatcaaaaagacctaagatttttggcattaattctgttgacccctttcattttaaaaagttggttaataatatttgcataatatgggtaaagagtttcaggatacataatgaaaagttttggcaatctgtatcacaatatgaatatacctaacactgctgaatcgtgcacttaaaaatggttaagatgataagtttggttagtttttgccaccacaagaaaaaaagtacacatacaaaatcatatgtatttatgcttaaaattttatgtttttctcaagattataagactgtttattacagcatttttataattgtaccaaaaaccagaatcaacctaaatgtttaatggtaaatgtttggttgaataaactgtggaatatatatgaaatgtgaggtctgtttagggattaaaaatgatgttgaagtgaatttacagatatagaaagatgttaaagatatatgtcattgattagaaaaaacaaaatagggctgggcgcagtggctcacaccagtaatcccagcactttgggaggctaaggtgggcggatcacaaggtcaggagttcaacaccagcctggccaatatggtgaaacctcatctctactaaaaatacaaaaattagctgggcgtggtggtgcrcgcctgtagtcccagctactcaggagggtgaggcaggagaatcgcttgaaccccgcaaggcggaggttgcagtgagctgagatcgtgccaccacactccatcttgggcgacagagtgagactctgtctcagaaaaaaaaaaaaaaagaaaaagaaaaaagaaaaaacaagatagatacccaaatagtatgtattgtttaattacaagttggtaaagaaatacaaatgaatagaaaaaatgcctagtagtgaatattctaaaatgttaacaatagttgtaaaaagtagaatacagatttcttgggttttaawaaaaaattgtgaaataattcagaactactaactctgaggttggttcataacttcactgatgctagcaaatgataacaaaggaaattagttgttttttaagaaactgttgatacattcctgtgatagagaggtgagcatggtgttctagaatgaagaaattctgtggagccagacacatctgggttaaattctcctaaaggcttttgacctcaggggagaggaaattatcatcttagagatgtggctttctcgtctttaaaatggtttttacactatctttccctccctacattggtcagaactagaggtaaaatgattattatgactagcacagtagcacttaatggaaattaataggtgataacttttaaattattatgtggatttaccatcagtgggagtttttaaattttttaattattttttaaaattttgtgaggtacacagtaggtatgtatatttaaggggtacatgagatgttttgatacaggcaagcattgtgaaataagaacgtcacggagagtggggtatccatcctctcaagcatttatcctttgagttacaaacgatcagattacattctctaagttattttaaatgtacaattaagttactattgactgtagtcaccctgttgtgctgtcaaatggtcttattcattctttctatgtttttgtacccattaactaccccacttaacctgcagccctctactacccttcccagcctctgttaaccatccttctactctctatgcccatgagttcaattgttttgatttttagatcccacaaatacgtgggagaatgcaatgtttgtctttctgtgccaggctcatttcacttaatataatgatctccagttccgtccatattgttgcagatgacaggatctcacttttttaatggctgaatagtactccatggtgtatatgtactacgtttttttatccattcatttgttaatggacacttagttgcttccaaatcttagctgtcataaacagtgctacgacaaacataagagtgcaggtatctcttcgatatcctgacttacttccttttgggattgctggaacatatggtagctcaatttctagttttttgagggacctccaaactgttctccatagtggttgaactaatagtttacattcttaccaacagtgtgcaaggattcccttttctccacatcctcaccagcatttattattgcttgtttttgcatataagccattttaactggagtgagatgatacctcattgtagttttgatttgcattcctctgatgatcagtgatgtgtggaataccttttcatattcctgtctacaattcgtatgtcttttgagaattgtctattcaaatcttttgcccattttttgattgggttattagatttttccctataaatctaatagtaaatagttgtttgagctccttatatattctggttattaattccttgtcagaggggtagtttgcaaatattttctcccattctgtggattgtctcttcactttgttggttatatcctttgctgtgtggaagctttttaatttgtgatcccatttgtccatgtttgctttggttgcctgtgcttgtgggatattactcaagaagtctttgccagaccagtgtcctagagattttccctcaatgttttcatttagtagttccatagtttcagaacttatatttaagcctttcatctattttgatttgatttttgtatgtggtgagagataggggtctagtttcattcttttgcatatgggtatccagttttcccattaccatttattgaagagactgccttttccccagtgtatgtatgttcttggcaactttgtcaaaaatgagttcactataggtgtgtggatttgtttctgagttctctattctgttccattggtctgtgtctgtttttatgcctgaccatgctgttttggttactgtagctctgtactgtaatttgaagtcaggtaacatgattccaccagttttgttctttttacttaggatagctttggctattctgggtcttttgtagtttcatgtacattttaggatttttttttctatttctgtgaataatgtcactggtattttgatagggattgcattgactctgtagattgctttgggtggtgtggacattttaacaatattgattcttccaatccatgaatttggaatatttttccttttttttttttggtgtccttttccattttgttcattggtgttttatactttaatataggaatttttaaaagtataatttaggaaggattataaaatatctctgtaagaggtttttctttagggtttggttgtgtgtgtgtgtgtgtgtgtaaatatcggggtagagaggctttgggtgtttgcatatgtctgtgagagaaaaacagctttttggtggtggggtgagaaaaaggagaattttattcaaagaaataaaagtagcatacagtctttcagaaatatgtaatgtgaagcaaatgcataatggaagaacttagaacaggaaaggattagtcttcagctttacagagaaaaagaaaaatctgaaaaacatttttcaacctttgtagtttcagtgttacgtrgctagtttatatttagatgattttctgattttgagacattaacatttttgtttatcatttgtaggtttttagaacgactgttcgagcgacatataaaacaaaataaacatttggaggaggtttgtctttccttataacttcattagaaaaattataatgtaaaaataattktatggtttttttcataccttcaaacaatacattaaaagcaagkgctttttttttcccttgaacttttttgagggtggtggtgggagaagtgaaaggaaaagtattaatcctgtgagattttcagcactgcagtcaaaatttaatttgactcaattaatgtaattagtctcatcttttcttaatcctaggaaaaaatgcgccacctgctgcatgtcctgaaagtagacttaggctgcacatcgraggaaaactcggtaaagcaaaatgatgttgatatgttgaatgtatttgattttgaaaaggctgggaattcagaaccaaatgaattaaaaaatgaaagtgaagtaacaattcagcaggaacgtcaacaataccaaaaggctttggatatgttattgtcggcaccaaaggatgagaacgagatattcccttcaccaactgaatttttcatgcctatttataaatcaaagcattcagaaggggttataattcaacaggtgaatgatgaaacaaatcttgaaacttcaactttggatgaaaatcatccaagtatttcagacagtttaacagatcrggaaacttctgtgaatgtcattgaaggtgatagtgaccctgaaaaggttgagatttcaaatggattatgtggtcttaacacatcaccctcccaatctgttcagttctccagtgtcaaaggcgacaataatcatgacatggagttatcaactcttaaaatcatggaaatgagcattgaggactgccctttggatgtttaatcttcattaataaatacctcaaatggccagtaactcaatattacttttcttccttttttaaaatgtatgtataagatttctctattggttttctgtgctgcaataataagttaccagaaacctagcggcctaatgtgccacacatttattatttatcccacagttttgtggatcaggagtgtaggcacagcttagttgggtcctctgtcctgggtctcacaaggctaccccacaatcaaggcagtggctggggccatgttttcattaagaggcttgttggcagaattatcctccttgcagttatagatttgagggcttcgttgtcttgctgaccagtggctagaggctgcctatagttctctgccacttggccctttccttagggaaattataacgtggctgcttgcttttttaaggatatcaggaaaaccagagagattctgctaacaagatggagtcttatataatgtaacataatcacaggagtgactttctatcacctttaccgtgttcttttgggtagaagcaagtcacaggtcttgcccacacttaagggttgggaatatatacaagggtgtgaatgccagaacacaggaatcactggggtcatctgaggacctgctggccacaatttctaaaatcacttttcagaggaaaacatattttacctatattttcagaggaacatattttacccagacataagcggttttgtaggctatgggaaatggtttatgatctggtgtgagtcttgaagcgttggaccttgtctgcaatatctttaattttgtttttctcacttttcctgcaatatctaaagcctcaaggacctttcagttgtcagtgacccagggaattctgtcagctggctgagatgttgtctcttgtkgtgagtgcaaacatttagtcagacctgtctgaagccctctcctacccttgtagctcatgaatgagacccttactattagaacatggcccagcagattcatctctaattatacctttttaactatttacaataatataattgaatatttgtgtgcccrttatgtacaaagtttcatgcctagatactgtggaggataaaaacaataacccattttgtttttataagctatattttaattttatatttaaaaaaatacaacccaggtattcttctaaaaacttaacagtgacttccaagtatcctgttctttaactcgggtttttatcatcctttggccatagcagtgtttcccaaagggtggtacttaccactggagacctgagagttgattttagtggtatgtggatgacaggtccatctcattcatgggatgctgaccatcaccactgtcttcaggataagacacaggtacaacctgcaaagcacaatatggtgggactgagcacccaacccacttttcacctccactgtcggaatccccaactcaccctgctacaacccttttttggcacaccttcccctcagccctcacctctggacttcttccctttaaccctgtaagcaacaccgtctatcccctcttgcagtcctcttaaacctcctgaaataaccttggctctattcttggtccccagcctgggtctccccatctgttagatctttacccctctagttgcttcttgggttctgttgttcctcagccccagggttcctttcttcagtcccagcctcactctttcacaaaccccctcttcccattccccatgtaactaccccagacctactggcctggcccaaattttccttccttggctggagctaccatctgtctttccggaggcattctcagaaactatctcctggctgctgttctccaacactttggtccaagccccagacctgccctatttgacattcagtcttcatgctctaactctgggtacagcttcttgtctctggggccatgacccatcctaatttggatacctattaggacaatttgttgttatcctttagtttccctttaagttttaaaaggtgagttgatttaaagaaatattaaaaatggttcttgaatgtggcaaaagtattatagtatgaaggtaggatgtgggtggtaagtttgggaaacagcacttaaactcttctagcagcatctttttttatccctaagacatcttgttacagcatcaagcaacatctttatatcttcccctcttccttctcacacagcccatcaactgaggctgagaggcatgatgaatgcgagtgtgtcttctgagccaggttgcctggatttgattccttttgagctgtgactttgagctgggttactgagcctgtgtgtgttttctcatatcttggagaggggtaattatagagcctttatcatagaatacaagaattaaatgagcttgcatgataaatacaggctgctgctacttttttttttgctatttattttttatttcagtaggattttgggaacaggtgatgtttggttacatgaataagttcttcattggtgacttctgagattttggtgcacccagcacctaagcagtgtacattgtacccaatgtgtagtcttttatccctcactccccgcctaccctttcccctcagcccccaaagtccattgtattattcttatgcctttgcatcctcatagcttagctcccacttatgagtgagaacatacaatgtttggttttccattcctgagttacttcacttagaataatggtctccaatwccatctaggttgctgcaaatgccattatttcattcctttttatggctgagtagtattcaattgtgtgtgtgtgtgtgtatatatatacacacatcacattttcattatccacttgttgatcgatgggcatatgggctggttccatatttttgcaattgtgaattgtactcctataaacatgcgtgtgcaagttatcttttttgtataatgacttcttttcctctgggtagatacccaggagtgggattgctggatcaaatggtagatctacctttagttctttaaggaatctccacactgttttccatagtggttgcactagtatacattcccactaacagtgtaaaagtgttccctgttcaccacatccacaccaatatctactatttttttattttttgattatggccattcttggaacagtaaggtggtatcgcgttgtggttttgatttgcagttccttgataattagtgatgttgaacattttttcatatgtttattggctatttgtatatcttcttttgagaattgtctattcatgtccttagcccattgttgatgggattgtttttgtttcttgctgatttgtttgagttacttgtagattctggatattagtcctttgtcagatgtatagattgcaaagattttcttcactctgtgggttgtctgtttactgattatttcttttgctatgcagaatcattttagtttacctaagtatcatctgtttatctctgtttttgatgcatttgcgtttgggttcttggtcatgaacactttgcctaagccagtgtctagaaaggcttttctgatgttatattctagaatttttatagtttcaggtcttagatttaagtctttgatccatcttgagttgatttttccataaggtgagagatgaggatcgagtttcattcttctacacgtggcttaccaattgtcccagcaccatttgttgaatagctttgttgacagtcagctgactgcaaatatgtggctacatttctgggttgtttattccattcctttggtctatatgcctgtttgtttgtttgtttgtttgtttgtttgtttgtttttgaggcagagtctcactctgtcacccaggctggagtgcagtggtgtgatctgggctcactgcaacttctgcctcctgggttcaagcgattctccgacctcagcctcccaagtagctgagattacaggcacctgccaccatgcccagctaatttttgtagttttagtttgtagtttgtaattttagtagagacggggtttcaccatgtgggccatgttggccaggctgtctcaaactccagcatagaaggtatgttccttctatgctgattttgctgagggttttaatcataaagggatgctggattttgtcaaatgctttatctggtctattcagatgatcatgtgatttttgtttttaattctgtttatgtggtatatcacatttattgattttcagatgttaaaccatccctgcagccctggtatgaaacccacttgatcgtgatggattatctttttgatatgctgttggattcggttagctaggatttcgttgaggatttttgcatctgtgttcatcagggatgttggtccatagttttgtttttttgatatgtcctttcctggttttggtattagggtgatcatggcttcatagaatgatttagggaggattccctctttatcttttggaatagtgtccataggattggtaccaattcttctttgaatgtctgatagaattcagctgtgaattcatctggtcctggaatttttgkttttttgttagtaattttttttttttttttttgagatagagtctcgctctgtcacctaggctggagtgcagtggtgcgatctcagctcactgctgcaacctctgcctcttggtttcaagcaactctcctgcctcagcctcccaagtagctggaattacaggtgcctgccactgcgcccagctaatttttgtatttttagtagagacatggtttcaccatgttggccagactggtcttgaactcctgacctcgtggtccacccgccttggcctcccaaagtgttgggattacaggcgtgagccactgtgcccagcctatttttgttggtaatttttaaattaccatttcaatctcactgctcgttattggtctgtttagagttttctgtttcttcctgtttaatctaggagggttgtatatttccaggaatgtatccatctcctctaggttttctagtttatgcatgtaaagctgttcatagtagccttgaatcatcttttttgtttctgtggtatcggttgtaatatgtcctgcttatttcttgtatttatttatttatttattattattatactttaagttttagggtacatgtgcacaatgtgcaggttagttacatatgtatacatgtgccatgctggtgcgctgcacccactaactggtcatctagcattaggtatatctcccaatgccatccctcccccgaccccacgaccccacaacagttcccagagtgtgatgttccctttcctgtgtccatgtgttctcattgttcaattcccacctatgagtgagaacatgtggtgtttggttttctgtccttgagatagtttgctcagaatgatggtttccagcttcatccatgttcccacaaaggacataaactcatccttttttatggctgcatagtattgcatggtgtgtatgtgccacattttcttaatccagtctatcattgatggacatttgggttggttccaagtctttgctattgtgaataatgccgcaataaacatacgtgtgcatgtgtctttatagcagcatgatttatagtcctttgggtatatacccagtaatgggatggctgggtcaaatggtatttctagttctagatccctgaggaatcgccacactgactttcacaatggttgaactagtttacagtcccaccaacagtgtaaaagtgttcctatttctccacatcctctccagcacctgttgtttcctgactttttaatgatcgccattctaactggtgtgagatggtatctcattgtggttttgatttgcatatctctgatggccagtgatggtgagcagtttttcatgtgttttttggctgcataaatgtcttcttttgagaagtgtctgttcatgtcctttgcccactttttaatggggttgtttgtttttttcttgtaaatttgtttgagttcgttgtagattctggatattagccctttgtcagatgagtaggttgtgaaaattttctcccattttttaggttgcctgttcactctgatggtagtttcttttgctgtgcagaagctctttagtttaattagatcccatttgtcaattttggcttttgttgccattgcttttggtgttttagacatgaagtccttgcccatgcctatgtcctgaatggtaatgcctaggttttcttctagggtttttatggttttaggtctaacgtttaagtctttaatccatcctgaactgattttcgtataaggtgtaaggaagggatccagtttcagctttctacatatggctagccagttttcccagcaccatttattaaatagggaatcctttccccattgcttgttttcctcaggtttgtcaaagatcagatagttgtagatatgcggcgttatttctgaggcctctgttctgttccattgatctatatctctgttttggtaccagtaccatgctgtttttgttactgtagccttgtagtatagtatgaagtcaggtagtgtgatgcctccagctttgttcttttggcttaggattgacttggcgatgcaggctcttttttggttccatatgaactttaaagtagttttttccagttctgtgaagaaagtcattggtagcttgatggggatggcattgaatctgtaaattaccttgggcagtatggccattttcacaatattgattcttcctacccatgagcatggaatgttcttccacttgtttgtatcctcttttatttccttgagcagtggtttgtagttctccttgaagaggtccttcacatcccttgtaagttggattcctaggtattttattctctttgaagcaattgtgaatgggagttcactcatgatttggctctctgtttgtctgttgttggtgtataagaatgcttgtgatttttgtacattgattttgtatccagagactttgctgaagttgcttatcagcttaaggagattttgggctgagacaatggggttttctagatatacaatcatgtcatctgcaaacagggacagtttgacttcctcttttcctaactgaataccctttatttccttctcctgcccaattgccctggccagaacttccaacactgtgttgaataggagtggtgagagagggcatccctgtcttgtgccagttttcaaagggaatgcttccagtttttgcccattcagtatgatattggctgtgggtttgtcatagatagctcttattattttgaaatacgtcccatcaatacctaatttattgagagtttttagtatgaaaggttgttgaattttgtcaaaggccttttctgcatctattgagataatcatgtgttttttgtctttggttctgtttatatgctggattacctttattgatttgcgtatattgaaccagccttgcatcccagggatgaagcccacttgatcatggtggataagctttttgatgtgctgctggattcggtttgccagtattttattgaggatttttgtatcaatgttcatcaaggatattggtctaaaattctcttttttggttgtatctctgtccggctttggtatcaggatgatgctggcctcataaaatgagttagggaggattccctctttttctatggattggaatagtttcagaaggaatggtaccagttcctccttgtacctctggtagaattcggctgtgaatccatctggtcctggactctttggttggtaagctattgattattgccacaatttcagatcctgttattggtctattcagagattcaacttttcctggtttagtcttgggagggtgtatgtgtccaggaatttatccatttcttctagattttctagtttatttgcatagaggtgtttgtagtattctctgatggtagtttgtatttctgtgggatcggtggtgatatcccctttatcattttttattgcatctatttgattcttctctctttttttgtttattagtcttgctagcagtctatcaattttgttgatcctttcaaaaaaccagctcctggattaattaattttttgaagggttttttgtgtctctatttccttcagttctgctctgattttagttatttcttgccttctgctagcttttgaatgtgtttgctcttgcttttctagttcttttaattgtgatgttagggtgtcagttttggatctttcctgctttctcttgtgggcatttagtgctataaatttccctctacacactgctttggatgcgtcccagagattctggtatgtggtgtctttgttctcgttggtttcaaagaacatctttatttctgccttcgttttgttatgtacccagtagtcattcaggagcaggttgttcagtttccatgtagttgagcggttttgagtgagattcttaatcctgagttctagtttgattgcactgtggtctgagagatagtttgttataatttctgttcttttacatttgttgaggagagctttacttccaagtatgtggtcaattttggaataggtgtggtgtggtgctgaaaaaaatgtacattctgttgatttggggtgaagagttctgtagatgtctattatgtctgcttggtgcagagctgagttcaattcctgggtatccttgttgactttctgtctcgttgatctgtctaatgttgacagtggggtgttaaagtctcccattattaatgtgtgggagtctaagtctctttgtaggtcactcaggacttgctttatgaatctgggtgctcctgtattgggtgcatatatatttaggatagttagctcttcttgttgaattgatccctttaccgttatgtaatggccttctttgtctcttttgatcattgttagtttaaagtctgttttattagagactaggattgccacccctgccttttttgttttccatttgcttggtaggtcttcctccatccttttattttgagcctatgtgtgtctctgcacatgagatgggtttcctgaatacagcacactgatgggtcttgactctttatccaatttgccagtctgtgtcttttaattggagcatttagtccatttacaattaaagttaatattgttatgtgtgaatttgatcctgtcattatgatgttagctggttattttgctcgttagttgatgcagtttcttcctagtcttgatggtctttacattttggcatgattttgcagcggctggtaccggttgttcctttccatgtttagcgcttccttcaggagctcttttagggcaggcctggtggtgacaaaatctctcagcatttgcttgtctgtaaaggattttatttctccttcacttctgaagcttagtttggctggatatgaaattctgggttgaaaattcttttctttaagaatgtcgaatattggcccccactctcttctggcttgtagagtttctgccgagagatccgctgttagtctgatgggtttccctttgagggtaacccgacctttctctctggctgcccttaacattttttccttcatttcaactttggtgaatctgacaattatgtgtcttggagttgctcttctcgaggagtatctttgtggcgttctctgtatttcctgaatctgaacgttggcctgctttgctagattggggaagttctcctggataatatcttgcagagtgttttccaacttggttccattctccccgtcactttcaggtacaccaatcagacgtagatttggtcttttcacatagtcccatatttcttggaggctttgctcgtttctttttattcttttttctctaaacttcccttcccgcttcatttcattcatttcatcttccatcgctgataccctttcttccagttgatcgcattggctcctgaggcttctgcattcttcacatagttctcgagccttggttttcagctccatcagctcctttaagtacttctctgtattggttattctagttatacattcttctaaacttttttcaaagttttcaacttctttgcctttggtttgaatgtcctcccgtagctcggagtaatttgatcgtctgaagccttcttctctcagctcgtcaaagtcattctccgtccagctttgttccgttgctggtgaggaactgcgttcctttggaggaggagaggcgctctgctttttagagtttccagtttttctgctctgttttttccccatctttgtggttttatctacttttggtctttgatgatggtgatgtacagatgtgtttttggtgtggatgtcttttctgtttgttagttttccttctaacagtcaggaccctcagctgcaggtctgttggagtacccagccgtgtgaggtgtcagtctgcccctgcttgggggtgcctcccagttaggctgctcgggggtcaggggtcagggacctacttgaggaggcagtctgcccgttctcagatctccagctgcgtgctgggagaaccactgctctcttcaaagctgtcagactgggacatttttttgtcctgcttatttctaattgagtttctttggatcttctctccttttcttcgttaatctcactaatggtctatcaatttcatttctcttttcaaagaaccagctctttgtttatcttttatattgtgttttttttgtttgtttcaatttcatttaattctgccctgatcttagttatttctttacttctgctgggtttgggtttggttgattcttgtttctctaactccttgaggtgtgaccttagattgtctatttgtactctttcagacttcatgatgtaggcatttaatactatgaactttcctcttagctctgtctttgctgtattccagaggttcagatattttgatagtttgtgtcactactatcattcakttcaaagaattttttaatttccatcttgatttcattgttgacccagtgatcattcaggagcaggttattgtacttccatttatttggcatggttttgagggttccttttgcagttggtttctaattttattctactgtggtctgtgagagtacttgataagatttttattttttaaaatgtgttgagacttgttttgtggcctatcatatatggtctatcttggagaatgtttcatgtgctgattaatgaatatatactctgcagtttttggctagaatgttctgtgaatatctgtttagtttatttgttctagggtacagtttaagtccatagtttctttgttgactttctgtcttgatgacctgtctactgctgtcagtggagtattgaagtcccccactattactgtattaacatctatctcatttttttggtctagtagtaattgttttgtaaatttgggagctccagtgttaggtgcatagatacatttaggattgtgatattttcctgctggactagtccttttatcatcatataatacccctctttgtcatttttaactgctgttgctttgaagtttgtgtgatacaagaatagctactcctgcttgcttttgttgtccatttgcatggaaagatattccattggtaacaaatatcccactggtattttgttggtaactttttaattaccatttcaatcttgctgcttgttattggcctgttcagagtttctgtttcttcctgggttaatgtaggagggttgtatatttccaggaatttatccatctcctctaggttttctagttattccattcaagatattccatccaaatggacatcaaaagcaagcaggagtagctattccacccctttacctaagtttatgtgagtctttatgtgtcaggtgggtctcttgaagatagaatatacttggttgatgaattcttatccattctgccatttcatatcttttaggtggagcatttaggccatttacattaaacattagtattgagatgtgaggtactattctattcatcgtactatttgttgcctgaataccttaggtttttttttcattgtgttaaaatgaaaaattataggtcctgtgagatttatgctttaaggatattctattttgatgattttgaggatttaagatttagagctccttttagcagttcttttagtgctggcttggtagtggcaaattcagcatttgtttgtctgaagaagactgtatctttccttcatttatgaagcttaattttgttggatacaaaattcttggctgataattgctttgtttaaggaagctaaagataggaccccaatcccttttagcttgtagggtttcggctgagaaatctgctattaatctgataggttatcttttataggttacctgatgcttttgccgcatagctcttaagagtctttcctttttcttgactttagataacctgatgactatgtgcctaggcaatgatctttttgtgatgaatttcccaggtgttctttgaacttcttgtatgtggatgtctagatctctagcagagctgaggaagttttcttcaattattccctcaaatatgttttccaaacttttagatttatcttcttcctcaggaacaccaattattcttaggtttggtcatttaacataatcccaaacttcttggaggctttgatcattttaaaaaattctttcttctttgtctttgtcagattgggctaatttgaaagccttgtctttgagctgggaagtttctttcttccatttgttcaattctattgctgagaccttccaatgcattttgcattttgcatttctctaagtgtgttcttcatttctagaagttgtgctttttgttttgtttttgtttcgttttgagatggagattcactcttgtcgcccaggctggactggaatggcgcaatcttggctacctgcaacctctgcctcctgggttcaagcgaatctcctatctcagcctcccgagtagctgggattacaggcgtctgccaccacagctggttaatttttctatttttagtagagacagggttcaccacgttgggcaggctggttttgaactcctgacctcaggtgatccacctgcctgagcctcccaaactgctgggattgcaggcgtgagccactgctcccggccgtgattgttttttacttatgctatttcactggagatttttccattcatatcctatatcttttttttttttttctttgaaaaggagtcttgctctgtcacccaggctggagtgcagtgccacaatctcggctcactgcaacctctgcctccctaggttcaagcaattctgcttcagcctccccagtagctgggattataggcgcccaccaccatgcctagctaatttttgtatttttagtagagacagggttttgccacgttggccaggctggtctcgaactcctgacctcaagtgatccacctgcttcggcctcccaaagtgttggggttataggtgtgagccgctacacctggccctatatcattttttttatttctttaagttagactttacctttctctggtgcctccttgattgacttaatagttgaccttctgaattcttttttcctgcagtttagagattttgtcttggtttggatccactgttggtgagctagtgtgatcttttggggtgttaaagaaccttgttttgtcatattaccagaattgcttttctggttccttctcatttgggtagagaatgtgagggaagatctgggactcaagggctgctgttcagattcttttgtcccacaggatgctcctttgatgtggtgctctccccttttccctagggatggcatgtcttgagagccaaactgcagtgattgttatttctcttctggatctagtcacccagcagggctaccaagctctgggctggtactggggagtgtctgcaaagagtcctgagatgtgattcatcttcaggtctttcagccatggataccagcacctgctcaagtggaggtagcaggagagtgaagtggaccctgtgagggtccttggttgtatttttgttaagtgtactactggttttgtgttcgttggcctccagccaggaggtggcgctttcaagagtgcatcagctgtggtattatagggaaaatcacactgtgggcggggccatagagctcccaagagattatgtccttttttttggagttcttctgctgtcccgcagagcctacagcagcaatccatctccttctgtctgctcaattctcttggctttcctggtatattcctgcagtagttcttggagcaaaagttcacaatgtgggtttccacacgctgctctgtccatctgagtgggaactgcaaattagtcctgcctcctatctaccatcttccctccagtataccccctgctgctastatttttaaacaaaccatgccactctcttctttaaaacacctgtgagagtttgcacttgctaacacaataaagtccaggacctttggcattttctatgttatattttccttcccagttcatgtcctgccatcctctccgaagcaccctgtgtcaatcacacctactcgcttgttcttcacacatagaggtcctctctctctccatgtatctgctcagggtatcatttcctctctttggcaccctggagtcttcatttaaatcccagactgaatataacacctcctgtgaaaccttgagggattgccctaacatttgtccctcctaccccaactctgtgatctgaaatctgtcttactacatgagttttataatactgtttacccaatttgtctctagactgtaagattctcaagaggaaggacctgtttctctttggatacccagcttgacaatgaatgcatttgttcacggaggaagatagtttgagcttaatgggaggtttagcttcagataaggttatagggaaaacaggatatttcctcttctctttatactcagaaagttcaggttccccgtgtagaaagaagaatgtagcagattgctaagctacatgaaaatgtgtttgctcacattttaaatggtgtaaaatataaattaacatcatcattagaaggctggccttaaaaagtcacatggtctctaggaagtcaataagtaaagaacagagcagcttttgtgggcaagactatactttgccaagtgaactaatagctgtatggtcaccagtgaattactttatcccagaccttgtgtgtttttgatttctcagacctcacggggatgaagggccttggttttaaagagctcggactaaatgatccaaagatttctttttgttactaaaattagttctactttaattcttaaggtctgtagaaattaaaatggaaataatttatatttgaagtagaaatacctattcactcttcatgtgctggtgtagtattggaaatcagtctgctaaaccgattcatacttcagtgatagaagatgccaccctgagttactttccccagtagccagatggaaccagtaaggaatatcatatcctaaaagaacaaatccatgtttaaagactgggaggaagatctttttgggttggagtaaggaaagttttgcaccaaggctaagcttgttgccttgtgcattctgctttgtgctcatattcgagttttgaggcaaaaacacacacctagcagtttgggacatgaggcctccatatcacctagtttttccaacccaacaaaccctcaagtttctcccgagagaaagaatataccattgtataagtttcctattgctgctgtaacaagttaccacaaacattaaaaaacatatcttacagttctggaactcaagtcctaaaatcaagctattgctggagccacattcctcttggaggctgtaggggagaatctgtttccttgcatttaccagcttgcagaggctgcctgcgttccgtcacttgtggcatcttcctccattttctagccaattgtggaggatctttaaatctctttactaaagaccctggtgattactttgtgtccacctggataatccaggataatcccccaactcaaaaatgcttcatttagtcacatctgcacagtcccttttgccatgtaaaatttataacttcaggggattaggatatggacatatctggggagctgctattcagcctaccatgactataaatatcattaacctaattaaaatggcctaaattagctggctgtggtggctcacctataatcccaggactttgggaggccaagatgggaggatcgcttgagctcaagagttcaagaccgaccagcctggtcaacagagtgagaccccatctacacacacacacacaaaaattagctgggtgtggtggcccacagctgtagtcctagctaattgggaggctaaggcaagagaatcacctgagttcaggagatggaagctgcagtgagttgtgatcaggccacttcactccaccctgggtgacagagcaagaccctatctcaaaaagaaaaaaaaagaaagcctagatagactttagtttgtattaattatagcttggctatacaatgagtcccaaattaggacatatattaaacgtccattgatttttaattactaaagcagtggttctcaaactttaatgtgtatcaaaatcacctggaaaactaaagtgatttctgggccccatccccatagcttctgactcaaaatatttagatctgggtcaaggctcaagaatttgcatttctaacagattccagatgctgctactactggtccgaaaacaaccccactggaagatgaataaagtggacacaacaaatagcatatgttctactatagaggtggccacatgaagagctctgcaagcccactgtgaaattgatagcaaatctttattcaagtgtattaattgacccacaaatatcctgattaatgaagctggctagtttggcaagatgcattctaactcttaaagtgattgattactgtggagatgtgtgatgacagattggcacctactaaggaaacctctcttgcctggtacattattaaaaataatccartggggaaataggactaatttaattacatgcctttatgcagtaagatccacagttgaaaaatagaggcagtagctttaattgcactgtaatgttcacacacaaatcatatcttgcttgaaacagttttatggcaaaaatagaccatatattgatttcacatatataacatttaacccttcaagcctttttgcccattaaatatacacacctttacaaaccaataacagtttagaagaattaagctcttctgattataaacttttacattattgatcagacagtagcacataaaattgcttttttttttagtattttacatgaataattttatttgtgcttcatgaaaactccatttatcccattttttattatactttaagttttagggtacatgtgcacaatgtgcaggtttgttacatatgtatacacgtgccgtgttggtgtgctgcacccattaactcatcatttacattaggtatatctcctaatgctatccctccccctccccccaccccacaacaggccctggtgtgtgatgttccccttcctgtgtccatgtgttctcattgttcagttcccacctatgagtgagaacatgcagtgtttggttttttgtccttgcgatagtttgctgagaatgatggtttccagcttcatccatgtccctacaaaggacatgaactcatcattttttatggctgcatagtattccatggtgtatatgtgccacatttccttaatctagtctatcattgatggacatttgggttggttccaagtctttgctattatgaatagtgctgcaataaacatgtgtgcatgtgtctttatagcagcatgttttataatcctttgggtatatacccagtaatggggtggctgggtcaaatgatatttctagttctagatccctgaggaatcgccacactgacttccacaatggttgaactagtttacagtcccaccaacagtgtaaaagtgttcctatttctccacatcctctccagcacctgttgtttcctgactttttaatgactgccattctaactggtgtgagatggtatctcattgtggttttgatttgcatttctctgatggccagtgatgatgagcattttttcatgtgtcttttggctgcataaatgtcttcttttgagaagtgtctgttcatatccttcgcccacttgttgatggggttgtttgttttyttcttgtaaatttgttagagttctttgtagattctggatattagccctttgtcagatgagtagattgcaaaaattttctcccattctgtaggttgtctgttcactctgatggtagtttcttttgctgtgcagaagctctttagtttaattagatcccatttgtcaattttggcttttgttgccattgcttttggtgttttagacatgaagtccttgcccatacctatgtcctgaaaggtattgcctaggttttcttctagggtttttacggttttaggtctaacatttaagtctttagtccatcttgaattaatttttatataaggtgtaaggaagggatccagtttcagctttctacatatggctagcaaggtttcccagcaccatttattaaatagggaatgctttccccatttgttgtttttgtcaggtttgtcaaagatcagatggttgtagatgtgtggtattatttctgagggctctgttctgttccattggtctatatctctgttttggtaccagtaccatgctgttttggttactatagccttgtagtataatttgaagtcaggtaacatgatgcctccagctttgttcttttggcttaggattgtcttggcaatgcgggcccttttttggttccatatgaactttaaagtagttttttccagttctgtgaagaaagtcattggtagcttgatgagggtggcattgaatctataaattaccttgggcactatggccattttcatgatattgattcttcctatccatgggcatggaatgttcttgcatttgtttgtgtcttcttttatttcattgagcagtggtttgtagttctccttgaagaggttcttcacatcccttgtaagttggattcctaggtattttattctctttgaagcaactgtgaatgggagttcactcatgatgtggctctctgttcgtctgtgatttgtgtataagaatgcttgtgattttttgcacattgattttgtatccagagactttgctgaagttgcttatcagcttaaggagattttgggctgagacgatggggttttttaaatatacaatcatgtcatctgcacacagggacaatttgacttcctcttttcctaattgaataccctttatttctttctcctgcctaattgccctggccagaacttccaacactgtgttgaataggagtggtgagagagggcatctttgtcttgtgccagttttcaaagggaatgcttccaggttttgcccattcagtatgatattggctgtgggtttgtcataaatagctcttattattttgagatacatcccatcaatacctaatttattgagagtttttagcatgaagggctgttgaattttmtcaaaggccttttctgcatctattgagataatcatgtggtttttgtctttggttctctttatatgctggattacatttattgatttgcatatgttgaaccagccttgcatcccagggatgaagcccacttgatcatggtggataagctttttgatgtgctgctggattcggtttgccagtattttattgaggatttttgcatcaatgttcatcagggatattggtctaaaattctctttttttgttgtgtctttgtcaggctttggtatcaggatgatgctggcctcataaaatgagttagggaggattccctctttttctatggattggaatagtttcagaaggaatggtaccagcttcttgtacctctagtagaattcggctgtgaatccatctggtcctggactttttttggttggtaggctattaattattgcctcaatttcagatcctgttattggtctattcagagattcaacttcttcctggtttagtcttgggagagtgtatgtgtcgaggaatttatccatttcttctagattttctagtttatttgcttagagatgtttatagtattctctgatggtagcttgtatttctgtgagatcagtggtgatatccccttcatcatttttttattgcctctatttgattctcccctcttttcttctttattagtcttgctagcagtctatcaattttgttgatcttttcaaaaaacgagcccctggattcattgattttttgaagggttttttgtgtatctccttcagttgtgctctgatcttagttatttcttgccttctgctagcttttgaatgtgtttgctcttgcttctctagttcttttaattgtgatgttagggtgtcaattttacatctttcctgctttctcttatgggcatttagtgctataaatttccctctacacactgctttaaatgtgtcccagagattctggtatgttgtgtctttgttctcactggtttcaaagaacatctttatttctgccttaattttgttatatacccattagtcattcaggagaaggttgttcagtttccatgtagttgagcggttttgagtgagtttcttaatcctgagttctactttgattgcactgtggtctgagagacagtttgttataatttctgttcttttacatttgctgaggagtgctttacttccagctatgtggtcaattttggaataagggcaatgtggtgctgagaagaatgtatattctgttgatttgtggtggagagttctgtagatgtctattaggtctgcttggtgcagagctgagttcaattcctggatatccttgttaactttctgtctcgtttatctgtctaaggttgacagtggggtgttaaagtctcccattattattgtgtgggagtctaagtctctttgtaagtctctaaggacttgctttatgaatctaggtgctcctgtattgggtgcatatatgtttaggataattagctcttcttgttgaattgatccctttaccattatgtaatggccttgtctcttttgatctttgttggtttaaagtctgttttatcagagactaggattgcaacccctgccttttttttccatttgcttggtagatcttcctccatccctttgttttgagcctatgtgagtctctgcatgtgagatgggtctcctgaatacagcacactgatgggtcttgactctttatccgttttgccagtctgtgtattttaattgaagcatttagcccatttacatttaaggttaatattgttatgtgtgaacttgatcctgtcattatgatgttagctggttattttgctcattagttgatgcagtttcttcctagcattgatggtctttacattttggcatgtttttgcagtggctggtaccagtcgttcctttccatgtttactgcttctttcaggagctcttgtagagcaggcctggtggtgacaaaatctctcagcatttgcttgtctgtaaaggattttatttctccttcacttatgaagcttaatttggctggatatgaaattctgggttgaaaattcgtttaagaatgttgaatattggcccccactctcttctggcttgtagagtttctgctgagattcgccgttagtctgatggtcttccctttgtgggtaacccgacctttctctctggctgcccttaacattttttccttcatttcaactttggtgaatctgacaattatgtgtcttggagttgctcttctcgaggattatctttatggcattctctgtatttcctgaatctgaatgttggcctgccttgctaggttggggaagttctcctggataatatcctgcagagtgttttccaacttggttccattctccccatcactttcaggtacaccaatcagacataaatttggtcttttcacatagtcccatatttcttggaggctttgttcatttccttttactcttttttctctaaacttctcttcttgcttcatttcattcatttgatcttcaatcactgatacsctttcttccagttgatcgaatcggctactgaagcttgtgcattcatcacgtagttctcttgccatgtttttcagctccatcaggtcatttaaggacttctctacactgtttattctagttcgccattcatctaatcttttttcaaggtttttagcttctttgcagtgggttcaaacttcctcctttagctcagagaagtttgatcgtctgaagccttcttctctcaacttgtcaaagtcattctccatccagctttgttccgttgctggtaaggagctgcgttcctttggagggggagaggcgctctgatttttagaattttcagcttttctgctctcttttttccccatctttgtggttttatctatctctgctctttgatgatggtgacgtacagatggggttttgatgtggatgtcctttctgtttgttagttttccttctaacagtcaggaccctcagctgcaggtctgttggagcttgctggaggtccactccagaccctgtttgcctgggtatcagcagcagaggctgcagaacagcacatattgctgaacagcaaatgttgctgcctgatcgttcctctggaagcttcatctcagaggggcacctggccatgtgaggtgtcagtctgcccctactgggaggtgcctcccagttaggctactcgggggtcagggacccacttgagggggcagtctgtccgttctcagatctcaaactcctttctgggagaaccactattcacttcaaagctgtcagacagggacatttaagtctgcagaggtttctgctgccttttgttcggctatgacctgcccccagaggtggagtctacagaggcaggcaggcctccttgagctgtggtgggctccacccagttcgagcttcctggctgctttgtttacctactcaagcctcagcaatggtggatgcccctcccccagcctcgctgccatcttgcagatagatctcrgaccgctgtgctagcagtgagtgagtatctgtgggcgtgggaccctccgagccaggtgtgggatataatctcctggtgtgccgtttgctaagaccattggaaaagctcagtatttgggtgggaattacctgattttccaggtgccatctgttaccacttcccttggctaggaaagggaattccctgaccccttgcacttcccggstgaggcgatgcctcaccctgctttggcttacgctcggtgggctgcacccactgtcctgcccccactgtccgacaagccccgtgagatgaacccggtacctcagttggaaatgcagaaatcacctgtcttctgcgtcactcgygctgggagctgtagactggagctgttcctatttggctatcttggaaccgcaaacagtatgtttttcttacattttttcctttacctttttgtttgacttacaggggtttaagtattctgtattatcttgtttttattaaacctgttctagaaataaacttgttgtctctggagaatattcagttttttcaacctgtttgttggtctgaaccagtgttgcactggtattatttcagtaaaactacaaaaccttaccaaaatcctttcrggacacttaactctaagattaaattacatttcaataaatattaatcactgtaagtaacaaaatatttgtctcattcaatggtccattaatttcaagtgatttctaataaacttccaggataaaaaaatttggaccgtctcagcatatggtcacagtctgacctgtaatatctgtatcttatgaaaaatgaatacgtttatattccctgttcatttgttcagtttttctcagctgatgagcagacagaaatgaaaactagttattgaatctgtactagtctcatcaacctactaaaaaaattgaggcctgacagactcatatcctgtctaacccaggtaatcatccaaccttctgaatttctttggcaatggacatctgtttttaagagtgaatactgaagatgtttgttttaccaagtttttagagtgtgaatttaagttacacacgcacacttaaatgtcagtggtttcacatttgacaactgaaattaagtagtagtctttgtacacactttaaaaaccacctaccagttcagttaaaattgtaggtctattaacactgaaattatgtcgcttgtgtactgctatatccagtgcagctacaccacattgtcgattcagagccaagggattttacagattttaaagtgcgtttatttgacacaccacaaagtcatttaatgaaagttaaggaataatgatcaaaacatttatctagttaataagtaattttcagaaatttggaacagtacgcaagccatactatttctgaagttctacagaagttcaaacacaatgattcctttcttgtcatccgtttgtccctatttataatattaaagcataactcaaaagtatatggttactatccctttagtaacccataaaatgttggaaggtgtttagatgttctttagatttttgaaaattaagtattttttagaatacacatgggtaatgtcaacatttttggaaatatgatgtgcagacagaccttaattttacttgtatgtgacctagggataccctctatataatagcatttgccttggaactgctgctccttcagctgggtgctgaagaccttcaccttccttcttgggccatcccttacttcccatttcaagccagtaatattaaggaggacatataagtggcaacaggaaaggtaggggacagttttgccaatttgccctccttcaccccctgccccacttcagacagtttcattagcaagatccctgctcacattataaggcccattctgttccttacccatgcacagctcaagtttctgcaacaaacgctggcatacgttctgaaaagtttcccataaaacagacacttaacttcagttgctttctgagtcttggttgccactgcccgacaggagtatttattctctgatctcaccagcagggtgcagtagggagaaaagttgccctataatttcttggagtacagaacacatacagatacggtttggttctgtaccactgcttacctttcagggcccctatggtttcagtaagctttgagggcacaaactaagaaggctaacaccaagagtattgtttgcatgggtaaatattactaaaagtcaacatacaagtgaacttttagagcatattttttatttgggaactacctgaaatacccagaaaactatgccaccactttaacaatccaaggacttcaaatgttttctaaaactctctctacccaagtagacatgcaaactttgatctgaatttcctgacatttccttatttttctgtttttgttttgtttttttttgagacagagtcttgctctgtcacccaagctggagtgcagaggcgagatctcggctcactgcaacctctgcctcctgggttcaagcaattctcctgcctcagcctccctgagtagctggacacgtgccaccatgcccagctaagttttgtatttttagtagagacggggtttcaccatgttggccaggctggtctcatactcctgacatcgtgatccacccgcctcggcctcccaaagtgctgggatttacaggggtgagccaccacgaccggccttcctcatttttctataaataattttagatagtagggtaaatggagttcttatttccaggaatttgaaaagctcatattcttttgagaaatgttttcccaggcaaatttctaatgcagctattcctctacttttgaaatgtccatccctcagctcaaaagaaagcaccctgcaatttagattctttttttaaaaaattaagtttaaactggaaagggatagttttagcttgttccacatgaaatcttgctgataagcaaattcaactacatttctatccaaaagagttcctttaaaaagtctgacttacagtcaggcatggtagctcatgcctgtaatcccagcactttgggaggccgatgctggcagatcccctgaggtcaggagttcgagaccagcctggccaacatggtgaaaccccatctctactaaaaattaaaaattagccgggcgtaatggcgcacatctgtaatcccagctacttgggaggccaaggcaggagaattgcttgaacccagaaggtggaggtttcagtaagccgagatcgtgccactgcactccagcctgggtgacagaacgaaactccgtctcaaaaaagaaaaaaaaagtcttatttacaataatttcctgtttccatttctttatgcaaatctcaaataataaacctgctcttggcaagctgcagctaatctccagtttatattactgtacatagttgtatatttaaattttcttaatattgtgaacatttaacatctcaacccttctgaaatgactgatggtgaaagcttcacagaaaagctggccacgtcatgctgtcgccactcagtcccacaacaccacactctcctccctcctcctcctgtttctggctagacattgctttctggacgtttctaaggaagcacaggcccagcttctaattcgaccaaagggttttaaagtctaagttctagcattttctgaatgcttcacagtagatgttccagaagaaattaatgactacaataagcattccaaatgatattctaaaatgaggactttctggctggacacagtggctcacgcctgtaatcccagcactttgggaggccgaggcagacagatcacttgaggtcaggagttggagaccagcctggccaacatggtgaaaccccgtctccactaaaaatacaaaaattagccgggcatagtggtgcatgcctgtaatcccagctactcaggaggctgaggcaggagaatcactcgaacccaggaggcagaggttgcagtgagccgagatcatgccactgcactgtagcctgggcaatagagcaagactcygtctcaaaaataaaaaataaaatgagtactttctgtgctcaaaactaccaactaagctaaactatttcatcaaaagaccccactaatcaggaaaactgataccagagataccaaaattgatcagtggaaaacagtggtttataactctacgttttgtggaagtgcacattttgataattcttattaaaagacactaagatacatgaagcattgtgtaagtttggcagacattaatatactcatttcagaggcagtaaacctatgaacccttaatgttctagtttgctcttgaaaatgatactatttcaaagctcagtaatgtggatagatttttattcagaaatcctttcatattcactaactgcaattaaaagtttaaaattacatggctcttaggaatgacgccaaacatgcaacattttaagagtaatattaaacagtaattttgccctcagaagtttacttatcaaattattacaacaggaacacaaatagaccacatattactctttaattagatttgttttacaatatgttcttgtcaacgagctatgtcaaactgtttgtttaaacctgacagaaaagcattttcacaaaaacgtaccatggagagggagggggaggggaagaagcactttttctagagatggaaaatagttccagtaaaaagttcttattcctttcttctaaggagctcgttctgaatattttcacttagttctactgttctttaaacaggactttaaaaagaattttgtatttacaaaatttacattttgttcctacaaaatgtaattttttaattttgtaaaataaaaatgtaaaattttaattttgttcctacatgagaagtgtgcgtactttcaattagttttcattaatatcttctgagttttcctcttaggtggttggtttctgggtaaggcagagttaggctggtgcacacactatttaggaagtcctgtctcgtggctgacaacatacatgtagtgctcaaggaagtgagttaaggagtgacatgggaatcaaaatgatgcctagaatagtgtaatttgggaaacagccctagatttgacattttggaagttcactgtaagaagagaccccaaaaagaaggaaaagggaaagggttcctcagctaaatatcccactcatccatgcctactcagcggtcactgtgacaaggccatcttaatcggggccagagatgacactctccccctgtaactcagcctggctctgtctattgggatgtgcctaaatgggatgggtgagggggcactaaacagctaacactggccagggaattaaggagctaaaatgcaagtacctcttgaataccacagcaatctctgtgcacaaatttggactgtactttttgggagaagaggtgaaaactattattaactattcccttccttcaaccaaaaggaaaaatacgcctctttaaggcttcttttaatgatactataatgctgaatttatttatgaaaaagaaacaatacaggttgaggtgggaaaagccccaaggaaacggagtaagtcactggcrgtcacaggacttgaattccctggggacagtgctgtggggtcccctgctcgccatcccagcacctcagtctgagtatagataatactgcatttttgtaaagacgaaggcatcctgcatttaccatcacactccacctactcttgtcctagtcatcttacatactcttagtccttaatctctcccaaaacgcttctcagcgcccattgttattgtgtcatctacaaagcaacacatatattaaaactcagatttgtttttaacaaaaaagtgcttaaaaccaccctaggcaattgtttttcacttcattttcaaccaataaaatcaaattcatttagatctatgaataatactgaaaaaataatgcttattctcttacattttaaataatgtgccttcatcctcaactttacattaactgactcatttcagtatctaaatgaattgagctctcatttgaaaaacagaaggtacaactatatagaatttttaggataaaaaatgttctggatagaaaaatccttttgatgtttcaaaataacacagattctcagtatagttttcagtttggcaactaaaccattattaagtacccaaggtttttaaaaaataacaaaagataataacatgatttttaaatacaaagttatataggagcaactcatatctgtggatcatccttacacaaagttgtttctcactagaaaaatccctaaatatttgtcataaaataaaaactccattatcaaaaattagtttaagatagaaatctatgcactttaatgattgccagaattgcccagcatagcttcagtaaaatagagaattgtctagaaaatacaatctccaaaatgtgtgcaagtactgcaaaccggacagaccggggcagggcaaggcccttgaaaccaagtcctccttgagcacctttcccaggttagaaacccctcttcagcctgtgcttcgcacgtttccttcagcgtgccgccattcagactgcgccacttacgtcccagtgccacgctgcgtggatcaagtgtcaacrggaaagtatgagttaggcaagcgctttttttttaagctgtaaacgcttcacatgactggccccgtaagaaattgtgggagcttagatgagcctggagcttttcaggaactggatgaggactctgtacacaaatgtgtactggcagagagtctgcaccagcatcattctctgttgcctcagcatgtccagcactctcgggatgtccagcacctaggttgagagaaacggtaatgaagataatgtgttcccctngggagacagaaaggatgggaggacacgagtgtcctggcagaaacctggttrggagatggacagtctcttttccaccttagcgtcttctagaaataagccatgattgcctacttctgattttctgattagttttagctataaatagaatgtccatgcagactatttcttcaacattccccaggtgtagctcactgactttgtatggttggacataattaccatgtctcactaaataccaaaattatacaaaaacatagtgtgctaagtgctatcagtatctagctatttccctcaagggctctgggcagcatgaatcatccttgaaatgtaaacagaaaaagaattctgagctcaaatttgaaaaaccctgggcaagtaaaacaaaattaaacagctttatttatcgtatgacttcttagtctttaatatgctaattggtactgagactctccaagaagacacagccttttgcagggaacattagtaacatcttgaggccaccacagtccaaggaaatgtgcgcaaaaagagctattaagtcactatgtccytctcttccccagcctyatttccacccaaaaaggccaggtgatcataagcgccatcacctcattgtgttccaggcaggcratcatgatctccgacaaaatcaccacgccagtccttcctaccccagcactgcagtggaccaacaacggagggttggggytttggggatcacttgtgctatttgtatggcgtcgaacagactggatctcttcaagatatgctgtggaaaatcaatgaaatagaaaagtactcaaggatcaaggcgtatcacattgttgactcaatcttcatattctctccactgattaagaggactgcagataaagagcactgggtgccagtgaaccaaacccaaccacaaagggacagtgtgaccctgagcaagtcactacctctgtccactttctgatctacaaaatgaaatgacggagatactgagtcagctgtggcrttctactcactaccaaatcataatttataaacctcgttaaccctccccaaaacacttgtattctttatgttaaaacaagtccgaagcttatatgagataacataaaggaaatatttcggaaacataaatgttcctctctgtttaacacctccagaggcagctgtcctcggaacaaagttaaagtcactcacataaaaatcccttgaggtcttctggacagccatgttcaggccagtctgtgtattggaggtgccagacggtcctctcttgcccrgtaaggaggtgcttcatcttcaggcctgtggtggcatagcagccagagtctgtgcggaaccgggtcgtgatcttaaaccttccataggtgacagtgttgtgcctggaaccaagtcgtggccagtacctaaagctcttctcccttccaccctcctgttaaagatgagcatggttaaatgactcgagatccggcaatggatgcctttctcacatagacggcacatctgaaacagaaccacaaccctaccctgcctttttctccacaggtcaggattccagatgattaacattaactgttcttcagaggctgagaaaatcacttaagagaartaagtacctacctcttctgctgtcaccattgctataattgcaattccctgttcccataccatctgccaaaaatcttgacaggtattctgtaatggtccctgtgtggcaatataatcccattcgattccactgacagagacctgggattagaaaaggttaaaaaaattgatgtgtgggtataatatacataggtatgtatgcatgcattcatggtagtactaaaaaagtttttttaaaaaagtaaaaagtaaaaaagtagtaaactggattattcagcagaataaggaaagacttttcatcttttcccttgtgaatacaatttgcattactgacatttttataaacttaggtactgtgaatatacataatatctatgcaacctgtttaaccttgctgaatgtcagttctcatttatacaataaagatactgcctaccgtcatagggtcattgtgaggactgagtcagtatctatggtacctggcacataactcaataagtagctgttattgcagacatggtgcctcttctttaaaaaaaaccttcctacttaagatagtctcacctctgaacttctgagtcaaggtcactctccacaataatattaagtttccacttcagatttaacttccttgagagcagtctaatacaacagtaattactagatttgtggttaagagacctgggttaaatcttggcttcaccaatattgagtgacgacaataactgtctccaaacactcactaaacgtaaaacccagtgccaagccttgtgccacacgcactctcactcagggctgccagccccctagtcaccgctccacatcgtctcactgagcacccagtggctgccactgtggatgagtaccaggttataacagtgaataaacactagggaggaggaggggactagtgagaagctggcagggtaggtgtcatcatttatttatttccatgtaagtgagatgaggtcccacaacacagcttataaagtgaggtcccacctcattttagatctaggcgtcagacccaggtctatcaaattctttcctctattctgcaagtggctgctgaagattttgaaatatcactacagaactacagtatcattcattcttatccatctagtcatgagagactggatgagttatttcaaggaaatgctcggtttttaagtaaattatgctgatattatatttaaaaacaaaatagtatgtgcatagattcccaaaagccatcaaggggtactggcattcacaggcagactgccagtctccagaaagccttggtgtcagcttgttcccttctcaaataatacttgcaaactaaagaaaaaaaccaccacctgtccacagttactcattcactcaccatgagatttctccttcccaaaataaagaattgaatgtggccagcatgaacaaagggtacaatgaggaagagggaacatctggctttattccatcatgtgttgtgaatcatcattttgtccattttcataggagtgatattaccccagataaggtgccaagaacatacactagggaaggacagcctcttaaatacatgggactgggaagactggatatccataagcagaaaagtaaaactggaccccctatctctcaccataaacattaccccagtttaatggcattatactggttccaggaaaaaagcacttcttcaaagaaaaaaatgatacttaaaaattattataaagagtatgtaaagagaacagatggcaccttggtaagttgaaagcttttgtgaacaccatcaaaaagcccagacacttttgttacataaaaatgcatgtcagtatgtgatgaggaaaaactagcaattcagtggctcccagaatttatgagctaaaaagaggtcttcagatttagaaggacaaagttctaaagccaggcaacacaaggtcaaggctgtagggagccatgatcataccactgcactccacctgtctgggcgacagagcaagactctatctcaaaaaaggcaaaagaaaaaaaaaaaagccgggcaaataagtgcgccctgagtcctggtaacagtgttgggggcagagtggtttcgcacatggagagtagacatgactttggctctgtctgatagacgctttttatctagcactggtatgtggatttcccagcttgcagtacagtttgtcacaaatgtttaaaactagggtgtttatctaaaacaatacaataaaaataaattttaaaatatctgaattctaaacagacatgaatacaattcttaccattcttgtaacttaactgaaactgcatgtgctgttgattacttgaggcgttcctctcaccttaatatgtgatgcgttgatgtaaccagtgttgttttctttagttgggaccaactccactctcacatcatcataaggaagaacatcttggaatcgatttctttctgcattttcagggagtcgtgctgttgagcactccccatcaactagccgtttcttaagaattctttcatattctgtgaataccattccttgttctaatcgttgttccagaattttacactataaaacagaatatgtgtaataacatgaatacagccacacgtcgtggctaccttttgactgtatatttgaaatcttgttttctgcttcaaatctagcactgtataatattgaaaattctaggttgggcacggtgtctcatgcctgtaatccctgcactttgggaggccaaggagggaggatcacttgagcctaggagttcaggaccagcctgagaaacacagtgagaccccgtctctgcaaaaaattaaaaaacgagccaggtgtggtagtgcatgcctgtggtcccatctacttgggaggatgaggcaggaggattgcttgagcccaggaggttgaggctgcagtgaaccatgagaacctatctcaaaaaaaccaaaccaaaaccaaaacagaaacaaaattctaggtgaaaatgaagttaaaattttaaaaagccacaacaacaagagttaaaagaacaaaagacaatcattttggtgagaaatataatgcaaacttttgtttaaagttgaaaattggcctaaagaaatttgttgaattcattttctctagatctgtggtcaattttgtgacccctaatagatggaattctcctggggaacagtaagtaaatctaggggacggataatgagttccaacagctatgaacaaatgtttccattttatgtcatacgatatataaaagactaaagcagtaggaaatattcgaaactacctccaggatcccgttgtaaagcaaatgtatgcctatctgattttgatgtaataaaacctcatagaaaatacacctcaggcacaaaggaagttttgaaaaattgagaaactactctcgagataaactttcagtataataaaagtcaatgtctgctgcttttcccctgtatgctcctgtatttttgtagatttcttctcactttaaggccatcaaaatcaagactgctccaaaaggccaggagaaggtaaaaaagaacactgagaaacaaacaaacaaaaaatcagcattcgaacctgaaattatctattaagacattagctatacatttgccccaattttgaggcccatattacaaaattccttaacactcatttattattaaattgtgttagaaaattcaccaaaatctcatgaaggcatttgcgtagtatttaccggttgttccagagaaggcacaaagccctgtgtgtcccatacataccctttcatcattcgttgctctggtagccacttcctttccttcatcaggcagaggcactcgagatagggagagtccatttagggcagccagtttaagaggaccaattttttttgcatctactcgagtctttttcattccctgtaaaaggatttatatgtatatatgaaatatacacaaatacaacccctgtgaaaagaagtttcaatgcactgaagaccaggaacacacagagggagtgttctcctttgccaataaacccagaaagattacactccttcacacaccacttgtttaacaaacattagtaggaagacattcctttcaaggccaaagccctgataaagtcttccagatagaaggttttgaaacactattggttacaaagttctgttgtaatgaaaggtgaggctccaggcagactgcattccttttaaaacaagacagacgtaacaaatcagctgaagtccaaaaaaaaaaaaaaaaaaaaaaaacaaaagctttaaatgcaatcaattgactatagtaagcttttataaattttttttttgagggtctcactctgtcacccaggctggatggaatgcaggggcaccatcatagctcactgcagcctcaacctccagtctcaagcaatcccacctgaacctcccgagtacctgggactaccagcacatgccaccatgcccaactaatctttgtgtgttttgtagagatggggtctcactatgttgcccaggctggtctcaaacaactgaacttaagcagtgttggcctcccaaagtgcttgagattacaggcgtgtgccaccatgcccggacagctttttataatttttaaaatatataaattctttaagtcattctgaaaaattaaatggtttctgcagcagccccctttgtgtgttaagccccctcctcatatgctactctgcattctagtgcagacttagatgacccgggttagatcacgctacctctcagaacggctacgtttttaaacaaggaaaataaaacagggctaaaatctccatcatgacaccaggaggataggacagaagagaaagcatcaacaaaatcttgtctcctgaaatcaagtgtttcctaaaattattattagagcatgattttcctctctgagaatagtaagcataagaacactaagttgaccaggtgcgggggatcacgcctgtaatcctagcactttgggaggccgaggtcaggagattgagaccatcctggccaatatggtgaaaccccgtctctactaaaaatacaaaaattagctgggcgtggtggcacatgcctgtaatcccagctactcgggaggctgaggcaggagaaaggcttgaacctgggaggtggagattacagtgagctgagatcgtgccactgcactccagcctggaggcagagtgagactccgtctccaaaaaaaaaaagaacactaagtttcgttggatatactacacttccttggatgatatcaatataatgagtagccccaactggaaaataatggttctgccctgtaaacaaaatccgtgttattccagctctctcagcctgtaacaggccatgaagccccatgataatggtgcaagaacagagggaaaaggcaacttggtgagagaggaaaaaaatcctaaaagattgctgctgtaattggagactgtgattggtacctaactcaataagctaagtggattaatttttaattttataattaatatttgatcatgagctccccacataatgcagtctagactataaacagcagaggcctgggttcacatctggcctctaactgaccaacttctttcaggcaagtcacctttcctctgtaagcctcacctagacagaaagagacagatatatccagacacaggcatacagactaaacacttcctgcttaggctgaaatttaatgattctaacgtgcagaaaacagtgatgtgctggtaatatttaacaacaggctcttggaaggaagttttgatcggtgtttgcccatatccatggtgtaaatactcccatcacagccaatttcaaactgttaatgtcacatcaattggctcacaagattcctgaacatttaagtcggctcttgctagtcaatatgaactagctctggcacttctctgcctgaaaatgactcaaaatatcccacactgggacacgctggataaagctgattggctgtgaggtcagttcaaaagccagtattggaagaatgttgtatgtagtcaaaactagccttgaatatgccttaattagcccttagaatataagcacaggattttaatgcataccctgcacagtgatttcttatgtgagaaccactgcactaaagggtacaacaaaaagaaaatctttatgtagatatatgagcacccaaaccagtctgcctttaagataacaatcaggttgctggaggtggagatgggtggagaattctaaaatcattcctacttgtctacagtttatttcactgtttttaatactaaacctccataaccttaattcacattaggaaatttgttgtaacgattaagataatggcaaccccatgttactatgaaaggtcagagggtacaatagggaattggcctcttccactcttgaaagccattaagttaaatatatgatgccacctcacagtaatgttaatattgactaatctctttcaatgt

SEQ ID NO: 94925 - DNA, 56144 bp, Homo sapiens
  misc_feature (1)...(56144): n = A,T,C or G
tctagacctcttcctataaattaatccctcttgttttagatctcacaccctccaacgccctccggttccagatcttatattcagtgatttcctctggttctggaccccacaactccaagcttcctattggttccagttctcctgatcggtaatacatttggttccaaatccagacctcttaatctctctctttttttttttttttttttgagacagagtcccactctgtcacccaggctggagtacagtggctcaatctcggctcactgcagcctccacctcctgggttcaagcaattcttgggcctcagcctcccaaatagctgggattacaggcatgtgccaccacgcccagctaagttttatatttttagtagagacagtgtttcaccatgttggccaggctggtcttgaactcccgacctcaactgatccacccgcctcagcctcccaaagtgctgaaattacaggagtgagcctggccagacttcttaatttctaaatcacttttgttttagaccttatgaggctcagcttattcttctgcagttctctataaccaagactcattttctctcatcaaaaacaagtacagagagtttgatgtgtttatctcttttttcttcctcttcttttttttttttttcttttttgagatggagtctctctctgttgcccaggctggagtataatggtgccatctaggctcactgcaacctccgcctcctgattcaagtgattctcctgcctcagcctcctaaattggtgggattacaggagcccaccaccacatccggctacctttgtgtattttttagtagagacggggttttgccaagttggaggggctggtcttgaactcttgacctcagatgatccacccgcctcagcctcccaaagtgctgggattacaggcataagccaccgtgcccgaccctgtccttatcttataataaccagttcttctagaaccagacgatgctctagttctcctagattctgaacctcatgacctgtaccactcactagttccagactacacaacttctagaaggtgccacctccagggtcctgattcaagatctggtgatctgctgtttctctggttctagaactgacttacaagtgccttctgattctagacctcattccgtaagttcccttggctctagacttcatcatttccagctcctcctcactcaagatctgactccaaattaccctgggtctagaattcagccttcaaatatcttctgattttagactttgccttatacatttctctggttttagatcttaccaccctcaactccttctgattctagatcttatggttcccaaatctctctggttctagaactcagattttaggcttttgtttttccttttttttgttaaaaaaaaaaaaatagagacggggtttcaccatgttgcccaggctggtcgcgaactactgagctcaagcaattctccctccttggcctcaccaaagtgctgggactacaggcatgagccactgagcccagccaggctttttctaattctatgctttattctataaattcctctgcttctaagcctcacagcttccaactgcctttgatttcagatccaaattcctctgattctataattcagcctccaaatgcttctgattctggaatctagacttttccctaaagattcctctggttctgaatcttataacctcaactccctaattccagaccccagcctcctaaatctattctgggcttcccaccccactgaacttacccaattccttctttcagtcttaagttttcccattctagacccctaccctctaggctgtgctgctcctggacttcatgcctctccattctcattgcctacaatctctgtgccccagaaccccctccacttcccaccccagccctccagacatgcacttaccttgactttaccccacatgtttggggcacctggggctccctcaccccttgggtggtttgcaatctgaagacttctccagccacacaggcacatgcacaggcacggtgctgtctgcatattgccaggtggggagagaagccaggacccctcagctgtctgccaccatctatgtgcctcccttaccccccagctttctttctacagatggtgctactcttggtctcccacaggaaaaggcctccccccttcttagccccatttaccccgtttgtggaaggcactgctcgctctgttttgtcagagagtggcctatccagattggtgctatgggggggtctgacccctccctcctccctctggaggtgatgtgggccctcaatggagggaattgtgctgggctagggaaaggggagggactagactggccacactggctctgaaactcaccaatctctatacaccataaagacctcaccttggtaggcaccagagctctgcgtgttgactcatcttttggatctcctctgggagtgtgggtgcactggtggctgagtgtctttttttttttccttccttccttccttccttccttccttccttccttccttccttccgctctctctctttcttttctttttttttttttcttggagtctcactctgttgcccaggctggagtgcagtggcacaatctctgctcactgcaacctccactacccaggttcaagcgattctcctgcctccgtctcccaagtagctgggatttcaggcatgtgccaccacacccagctaatttttgtgtttttaatagagatggggtttcaccacattggtcaggctggtctcgaactcctgaactcaggtaatctgcccgcctcggcctcccaaagtgctgggattgcaggcatgagccaccatgccaggccctttctttctttcgagacagggtctcactatctcacccaagctggagtgcagtggtgtgatcacggctcactgcagcctcctgggctcaagcaatcctcccatctcacccttcccggtagctgggactacaggtgcatgacacgaggcccagctaattattttcatttttttgtagagacagagccttaccatgttgcccaggctggtctcaaactcctgggtttaagcgatcctcctgcctcagcctcccaaagttctaggattataggcttgagccactgcaccagccccatgttactttctgattctgtgtatctgtatgtgtgtgtgtgtgtgcatgcacacgagtgtgtgcacagtgtcattctgtgtatgtgtatgggtctttgtcacattctgtgaacctgtgttgcagcaggtgggtggggttgtgattccttctacaagtgcatattagtatctgggtgaagtgattctgccttatgtgtgtttctggttattttgggtttctgtgtttctgagtgtggaaggtgctgtgatttttttttttttttttgcctatgtatgtctgtatgatgtgattctgtgtacatgtgtgggactgcttgatgctataattctgggtaccaatgtgtgtgtgacatgattgcccatagttaagtgagcatgtgtgtgcaagagtgtgtgtccatggactcatgtgcaggtgggtgtgtctgttgtcatgtacgtcactctcataaccccccatacagggttgcacataggaatctcttcaagggaagaaaaacactctcaagcctttgcacttcctattcttctgcctgaaatgcctctctcccttcccctctcccctcacttggttacctcctactcatatttcacatcttggtttaggtaacagctactccaggaagccttccctgcctgctccaattgggtaaagtgcccctaaaagctccccttggaagccccctcccatcacagcactaggcactctgcccaactctgaatatttgttttgttttatttgttttttgagacagagtctcactctgtagcccaggctgtcgtgcagtggcgcgatctcggctcactgcagcctccgcctcctaggttcaagcaattctcctgcctcaacctccctaataactgggactataggtgcgcaccatcatgcccagctaaatttttgtatttctggtagtgacggggttttgccatgttggccaggctggtcttgaacttctgacctcaagtgatctgcctgctttggcctcccaaagtgcttcgattacaggcatgagctaccatacccagcccactttgagtatttgtgatggagtgaatataaaagtactactctgtgtcaggctccctgacaaatgctgtactcatgttgtcgaactctcctctaatcctgtatgatggggataattattatccccactttacagaggttgaaactgaggcttagaagagggtgatcacttgcccaaggtcacagtgtcaggaaggattccgctggactcgaaaccagaattcaaatccactatggcagctccttttcccccaaccccaaaacaaacaatacgaacaaacaaaagaaaaatttactaacccaccaagatgggctctggcacctacagaggcagtagagtggcaatgaaggacataggaattagatgggattcctgatcctggctctgtcaccttcttatgttgttgtgaccttcgtcaaacacctctgcaagtctgtgtctttatctgtaaaatggagatgatactaatatctgccctttagggtgattgttggttgtgctgggggccagtaggagagatggggttggactaacaagaggtttgggagtgggatagataggtttaggagtgtgcttccaggaggggatccagagccttacaggacttagtgctacatgagggcttagaaaggacagactggaagcgtgtacggcgggtggggattggcaaaggggtggaatctggatattagactattcagcctgaggttaagactattcagggtctcctaatcaggagtttgggttttctcctaagggtgctggggccatggaagcctgggagcgagagtgtgccatggttttatcatgtcttagaaagatccctcggccgggcacggtggctcacgcctgtaatcccagcactttgggaggccgaggcgggcggatagcttgaggtcggcagttcgaggccagcctggccaacgtggtgaaacccgtttctactaaaatacaaaaattagccgggcatggtggcgggcgcctgtaatcccagctacttgggaggctgaggcagaagaatcgcttaaaccgggaggcggaggttgcagtgagcctagatggcgccactgcactccagcctgggcgacagagggagactccctctcaaaaaaaaaaaaaaaaaaaaaaaaatgtgaagggtaaactggagggaggcagagtgcatgcaatcaatgctgtgatctcagacaagagaatctgtaaaaacacaaacaggagagtttatttgaagattcaggatttgggaagctgaacacaggaagaaaggagatggtgcaacacacttctaagccttgctcaggacttgaaatccagagtgccttcagttaaaaactcaaacactgaccctcaaggttggaccctttttggcttgagaaaccactaatttttcagagatgggtaactgagaccctagagaggaagggaagatttgttcaaggtcacacaggtagtcgacaatagggctcgacgcccgggtccggctccgcgtagggcatggcgctgccttgcaaaacagccacacccgccagcgacattcacaacccaccccccaaccctagaggacagcggggaaatcccactttcagaaccgagaaactttttacagccttggaacacggtaactttgggaggagaggccacaccaggtctgtttccccgcgcgccccttctctcattccctattggctctctctaccaggggtaccgtctggggaacctctggtcaccttgtcctccgcgcgctctgtggcgaaagggacctgcgcaggcgcgtgaagggcgccttcagggcccgcgctttacgacacttgtgcggcagcggcggcggccacccggcgctccttcgcgacggttcggcygggtgccgctggcggccgttgccarggtaggggtcgctttgcggcatggcgatggcggagggcgagaggactgagtgtgctgagcccccccgggacgaacccccggctgatggagctctgaagcgggcagaggagctcaagactcaggccaatgactacttcaaaggtgcgcccgcctggcagggagggtggacagtggcccaggctgaggggtgccgggcccgcgcggaaccatagcaacgcggagctgcagcctgggcgcggggcagacactaccaagtgaccgggcgtggggaggcccaggatggcgctgccaaggagcgacatagggggcttcggagagtgatacctaggagtggcgtgcggagcgggtgctactcagtggagagactgaggagggcgccaccaattgtggggcgagagggggactggaatgagggcgctaccaaacgtgaggcctgtagagggcgctaccaggcagtgacatgtggtgggggagtgattgatggcgctaccaaatggggagtcctggggtgggtgccgccaagtggggggtagagggggcacagccccaatagagaaggcaatcgtgggggtggggaatggatcattagatggggggaacaaggaagtaggagatttgggctgacccgaggaaaaggaatgtgatggtgggggccttgggagtaagggtggggatccttaagaatagtatcacttagaatattgagagtcaagtgtggggcacccattcattcattaattcaacaaatatttattgagtacctgttatgtgccaaggactgtgcttgactttggggatatagcagtgaatgagacagatgtggccctgtccttagcttgtaattttgcaggtgaaccagacatgaaaaaaaaaaaaacaaaaaaaaaccatgtaaataagtaaaatacttaaattgtgatgagtgctttgaaagcaaaccagcagtgtgatgaagtagagaataagggttggaggctactttagatagggtagtgggggaaggccttactgagcaggaggcgtttaagctgaaactcacagagggagaactggagaggagtgttccagggaggtaaagcagcctgtgcaaaggccctgggatggggaatgaaagggtactggcatggctggggctttggctacttagggggagaccaataacaagatgagattaggacagaggccagatcatgcagggtctccgtgagtcattacaaagaccagtttggaattttttttttttttttttttttgagacgggagttttgctctttttgcccaggctagagtgcaatggcgcaatctcggctcactgcaacctccgcctccctggttcaagcgattctcctgcctcagcctcccgagtagctgggattatagacgcacaccaccatgcccagataatttttgtacttttagtagagatggggtttcgccatgttggccaggctggtgtcgaacctctgaccgcaggtgatccgcccatctcggcctctcaaagtgctgggattacaggcatgagccaccacgcccagccctacaagaagacacattaagtaaatgggccagtctggactggagaagaatttgggcgtgatcaaactatggttgggaatggatgagatcatctagtaagagggtctagaggggggacttaggacagaacccaaatggaagagggtgaggctaaggaggagcacttagtgaggtggaaaggaagccaggaaaggtgtcgggaaggctgagagaagggagcgcttctagaacaaggagctggtgcctttagtccgatgctgccaaggcaagcactggccattggctttggctccatggatgctggtagtgatgttgacaggagcagttattggggagtgatgggggtgatgcagccaggaggtgctgaagagtgaatgggaggggaggaagtggagacagcaaatgttaagtgttaggagtattggttctgaaggggagtggagaaatgggggagggtggtaagacgagaacgtgcacaggagttcgagaccaacctggccaacatggtgaaacgacgtctctgctgaaaaaattagttgggtgtggtggcacacacctgtagtcccagctacttgggaggctgaggcaggagaattgcttgatccttggaggcagaggctgcagtgagccaagatcacaccactgcattccagcctgggcaacagactccgtctcaagaaaaaaaaaaagagagaagatgcagtgtcagggaaagatggattttttgtaaggatggaagagagtagagtccaatagagatggagaattgattctgcacaggagaggggggacttgcagcagcaaaaccctggagaaggcggaggtgggaagggtctggagccctggaagagacttggcctccaacgggagcagaagcaaagtgtggagaagctcgatccggtgggagccgtgagagggaggtaggaccagtgagagatgaggccagaggtagaaccttggaagtcagattggggaatatgggtgtcatcctgggggtggtcgatgccatgggaagtttcaagagcggggtgctgtggttcagttagtgttcagaaaagatccctggctgccatgcagagactggactccagggtaagacaggaaggagtctagattagtggacaggtgaggaggggtggtgatcgccagccaggctggagggacagaaatagattcaagaagtgtttcagggaggaagtgagagtggctgcctggagagagggtggacggtactccaggcagggaaaaaaaaaacaaaaacaggtggcaaaggcccaaaggtgagcagagccaggcatggaggccataagtggggccacagcgtaggaggctggaggaggttatgatgagtttgcagggagtagattgcgcagggctgtaggaaggagccagggctttctggggtggggtggcggtggggggtggggctctggggagccctgggaggttctgagtagggaaaggacagggtcaggtttgtgttttaggaacacccctctggaggggcaggacaagaggctgcgaggccaggtggaggctgagccaggaacctgggcaggagaggccagaccagggctgggtggggctggagggtgagaagggagtggctgaatctgagagatgttcaggaggctgacttggcagaataagtgaagtgactaccgggctttgggggctgagggatggagaggagtccaggatgaggctgtctcagccaggtgatggggtggaaggtggaattccctgggatgggagcagcctgcttgggggttgctgctgaggccgcatcagaattctgggccacagcagccattgggaggagcctgttgccccccaggacctgggatccaggctctcaggagtcctggggctgggcaggcagccagaggggcctggcactgagctggcacggaggagaayggccctgctggcccaggccccttgctgtctgtcaggcagtagcaggcacagagccccaggctccagggctgtgggaataacaataaaaaagaataatgacagctcaccttaattgagccttgtggccaggtacgctgtggggtttaatcctccccgggggctgggagatggctaggagtggccctgtttgttttataaaggaagcaaggctcggaggtgaaaaaaccactcgcccaaggtcagagtgtgtgagcagcagggcccggatatccccttcctcgccacgtgcttggctcccacgttcaggttcctcccagagctgtactggccctgttgaggagaagaggggccccagcagggagaagagaggtcccagggctcagaggactgtcccctcaactgtggctggttgctctgtaagttcaggcctattccagaaatcctgggggcagagcctcgtcccccgtctcatgtctgagtctaagggaagtgtctcaactgtcttcccctctctgtgggcctcagtgccccgcttctgtaaaatggggggtgggggcttatgcttaacccctaaggaggctccaggtataagagcttgtggggaggaagcaggccatggttgagagctcaggctgcctgggttcaaaccctatgtcttcctttacctgcttgatgacgcctgggcaaatgacttaacttctctgggcctctgtttccttgcatctaaaatggggaatgtcttgaggcttaaatatggtcctgtttgtaaagcgcatagaacagggccaggatatggcatgtgggtcgacccgtggagtacaggctcctcccatttcctcttgttcccttcacttcctcccttcatttagtcattcacgcattcacttcttttgcctgcttcttttgctgcagccagttttcttacacaagttcgtaaaatcctcacggccacccagtgaggcagagctcagaaagaggaggctatttgcctgcagcctcgagttagagatctgcagagccgggtggcaggccctgagactccaggatcccctccctgtgccactggagtaacagctgccccatcaggagcgcgggccaggcagcctctggaccacagccaggaggcctgaaggagtcctcraaggcgctggcattccagggagggtcggtcagatctgggctgcccrgttctgcccttgtttgtttttgggaagtcccgggccctgccctcctggggcttacagctctggagggacacactcattactcaacagtgacgatgagagtggacagggctggcacaggagatcccaggggctggrgcagcccagtcgggggcctgacccagcctgggagtaaaggagggcttcccggaggaggggacatgtgagcatttgaaagattgccaggagttggcgtggcaaagaggaatgttgttagattgttgctggccacatccccaggacccggcttctcccttctgtaatgtcagtcctcatctctctctgcatccctccttcctttccctctggagccactcatggagcctgggactctcttcttccatctcttcaaccaactgactcccatcctccaggtctcagccccagtgtcccctccgagctgccccaaccctaaacactgggcaccactgtctagggatggatctgtctcctccactggatggtaagccctgggagggcagggctgtgtgtaagaaggactctcggagtgctgttgagaacattaaaatgggagtgagggtggggactctgtgcagggctgctggtagaaggactctaggaaaccctagtccacagggggttcctcagtagcccagggatacccaggtagtaagaggcagagctagggactgggcccaggccacctactcctgcctctgtgcttacccctgtgccacgctcctgcccagaggtcaccatggcatggggcgtgagagtgggagccttttggtcttggcctggctcagaaggcccacttstcggccaggcgctgtggctcacgcctgtaatcccagcactttgggaggccaaggcaggaggatcacgaggtcaggagatcgagaccatcctggctaacacggtgaaaccccgtctctactaaaaatacaaaaaattagccgggtatagtggcgggcgcctatagtcccagctgctcggggggctaaggctggagaatggtgtgaacctgggaggcggagcttgcagtgagcggagatcgcaccgctgcactccagcctgggcgacagagcgagactccatctcaaaaaaaaaaaaaaaagaaggcccacttgtcacctgctgtgtgaccttgagcaccggcctttcttccctgagcttcagtccccagatttggagacgggggttaatgtagtttccctgggcttgtgagagttcagtgaagggggacctgtgtactaaagccctgcatggctctggtacatcacggcccccagtggggacaagcctctaaggctgtttaagccttggctctcctgcctgtcaaatgggcacgagggagggatcaagcctggctctgcaggtgcaracagggcatttgaccttgagcaagacctccatggcttgtctgtaaaatgagcaccagatggtccttactcccgtggagacatgaggattccacaggtcacgaggtaaagtgcagggtacagctatagctcatctcaaataaaatccgacctctcctccttggccagatgtcacatcctgtcactccacacttagaacatcagtgtccagacctcactgtggctgcccggggcccagggatctgtcccaccagcctccctgcctcatctctcctccccctgcccactccacccagctgcctcagctctcactggccctcagacaaggctcaaccacctctgggcctctgcacctgctcttcttgctatcggagtgctcttccctcagtctgctgctagtgcccagcttggggctggaggggtgggygggcgggtgtgtggagtcctggagactgtggccgagaggacaagccctgagctaggttggttgggacaggcaggargggcaggctgaagagatgtctctgggctcagggtagccctcagcttccccatctgtgaacagggagactgggcgtcacccagcccagggcctgtcctcgcanggttggagcactgcctcatgcctcttcttctgtctccgcagccaaggactaygagaacgccatcaagttctacagccaggccatcgagctgaaccccagcaatgccatctactatggcaaccgcagcctggcctacctgcgcactgagtgctatggctacgcgctgggagacgccacgcgggccattgagctggacaagaagtacatcaagggttattaccgccgggctgccagcaacatggcactgggcaagttccgggccgcgctgcgagactacgagacggtgagctgggragtgggccaggcctggcacctgagccagncagatactgagggctgggctggcggggacgggtgtgaggagccattcactcctctacttaccactcagccagccagcaagtgcctgtggggccttgggcccaggccagagtacccaggccacagctctgctcagccatctcacattttgtgaccctgagccagttaccccgcctcgccacaccttcctttccatatccgtgaaatgaggagaacaagaggatcagcctcaagggtagcggtgaggaaaagtgagcttttgcctttcacacgagtagaccagtacttggcccggggtcagtgtcctgtgatggttcacctgatggttactgtcattgttagtgctggtgctggacaggagccacacagcctctcttcttctggtggagcttgtctttcaggggcaggcagaaaacccaccactgaataggttagcagaataattgcaggtgaggatctgcactttgaagaaaagaggaagggcagtcgggcacagtggctcacggcagtaatcccagcactttgggaggccagggtgagaggattgcttgagcccaggagtttaagacaagcctgggccacatagggaggagacctcatctctacaaaaaatacaaaaattagccaagcgtggtggcacgcacctttagtcccagctactcaggaggctgaggcaagaggattacttgagctcaggagctcaaggccgcartgagctatgctctcaccactccactccagcctgggcgacacagtgagaccctgtctcaaaaaaaaaaacaagaagggtgatatgctgccagggacagcagacaggatatgtgtgatatgctgatgagggaggggacctagggcacagtgagaattcgctagtgccctcacccacctaatgaaaatcctgacggtatgaggctctgcagagcgagcacacaccttcacaccaggtgtgctctgcatcttccttcagggaggctggctgaatcattacagcaccctgggacgtgggaactgggattactccccttgcacagatgaggaaacagtccctaaggggtgaagtcacctgcccagtgacccccacctggttagtagcagagctgggatttgaacccaggaggcctggcctcagggccttatctctcccacctcagagttcgctccctgagacggggccgtgcgcttgtcctgcgcatggggatggtgcagcagggggcttggtcagtgtgtgtcgagaggattgttatcctgcccccccacacagacacacttcactccckccttcccttgcaaccatcacactcggagctgcttgtgtcgtgtagggaggggcaaccagggagctgggagccgcgagtctgcagttggtcgcggggctgagaagcacgagtctgcagtcggtggagccagctcagacactgtcctggctgttggccgctggcctggggtggagggtggacttcaggccaggtgaaggcttgagctaagcatgagtccaggggacacatgttaggatgggggcagagatgtggcggggggttagggcgacacctagaagggtgggggcaggggcagcagagcagaggccttcccagcttgggctcccaagccattcttggccaagcccctccctcattgtctcttcctgtcctaatctagaaaatggtgacaagaggagtggccgcctccggatggctgtggctgtgatgacatggttgagtaaaggtcacgagctgcagggctcagtaatgagtaaccaaggacagtcggtgttgggttggggcagggctccaggtgggaagggggcctggggagacagtggggcagaagagaggagccccaaggacaggtttagggcagggtcttcatctcgtgtggggctgcaggagcatctttccccagggtaaggagcaggggctgcaggcagggtcttcgtcaagtgtggggctgcaagagtgtctttccccagggtaaggagcaggcttttcaagactctggcccagtctagggcccaaccccgcatactcccaaccccgcatactccctgaggctgggctggttggcttcagccatcttgtgggtgtgccacgtctgagctgtgtcccaggcctggcggatggcagggagggttgagggggtggggaattcagagtcttttacagaatacccagcacctaaattgtcatggcccatttccccatgggggctctcccagcagcattggggacccccacatgaacatgagggcttacctgtcatcaggccatccatatgcctgcaggccttcagccttgctcctttctgcgcagttcttcaggctccatgtgccctggggcagttcatcttcccaagactctacctcctgcttgctggatgctagagtttcctcctagaccagaagctcgccagggaagcagagcaaagacgtgaccttggccttgggcgggggagctccccttagcctcggtttcctcagcggtctgctcactctgggcccagcactgctgggagccctttgtgcacctgaattcagcctgaattcagactgaggcctagagaggagatgtccctcctccaaggtcacccagcagggaagtggcagagctgagacttgaacccctagtccatgcttgtaactgtttctgggccacaatcagttgaatagcttcagcacttttgtcttcatcaaacagagaattaaaaacggttcattgtttggaggaagtgtgtataaatattgttttgtggaaatgacttttcatttacacaagtacagrtgagtgatggatgtgatataaaaatccctattttacatgtgggctgcaggcagagagtctgcggtcaccagtgcaggggctagatggggcaggctctgggctcaggacgcctaggttcacagccagctcagattgggtagcagctgcatggctcctagtgccttttttctcagccttagtgtcctcatctgttaaaggaggtgagaatataggaataacaaccaaagtgttttttctttgtttttgttttttgttttttgtttgagagagagtcttgctctgtcacccaggctggagtgcagtggcacaaatcttggctcactgcaacctctgcctcttgggttcaagcgatcctcccacctcagcctcccaagtagctgggactacaggcgtgtgccatcaagcccgggtaatttgtgtaatttttgtggagatggggtttcaccatgttgcccaggctggtctcaaactcctaggcttaaggaatttgcccaccttagcctcccaaagggctgggcttacaagcatgagccatggcacccggccccaaagtgttttttctattctctcagtcaacagttacacagaaaatttctgtgaccactggtcacgaaagggagtggaggtctctccctaccggcaaccaagcagtcgattctgcagtggacaccagctgggtgttctcttattgaattaattctgacactatctgtccagagatagcattagattccacaggttgaggacttagtccccacttgtcccttatttctgatgctgatcacaagacctaggttattttgccggtgattctgactgactggctattaattagggtttctgtgacccactccttgggttcaattaatttgctagagaactccctcatggaattcagagaaacacatttaccagcttattataaaggctgctacaaaggatacagatgagatgcgcagagcaacgtgtgggatggagtgcagagcttccgcgccctctcctggagcaccactcttcaggaacctccatgtgttcagctattcagaagctccctggacccagtcctttcgggtttttatggaagcttcattatgtagacatgattaattataccattggtcattggtgatcaacttaaccttcagcccttctcccctcccggaggttggagggtggggctgaaacattccaaccttacaggcccactttggtcattccagtgaccagcccccatcctgaagctacataggggtggctagccattagtcaacacatgagcatgcaaaaagacacatcactttggagattccaaagattttaggagttatgtgccagaaaacagtacatgatgaatatcaaacctgtatttcatagtaccgctggccacccgtggtcttcaaacacagttccctcatatccaaagaatatacaactcaaaaggtattactggccagtttgttactagaactccattaggtcattaataattagttcatcatattatatgattatgtctcccagggtgagaccagtcaggtttgcaggtttctattcagtcttgccaatttccaaaagcaggcgtgatctcagcaaatatatggctcccccctttcaggcattaggtataattgagataagagacaatgtcacccttgttctgagcctctttcaaagtgttaatgtaatactggagatttcttaattcataactcatttattcattcgtttaccctcgtaaatgttcctccgtttcttcatttatacctgttgtcctaaaggaagaaactgaggcaaaattaatataagtagagattttatttgggccaaggttgaggaccagcctgggagcctcaggttatctcgggaagtgctccagagaacagataagctcaagcgtttaaagacaaaaggataaatcggggaggagtgattacaaagggtgtctttcaggaattctcattggtttaaaaaataacattgatcagtaattggctctgcgttattaaattacagggtgtaagtgatggcatccgtgtatggcattgtgaggttgatgtgtagctgtctctggactcttactcttgagtccacagggtcagtggcttcgggggatgagtttttctcaagatggggagtgggacatgactgctccctcattccagttcctctctaggctcaatcatttaaagggggtttgcattactcaaggaaaagtttcttttctttctcatttttcccttttggtcaaaatctttctttttaaaagcattgatcagagtctgagtgtcagggtgtccctcgtcactaggaaggctcactttaggacaggcctgttctatgttggggagggggaaggagatggctcagtgaggaattttcagtgtgtccaaaagctgaagtaggatggcctcacagagtggcaaaaagaagacctgaatcaagtcactgatttatacagctgcgtctctgtgtccaatcatctctagtcttcagaataccatgattttcattttctcggaagtaaaacaagaagattagtaatttaaatagtagaaatataatgcacataaggattataatgaaaacaagaatgtatatgccagaatgaaaaaaagagccttttccaattagggagccagctaaaaacatgaggaaaatgaaacccagcttctgctttggggacttactgtagccaagatagaattcaagattcagtacaaactgtaggcaagtaataaaaacccaaaaacagtggtcagggctagaatctaaacacagatgtgcaactgaagcatcatttttcctttccagtcccccagttttaccaaagacactaataatagcaagaccaatttattctcaaaataagttttagtgttatactttatttgcataaagtacagcaagattagtgactgaccatatagactccttttaagttggctttcccggaaaatgaggaatttcggattagactttttttttttttttttttttgaggcggagttttcctcttgttgcccaggcaggagtgcaatggcgcaaactcggctcactgcaacttctgcctcctgggttcaagtgattctcctgcttcagcctcctgagtagctgggattacaggcacctgccacacacctggctaatttttgtatttttactagagacggggtttcaccacgttggccaggctggtcttgaactcctgacctcaggtgatccacctgcctcggcctcacagagtgctgggattacaggcctgagccactgcacccggcctgtaagatactttttgagaagaattaaagtaaaacaataattgcctgtgtatgacagaggacttagaacagccatggttaaagactcaattgaccaggaaatttggctatttctgcagcatataatttaacataataatcataattaataactgataacatatacgaggacatagtttcttttttagaaatctgtacaattttggaacatatattaatgagacccatacaaatataacaaaaaagatcagcaccatttcctacgtgacaatacttcccatatggtttttaacatcccagataagcctaatatgtctctcttggtcttccggggtccctgacatccagaagttagttcgaggtcaaaaagacttaattttagaatttgaaattagatttttctttgaaattagatttttctttttttttttttcttttttggagacaaagtctcactgtgttgcccaggctggagtgcattggcacaatcttggctcactgcaaccacggcctcctgggctcaattgattcttgtgcctcagcctcccaagtagctgggattacaggcatgtgccaccacaccccgctaatttttttgtattttttgtagagacagggttttgctatgttggccaaggtggtcttgaactagcctcaagtgatcagcttcagcctcccaaagtgccaggattacatgtgttagccaccacgcccagccctgaaatttggttttgtaaaccctacaaatgcatcaaaggtttgaaacacttaatcaaaataggatcacacatcactgtgaaataatatagtcattcatttagccaaagtgttaattagaagatttcaaaaagcaaaaacctttactctttggtagagaggagactcagtttcccaaataatcaaaagacctaataaagacagcataagagcaacagaatctttctctccctctccccttttttgttttttctgtgttgtttgtttgtttgttttttgggatttttgttttgttttgtgttttgcaatttacccaaaagataagtgaaagaaaattttttttttttttttttgagacggagtctcactctgtcgcccaggctggagtgcagtggtgcaatctccactcgctgcaagctccacctcccggattcaccccattctcctgcctcagcctcctgagtagctgtgactacaggtgcctgctaccacgcccagcgtattttttgtatttttatgagagacggggtttcactgtgttagccaggatggtctcaatctcttgacctcatgatccgcccgcctcggcctcccaaagtgctgggattacaggcgtgagccactgcgcctggctgaaaaatcttttattatcttttactaatactacaccagccgggcatggtggctcactcctgtaatcccagcactttgggagactgaggcaggcggatcatgaggtcaagagatcgagaccatcctgaccaacacggtgaaaccctgtctctactaaaaattaaaaaaaaaaaaaaaaaaaaaaaaaattagccgggcttggtggcatgtgcctgtagtcccacctactcgggaggctgagacaggaaaatcacttgaatccgggaggtggaggctgcagtgaggcaagatcgtgccattgcactctagcctggcgacagagccagactccgtctcaaaaaaaaaaaaaaatactataccaaaattttgctcaaaagagaaaaacaaattcttcctttgcatcaatgtattatttatggtaaagctaattttaataaaaccttataaacaaatctatccaatctcaatcagctttgaccatacaaaataagatttccatgaatcttttgtaatttacaaatttttccattcttttttctccctactttccatatctattcagtttatctcattttttctttcttttattccttcaatttaatacaacctttacctctaaactaagtaaaattgcttttcctttaacaaaaccacatcctctgtcttgtgtataaccttccttaccaaaaccacatcttagacgttctgtgtacagaattgtttctcttggttatcacatattagaattttaactcttagtgaccgtaattcatagcaaaaacctaagaagcaagcaatttttaactgttagtcatgtagcagtaatttatgatgccatctttataatttttagaaatatagggtttctaatggaacaatttttcaatggaacaggacatttttcctaacagatctcagtatcttttgtttctctaaaataagaagtcagaagccatatttagtagttactgtcttagcatcatctcttatttggaaatgatctagatattcaatgaatatttgtcattaatttagcttagtaaaaccctaagggcataattaccaaaagatttgagaaacctttttaagtaggcatattataaaacataattattattaaaagttcatttataaagttgattctatttatatgtatttaatttattcatttttagtgattgttgggaaaatttcgtgagacagacaaatccaaccatcatctcaagttaaattttctattaaccattttttattattgtaygttaggcaagtatcatagaagtaagaaccttaaagttasatacatacatattttgctggtaactcagaaaacatagtttttatttatttatttttattttttatttttattttttttgagatggggtctcactctgtcgcccaggctggagtgcagtggcgcgatctcggctcactgcaagctccgccgcccaggttcatgccattcccctgcctcagcctcccgagtacctgggactacaggcgcccgccaccacacccggctaattttttgtatttttagtagagatggggtttcaccgtgttagccaggatggtctcgatctcctgacctcgtgatccgcctgccttggcctcccaaagtgctgggattacaggcatgagccactgccccgggccgccgacatagtttttattaaaaccatcccggctaaaacggtgaaaccccgtctctactaaaaatacaaacaattagctgggcatggtggcgggcgcctgtagtcccagctacttgggaggctgaggcaggagaatggcgtgaacccgggaggcggagcttgcagtgagccgagatcccgccactgcactccagcctgggcgacagagcgagactccatctcaaaaaaaaaaaaaaaaaaaaaaaaaaaaaaaaaaaaaaaacaattttaaactagttttatttgccaaaagatttactgatttactcaggtcatgtgaacttggaaaatctttgggcttactttctttatttttttctttttcagacggagtctcactctgtcgccaggctggagagcagtggcgcgatctcggctcactgcaatctctgcctcccagtttcaagcgattctcctgcctcagcctccaagtagctgggattgcaggcacgcaccaccacatccacctaattttttcatacttttagtagagatggggtttcaccatgttggccagatggtctcgatctcctgaccttgtgatctgcccccgctcagcctcccaaagtgctgggattacaggcatgagccactgcacctggcctcggtttaccttctaatttgtgagtgctcgtttgtctttaattttgtatcatgtagataatatacaaaaacatgtatagacataacatatatgtagacacaacatatagcacacatgtacacatgtatgtatcgacaagttacagagatcaaggagctctatgtaaaagagaatagagctttagacctgagaggagcctgtttacccacaatgcttggggctccatgaggataaacagaggttcactcatgtgataccaaaggtggcaagaggaaggagggacagacagcggtacatcaaagaacaggacttagaggagccagtcaaggagatcttgttttccataaagcaattaagttttacattatccttggcaaaaatcatgtcaacaagaagaaagagggattgtgtataattaggagcagtttgagaagagaggaaatcagagagaacagaggcatcaaaaaatatatatatacgtgtgtgtgtgtatgtgtgtgcatacatatgtagccaaatatcagcttttaatcaagtcagcttttgactatagagctctttaaaaacttttaatcaggttttagccaggcagatagtaaacattcggccagatgcagtggctcacccctgtaatcccagtattttgggagaccgaggcaggaagatcacttgaggccagaatcctgggcaacatggcaagacctcttctctagtctcaaaaaaatgtttttaaacagatagcaaacctatctgttccttggctttccctttctgaaattcacatcaaggagtttgctttgggaggtgggtcatatttgtttattagaggtctagggtaatcattatttaaagctatttgtcttttgtaaatcttgcagcaaagttcagcagacagttggagcatttaaagggttttctgggggagtttcctaaaaaaaaaataattgtacctttcaaatctcttatgagattgcagccaggacaaataggaagtaggtctccattcgatttgtctggttctaaatcctgccttttccaattgtgtgcacaaatacattaatttaggaatttcaagaccctcatttgggccattgcactttggggtatctcacgccgctgggtccatttacctaggtatttgcaggatggcgctccataggtattagacataaatccagctggtgtttcggggccggggcgggggggctgtcctttaaggcaaagctcagtttcaatgagcagtttcctataattttatttatttatttatttgagatggagtcttgctctgtcacccagcctggggtgcagtggcgcaatctcagctccctgcaacctccgcctcctgggttcaagcaactctcttgcctcggtctcccaagtagctgggattacaggcatgagccaccacgcccagctactttttgtgtttttagtggaaacggggtttcatgatgttggccaggcaggttttgaactcctgacctcaagtaatctgcccacctcggcctcccaaagtgctgggattacaagcgtgagccaccatgcccagctaatgtttgtgtttttagtagaggcggggtttcacgatgttggctaggctggtttcaaatgcctgacctcaagtgatccacctgtctcagcctcccaaagtgctgggattacaggcgtgagccacacacccagcctcctataattttagaatttccttctcaaaagtgaccaaggccaggacagtatattgggtcgaggtgtgccgctttgtgggtgtcactcttccaggtgtcaccagtgaatcgtgaggcatgttcttatgtgtcttggaatctcttatcaccttgtggcagcagagtgcttcaggtatcagagtgaccagtcccttattcatacctttccagctgagcaagagtccttactggtcttcttcctaatgggaggccctttaagactccaacacgtcatgcatggaaaaacgtccccatacctctgcaaagtctctggttgcctaaagaatccagtgggtcaaagggggcaattttctcttctctttgaggcaagatgacttaccctcatgcagcttagtcagaagcagctgcaatttaaaaagcatgctgtctaatttcagcccagaagtgcagccaccagtgccagaatgccagtactgtgacccgggcctcctgctgtgaagcagcggtggagaaggcagttttctttttttccccctgaaactcgaatcccttgctcatagacaaagatggaaaccttcattctagaaaaagagagatagaaccactcaaataaagtctagacctcatctgacaagagagggggtccagattcaggagcactcacccttttgcccccagtgaacctgtggaattggaggaacacagtgggtttgttctggtactgagcatcgagtccaggggcacccagtgtctgagtgggtagctctgaaccctgctcacagggccaaaaaacattgacataaccgaagaaactgaggcaaaattaacatagacagagtttatttgggccagggttgagagaattgcagccctggaaacactttaagttaccttgggaagagcactggagaacaagggagaggcttgtggtttttgttttttttttagagacagaatyttactctgtcacccaggctagagtgcagtggcaccatcattgctcactgcagcctcaaactcctgggctcaagtgatcctcccacctcagcctcccaagtagctgggactgcaagtgcatgccaccgtgcctggctaatttttttctttatcgtagagatggggtcttgctgtgttccccaggctgatctcgaactcctggacttctgcctcagcctcccgaagtgccaggattacaggtgtgaggcaccatgcatggcctgcttgagcttttaaagaaaaaaaggacaaatgagaagaggggtgattataaaaggggttttgcaggaaatatcattggtttacagaaataacattgattaataattgcccatccattgtggaactagagggtgtgagttacggtgtctgtggttggtggcagtctagagtccacgtagcacgtggcttcaggcgatgagtacttctcttaagtgagaagtgggatatgactgctgtcctattccagtgcctctctgggcctgatcatttaaaggggctcaccatataacttttctttctcatacccacccttttcgaagggacattggaattggccactgtgctggatctaggtcgtaggcagcaaagtaatctagcacatgcctcctcttagatcacttccattcagayagggtgtggttacataggtgcgggactagtgggctatttttatcagcaggctatataactgcattcactgttagccccagtttcaccagatggtgtgaaagcacaacccactcccatccggcccttgggaattctgacagaaggtttaaaaacatagttacggtttcttaggaattatccctgcttccagcacttggtgctggtagatagagccttggtgctaggaccattacatcaggtaggagaaagaaagagagaaataaaatttataatcactgtaccagcgtatttctcccttggctagaactgcagagtcacaccaacatcttccccagattctgcatgtaatgttgctgcttggggagtttgagaagatgctgacagtttgaagcagggatcagaaggtggcccaccaggagtgagctggagatgcccggtctctcttggtttaacatagaggacggggaatcaaaggcttagggaaattgtaatgcttgagtggatttgtaacttaaaacccactcacccacactggagggtccagagaacacacctttcaccaatactttgagaagcagatttatgagggggccccggcatccctggttgctcctctctgcaagctggaccttacggtgggaaccgcagtcactcagttggaaaacttacatgcagtgggaacaattagatcctggagaggcagggaccaagtgtcagcactcagctgctgaaggcaagatgtctgtcatggacacagaagcaaatccacaattagaataatctgactgttgcgccccagtcagaataagggcttatgggggcctggtgakgaatggagttttagctcaggtccgactctcagtgggttgagtgggtccctggacccctcctgtggtcatttcccccgttccagctgcacaattggaataaatgtactcagcagctggcrgaaaatccccacgtttgttccctaagctgtggagtaagggccattatggtgggaaaggctaaatggaagccatagagctgcctctacctaggaaaattgtaaatcaaaacagcagcacatccctggagagattgtagagattagtgccaccatcagagacttgaaagctgcaggggtggagagccttaccacacccccacttcactctcctgtttggcctatgcagaagacggctgcatcctggagaatggcaggggattatcgtaagcttcaccaggtggtgaccccagttgcagctgctgtaccatgcggtttcattgcttgagcaggtgaacgcatctcctggacctgccatgcagctactcgtggcgagtgtcctttctccatccctgtccgtaagacccaccagaagcagtttgctttcagttggcaaggccagtgccacacccttgctgcctgcctcagggacatatcagtccttcagccctgggttacagtttccttcacagggatcttttctttttaaaaaattaatgaaatttttattaatttgttacctttttattttaatagctttgggggtacccgtggttttagtggcatggatgaactgtataacagggatgaactgtatagtggcagagtctgagatcttagtgtacccgtcacccgagtactgtacagtgcacccagtacatagattttacccctcacccctcccactctcccccttctaggtctccagtttccattataccactctgtatgccttgcatacccatagcttagcttccacttacaagtgagaacatagagtgttttattttccattagtgagttatttcacttagaataatggcctccaactccatccaagtctacaaaagacattattttgctcctgtttacgggtaaagtagtattccttcatggggatcttgatcacccttcccttctgcaagctatcacactggtccacgacactgatggcattttactaattggacctagtgagcatgaagcagctactctgtacttattggtaagacagtgtggagtgaggcaattctcctaataaacaccctctcatatatatccacatgcataggtatagtcatgcattgcttaacaaggggtagtttttgagaagtgtgttgttaggtgatttcattgtgtgagcatcatagagtgtgcttacacaaacctcgatgttacagcttactgcatacacacctaggttatgtggcatggccgagtgctcctaggctacacgcctgtacagcatgttactttagtgaatgctgtggcaactgtagcaaaacagtaagtatttatgcatctgaacgtagaaaagggatggtaaagtcatggcttacacctgtaatcccagcactttgggaggccgaggcgggtggatcacgaggtcaggagatcaagaccatcctggccaacacggtgaaacaccgtctctactaaatatacaaaaaattagccgggcgtggtggcaggtgcctgtagtcctagccactctgggggctgaggcaggagaatggcgtgaacccgggaggcagagcttgcagtgagcggacattgcgccactgcaccccagcctgggtgacagggcgagactctgtctcaaaaaaaaaaaaaaaggccaggcatggtggctcacgcctgtaatcccagcactttaggagtctgaggcgggcagatcacgaggtcaggagttcaggaccagcctggccaagatggtgaaaccccatctctactaaaaatacaaaaattagccaggcgtggtggcatgctcctgtaatcccagctactcgggaggctgaggcaggagaattgcttgaacccgggaggcggaggttacagtgagccgagatcaagccattgcactccagcctgggcagcagagcgagactccgtctgaaaaaaaaaaaaaaaaaaagataaaatctagtacacctgtttagggcacttaccatgaatagagcttgcaggactggaagtttcactgggtgagtcagtgcgtgagtggtgagtgaatgtaaggctaggacagtaatgtgtatgtctgtaggcttcataaacactgtacactagattatattaaatttatttttaaaagtttttggttcttcaataataaattaaccttagcttactgtaacttactttataaactttttaattttttaaaactttctcactttgttgtaataacacttagcttaaaacacacatatacacctgtacaaaaatattttctttatatccttattctgtaagcttttttctgttgaaaaaatatttcttttgctttttaaacttttttgttaaaaacgaagacacaaacgcagacattagcctaggcctacgcagggtcaggagatcagtatcactgtctcccacctccacaccgtgtcccactggaaggtcctctggggctgtcacaygcatggagctgtcatctagggtgacagtgccttctggatacccctgaaggacctgcgtgaggcccttgagaaggtgtggttcttttcagaaaaatgtccatggtggttcgcttggcttcttttttcgtcatggatttgtgtgagtaatggcgttgtgctgagacattcccatggctgtgctgtcaccaggcaataggactatttcagtgtgtttatcttctgggaccacacttgtatatgtgggccactgctgactgaacatcattatacagctcatgactgtgtgtatgtctctctcttttttttttgagatgggtcttgctctgtcgcccatgctggagtgcagtggcgggatctcggctcactgcaagctccgcctcccgggttcataccattctcctgcttcagcctctctagtacctgggactacaggtgcccgccactgcgtccagctaattttttatatttttagtagagatggggtttcactatgttagccaggatggtcttgatctcctgacctcatgatccgcccacctcggcctcccaaagtgctgggattacaggcgtgagccaccacgtccagcctgtgtgtgtgtgtctctctcattagttctgtctctctggagaaccctgactctcatgatggatctgtccctcacggggtccttttccggaagacaccacctatgttctttcctgtctatgcttggaacttgggtgcaaacctaggccggatctgggggactccctctgtgctccctggcccttcctgggatctcctgatttttgttctgtggctttgggttccttacatcagagtccagcacagtcagttagaaatgcgtgttgccttgcaagcggatactagtgcctgtacacctacagcatggatctgtgaaagtaacaggaatagtcacaaccactrtttcatccagcgctcgccagggcccagggtgtgaccttcatgcagtaatataactcatttcatcttcacggctaccctgcgcagtggagactctctttgtccctggtttataggtgaggaaaccaaggcccagagggtagctcactccactgaggttgcacagccaggaggtggcagctttgtcccagagtcaggccataagcagggcaggcgcagcgggtccgagtttctcggcacagcactcacccttagctcaggcagtgcaccttggtggtctctctgacttaytatacagagaatgctgggtatgacttgccaaactcattcaccagaaactaacccactagggtaaaaacccttatgtcaggcttcaggctgtcactagcagcggsatttcctgccctggaaacctgacttcccccagctgcctgcatgcctcaggcaggcacggctcccttctgggctgctgctcattgtctgcatgttggagatattcagaatgccctgttacaccttgtactgtgggtccactccatgtgggatcttgatgctgctctataatccctcacccttagttttaaaacccaagcagttctgaagaacagttgttctggtamgtttgggcagctcgttcagtggcaaaacctgacctgaactactaagaagctgctgatggtcttgattactctccagtggcatgtctggaggttttgctgcagaaatggccgtgtatgtgcttgtgattactaggtactgccctggacctgctgggggtgtcctatgatagagcatgtacacaaaatcatgtgggtttttttgtattgttttgttttggtttttttttgagacagaatctcactgtgttacccaggctggagtgtgatggcacaatcatgactcactgcagccttacctgggctcaagcaatcctcccacctcagccccccaaagtagctgggactacaggcatgcaccaccayacctggctagytttttgttgttgttgttatttttttctagagatagggactcactatgttgtccaggctggtcttgaactcctgagctcaagtgatcctcccacctcagcctcccacagtggtgggattataggtgtgagccaccacacccggccatctaccaaatcaccttactaaaatccaaaaaattcccaatccccaaatacacgcagcccccagggcttcttcggggattgtgaacctgtgttaccatttcaccagctccagacatcattacccatgagtactcgctgacgaagataatgcttttagaaacaacttgtttacttagcactgtggattcacctgcagttgtaagaagtaatgcagaaatcccagttttccctaaaggtatatctggcataactacataaatatcacagtcagaatactgaccttgatacaatccaactgccactttaaaaaaaaagttcagtgtgaagttctgacccggtgggccttcaggagctgagtcccttctggtctggactgaatgaccttcctcaggagcaggagcccagcagggcatcttcactgtcccagctagaccttgcgtgtcgcagcagctacagtagcagcaggccttgggatgagcacttgcctgctgctgcctggcattaagttctcacgacaatcctccagggggtgctggcaccacccctactttctagaaactgagggaggcttgagatgtgaggccgcctgtcctggcaggcctggattcagacccaggaggcctagtcccagagcccaggctcataaccactgccccacgctgcctccctggagggcatgcagtgtgccccagggacgagaggcccaggcagggaggggaggtggtggaaggggagcccatcccagcgtgcatagcggaaatcaggagcctgggctttggcgcagttycgcctgggagagaagggaatcctggcttcctgggtgggtgacttcacctccccgggccttggttttcttgtctgtcagatgaggattgtgaaaacactgccatgtagaggtgcatggaggataaatgagcaagtgaattgcttacacaatattaggcacatagtaagtgctctagaagtgagctgtgtattattattgttgccgctgccactgttggtattcccactccctttctcctccctgcgctgtcattgtttgccttcatctgccttcccagcccgcccacccctggagaacaggagactggcggggaggaaatgctcagtcactcattcatttctttggagaaaggggggaagggaaattcattgactgctgcacgcacagctatggctgagcctcagccctgccctcacagggccaccttccagcggggtggacagaccggttccgaaccagcagggctcacggctggaacaagggagcccaggggcctttgggagcccagagggggtgcctgacccagcctctggggcttcctagaggagggatcagtggggctgagacctggaggaggagctggaggtgcaaatgaggtgctctgggcagaggcagcctgcataaaggcctggagccagcatgccggggacatgagtggtctggctgggaggtatagaggggtgggaggagccgcatgggccaggccacatgctggtttggatgccagccgggtgtgggcacataaccactcctcattgggaaggatgccaggggctgcctggcactgtcttcctcccctgccttacacccacccacagcccaggtggagctgcctggcagggtgccctrggcctgcccagacagggaggaggccgtggcctgctgggcctgggctcttctcaccccgcttggcgcacacacctgtttccagcatggatgagcctcaccccctgcttctgtcacaccaacctgcaggggtcagtgggtgtctctgtggaggtttctgagtcacgctgccaggctttccaccagaggccacccctgctccttgagggccggccctgggacctcccagtctgtcctctggcacaggagatacgggggtctgctcctggggaggctaaggatggtgggcaggtcagacggggggtctacgtgactaaacaggtgaagtcacttgcccaaagtcacatggcaagtaagtagcagagccaggatctgaatccagcccccaaatccagtctgcttttcaggttagaagatcagagtttgcaggaatcggggtaaataaggttgcggggatagggctcctttcactgggaacttgctatgtcccaaagctgaacgccccatgcctattgtgtatgatctggtcatcagcgcagcagccccagaagggggaccgtgaagagcagtgggcgcccacgtggagtttcctttcacctggcaccactgtgcagggttcacaagcattcacccatgcagctctcccagtggccctcttgagggagatatatatggttctcagtcccacctcagagagaaactgagccacagagaggcagactcacctgcctgaggtcacccagctcatgacttgcagagctgggatttgaacccggtctcagggatctgtgaccctcagttcctctcttcagtggacaaaacagggaaatcttttgtcctgggcctccccagagtgtgagggagggaagtaacagcactcggtgctgctgcccrcctgcccctgctgcatgccgggccccctgtgttacttattccttcccacagccctggcaggggagccctgtgtcacctccctgttagagattaggtaacctgggcttggggagtccatgtcgtccagcaagtcattggccctttgtgtgagtctgggctgttctgtgaccgtagacccagccgggcccttcctctcatgctccgccaccttggtagtcacgatagtagcatcaggacctgtgcttgggatgctgctcaccccacagggattctcacagggcacctgaagctgagcccgcagtcctcagacaggcagttgtttgattttagcgcrctcatagctaagattgatgaagtgcacccatgcgggcagctttgctgtgcccagttttggggtgcagaaaccaaggctcggcagttaaatacgtctagggttgcaccatcagcacctggcgcccaggcggtctgacttccactttcatggaacccagggctgggcagcctgggggcaaccgctgtgcccccacctcagcctcagtgtgcacgccccttccctcccacccaggtggtcaaggtgaagccccatgacaaggatgccaaaatgaaataccaggagtgcaacaagatcgtgaagcagaaggcctttgagcgggccatcgcgggcgacgagcacaagcgctccgtggtggactcrctggacatcgagagcatgagtgagtcaggcctggatgctccacgctccagcccagaacattccacaygggccttctccattccctgggggtggggttgggctcaggggtggccccttgttctgtccccaggctggtgtctgtcgctcctctgcctgtgttccagggcgctccatccacagcccaaagctgggcctcacgcttcccagtgagcgagattggagagccatggtccccctgccatttcacgggcccttcctccgggtagtagcacagtccccacaggctgtgtctgattcacctctaggtgctgagaagatccaagggattgttgtggatcatcccacagatgattattgagcatctcctatgtgcccggcactgtcctaggcactaggggtacagctatgaacaaaacccttcctgtccacatggagccgatattctaggagggagataagatgatgaataagtcatgaaatgaatagtgctaagtgccataaaactgaatagagtaaaggggggtgggtgaaggaagacagggaggtcaggaagaggcctctgggccagacctgacccaggaggggactcttcactcactctgtcccgctctcgacctstgtgtccacacccaagttttccccatccctgggagcgagacccccttctccctcatagtggctgtggtcactgactctcgtgtcccgttgttcacaccctagccattgaggatgagtacagcggacccaagcttgaagacggcaaagtgacaatcagtttcatgaaggagctcatgcagtggtacaaggaccagaagaaactgcaccggaaatgtgcctaccaggtaatgcatctgtcaggtactgggcacccgggaaccctgggatggcatcacagcactgccagcygcgggcactgagcaaaacgacaggagaagggcggccatgacagccaacaccaaacaggagtcgtgtgccggacactgtgccgagggcttaccacatgatctcatctcgtcccacagcagtttggggaggtggcaggcagtgccatttgacagatgcagggacaaagggccagagaggtcaggtgactggcccagggtgaaaggtgaggaagcagtagagtctgttgctttgagttctcatcccaggctcttgggcgtctgtggctgctggttgttgcaggttgtttgggacctgctggttgctcctagtcctgagaccaccccctccccgacctaggagggcagctggccacagggtgttaactggttgagtgagactcaggctctggtatcccatctggacaaggccccctgccctgacctctcagggctacagggaccttaccatagttttggggaactgctgagatccaccacctcctgggttggttatgaggatgcgggacttcttgtgagtcaggttgacaggcaggtgactcttacaggagtgtgcaggcaatatgggaagccgccatttgataggtcctagagagccaagtggcctgggttcaaatctctaccttcccacatactagctgtgtgcctgtgggcagatggcttcacctctctgtgccttgatttcctcctctgtgcagtggagataatcatactgtctccaccaagggctgttgtaaggagtaactgcgtgtaatccacatcagtgcttcgaatagtgcctagcacatggttagtgctctgtatgggttagctgttgatcatgttgttaaaggtgagacaggaggaggaatgtccacattcctggttgtttttaattgaagtataattaatgcacaataaaatacacaaatctgaagtgtcctgttagatgagtttttagagttttatgtgcccactgcccaaacaagttacagaacatttccatcaaccagaaagctccctttgacccctttctagtcagccctcactcccatcccaggggcaaccactgatctgatttttcaccactgtaaattaattctgcctggttttgaatttcatttcaatgtcatatgggcttacagcgtttagtgtctcttctttcatgtggcacaatgtgtgtgggattcatacatggatgttgtgtatatcggtagctcaagtcctccattgtctgaacagcccatgacttgtttatgcagtcttcttttgagagacatttgggttatttctactttgtagcttttataagtataagctgctatgaacttcttggacaagtctttttgtgaacatgttttcattgttcatgttgaatttctctattgattgtcttttgtttcattgatttttcattcattattctctatgcatgcttgaggtttaatttgctttcttctggcttctgaagatggacattaatgctgttaattttacatcttttcttccacacaaagcatttaaaactaaatttccttccaggcagtaagttagctgcgtcccgtgaattttaatacgtcgtattttcattatcattgagttagaattgttttctaattttctttatggtttctgattttatccatagattattgagaagggtattgtttaactcccaaatatttggggacttctagatgttactgttactgatttctaatttggtcagacaacacactctggatgattccattggggctatttttagatctgtcttggcaaacatgcagtatgtactggaaaatagtgtgtattttgcagtcgttagtcatagggctctataaatgtcaattagttcaagatggttgagactgctgttaaaaatcttttatagcctattttttctaattgctcaatcatttattgagggggctgttaaaagctccgactatacttgtagatttgcctatttctccctataattctcagttttttgcttcctgtattttgaaatttttattaggcacacatttaggattgttatgctttcttgatgaattgactcattataatgaagtgacttcagtactttttggcttgaaatccctgttttctattaaaatagttaaaccagatttttacagttaatatttgcatgctataacttttctacccttttgtatttaacccattggtatctttatatttaaaatgtttttcttataaacagcatatacttgggtcttgcctttttatccagttggacaatctttaccttttttttttttgaggtggaatttcgctcttgttgcccaggttggagtgcaatggtgtgatcttggctcactgcaacttctgcctcctggattcaagcaattctcctgcctcagcctccagagtagctaggattacaggcacacgccactatacccaactaatttttgtttcgttttgttttttgagacggagtctcattctgtcaccagggtagagtgcagtggcgcaatctcagctcactgcaacctctgtgtcccagattcaagtgattctcctgcctcagcctcccgagtagctgggactacaggtgtgcgccaccatgcccagctaacttctgtatttttagtagagatgggattgtaccatgttggccaggatggcctcgatctcttgacctcgtgatccacctgcctcagcctcccaaagtgctggaattacaggcatgagccaccatgcctggcctgatttttgtatttttaatagagacagtgtttcaccatgttggtcaagttggtctcaaactcctgacctcagataatccacccacctcggcctcctaaagtgctggaattacaggtgtcagccaccattcccagccaatctttaccttttaattggagtgtttagttcatttatgtttaactatcagcaatcatatgattgcatttcaatctactgtctagatgtctcttttctatatgtcccatttgtttttttcccccttgtttctccttctttgactttcttttgtgtgaatcaggaatcttttagcatttcatctgttttattgaattttttgttatacttttgaatgtgtgtggcgaggggtggagtgttacatggttgctctagagcagcccttctcagctgaggctctatagagagaattaagccctaactcccttaggcatccattatatccgcagtgaattaactcctctcctgtgaatctgtgtgctctccttgggagaactgagcagatatcactgaaaatattttttgtggggcttaatcatttcccggaaccctggatgaaaaaggctgctccaaagattacaatgtgtaactttaacttgtcctattctactttcaaataataatatgatacttaatggacaatataagaatcttatggcctggggcagtggctcatgcctgtaatcccagcagtttcggaggccgaggcaggtgaatcacttggggtcaggagttccagactagcctggtcaacatggcaaaaaccccatctctacaaccctgtctctactaaaaatacaaaaattagccaggcatggtggcacacacttctaatcccagctgctcgagaggctgaggcagaagaatcacttgaacccaggaggtggaggttgcagtgagccaaggtcgtgccactgcactccagcctgggcaacagagcgagactccatctcaaaagaaaaaaaaaaaaagaatcttacaatattgtgattgcttttattttctcccagcctttgtgctcttgtcatgcttatgcatctgctataaatacattgttgtcatttccttaaatagacactagtcttctaaagaaatacacgtatgaatacacagaaaatgtcttttatatttaccctttctcttactccttgtttcttcttccatatgtgagtttctatctggtatcatgccccttctgcctgagtacttttagcatttcttacagtgcacgtctgctgtagactaattctctcagctttggtctgcctgaaaatgtttttattttgtcttcatttttaggggtgtctttgctggatgtagagttctaggttgacattgtttctttcaaggctttaaatgtgtttttttcccattgccttttgacctccattgtttctgtgagaactcagcaatcattcatatctttgttctatatagtctgcttttttcttcactggttttaagatgttgtctttggtttttagtagtttgactatgatgggctttgatgtgctttttttgagtctgtgggttaatatctttcattagttttggaaagttcttagccattatttcttatatttcttcccatttctgctctcctctccgtctggaaagctaataacatgctctttgatactatttgatactattccttagatcttaatgacctgaatttttttaattcttttcacgatttttcctctatgtatttcagttcagataatttcagttgtccttatgttcactgattctttgtaactgctgtcaagcccaacaaatgaattatttatttcttacattgtattttttattggtagcattttcatttagttgtgttttttttaatagacttttcatctctgtgtctcatgtgttcatgcatgttgtccaccttttccaccaagtcctttcacacatttaccatggttatcttaacgtctctgtctgatagttccatcatctggttcatctctgagtctgctctgttaccagttcttcatgtgttttacaattttattgtatgccagctattttgtataaaagaacattagagactgaggtaaataaagtttttcctcagaaaatggcacacttaggctgggcaccatggctcaggcctgtaatcctagcactttgggaggccaaggtgggcagatcgcttgagcccagtagttcaagaccagcctgggcaacttgtagaaaccccacctctacaaaaaaaatacaaaaattagccaggcatggtggttggcacctgtagtcctagctacttgggaggctgagtggggaggatcacctgaacctgggaggttgaggctgcagtgaactgtgttcgagccactgcactccagcctgggtgacagagtgagaccctgtcttaaaacaaataaacaaataagaaaatggcacacatttctcctgttgagccacaagagggaggggctgtgtgaacctcatctgtagtttaggggcagcttttattggagtttctttaccaccggctttaaatgtgttcagagtagaattaggactttcccttcagcagagcttgggatcttagccctggcagaattccagggatgtctttatgttttaaagtcgccagcttttggaactgtgggaggcctctggtattcagccctgccgccagactgtggggccactggggtgctctccgctctccagtctcgcccccacttctgtacctcaggaggtttctctgcacctcactccctcgcgcccaaccttccatgaagcccgtgtgagggagttggcagggggcagaggcgggctgtgctggggctccctggagtcctcatctgtcacgccagtccccacacggtcatgaacttccactcatttcccctcacgcagggcatcccgccctgctgcctcgcaccagggtgaaagctgtgggctccttccccaaggaagggctcgtcctgtctgcattttgattaatttaggtccctttgcattgccagctctcagatggctttacctttgattttgttgcttgtttggcttgttttcatctttagggcgagacagtcttttgtaacttttctaccttctgactagaagtggatgccgcctgcattttcttaacacctttttccccagcttattttggaaatcgtcagacctacagagagctgaaagaacagtacagttaacatctgtccacccttcacacagattcaccacttgtgaacattttaatgcattaactttatgtgtctgtctacttatttatgcatttgtatgtgtatacttttttcttttttttcccctaacccatttgagagtaagttgcagccatcataacctggatctcccaaaaacaaagatgtcctcttgtgtgaccacagttgaattgtcctaccttagaaattcatcattgatgtgataatactgactaaggtagacagtccacaggccatccggaaaatctggaaacattgacaaatatgcatgtcattgtcaaggtcatatccaatctgtgaaaaataaatcatctgcatttctagacatctattagtattttaattctccccagctctccccaaaacatcctttttagctgcttttaaaaaattcagcgtccgttgaaagcaccagtgttgcctatgacctgcctttttacctctttttacctagaaagtctcacttcttttttgggagactcttttatgacagtgacattgcgctgtgtccaggccagttcttttataaaatgttctacgatctggattcatgcatgtatttccacttgatgctgagtattttaagataattcaagaatcaggttttcgtacaaaacaatcgcaatgcttcggcactgcacaggccacagaagcctgcggctgcctccggccccgcctgctcccgctcccccaggcctgccctgccctttttcttctctccctgcttctccctcgccctcagcccagcagcgtctcatgggcagtccaggctttcggggccaggttgggcagcagcccctgcagccggtcccactgagtctgccctgccttccagattctggtacaggtcaaagaggtcctctccaagctgagcacgctcgtggaaaccacactcaaagaggtgcgcgttgtggggcagtgcggggagggccagcrggggtgggctctctggctggggaggggccacagagctcaggaactcacggatccacctccctctctccctcacaccccacccctgtgcctttcctcctgaatatcccatttctctcctggcctcttggtcttcgtttgtgttccctgcttgtgtctcttgcatgattcttcttggtctactgtgaactcttacccttcccctcacctctgccccctccccacgtctctctctcggcccstccctctccggtggcctcttttctttcagacagagaagattacagtatgtggggacacccatggccagttctatgacctcctcaacatattcgagctcaacggtttaccctcggagaccaacccctatgtatccttctcagcagagccaccctctccccacctccacccccagccgcagcctcaggtctgcrcagagtgggaggagcccttgccaggaaaagacgtgaccttggaaaggagaggcctggccatgctggggcaccaaggtgtgggtggagctgcaggctggccatgcaccccaggctccaggctcggacaggcctgggccagcacccacctgctgtgtgacctaagctggtagctcagtctctctgggtcttggcttgtcttcgtctgcctcaggatcacatttgaatggcacctggcactggccacacttgggttccatcctggctttgccacttcccagctgtgtgaccgaagcaggttacttcactgcttggtgtcacagtttccccatttgcaaagagggataataatatgtgcaaccttgttactyagcagttactgagaggacaggttaagaacagggcctggcccacacctgatgctatctaagtatttccccgtgttatggtatctgctcgatgaacggccacttgtagggccactaggcctatgcattgttgagtgggagggcccgtgtcccatctcccccatggctccaggcctctctgaggagagctgaaggaggtggactgactagtccccgcacctccccgccactggctttccgggagacaggaggcagggtcctcagtgccatactactgaggctyagcggccaagctctggctggagccacggtgaggaaaggattagaaacccagatcccttgagccctgccaagtcctcactccctgggaggtgctgacaggaggcttgaggccaggcaggagcagcccatctggcccatcttctgccaccacccccaaccccaccgcaccgcacccttcccctccacgcttgccatgttttcctcagcaggacagatatttaatggtgactttgtggaccgaggctccttctctgtagaagtgatcctcacccttttcggcttcaagctcctgtacccagatcactttcacctccttcgaggtgagctgggaagtgacaaggtttggrttcattgtggggtcctgagtggggcactcactctgcaaggataatagttgcagctgtatttattttgtggactcggagatcatgcacagggcgaccttttaagattgagtatgtagtgcactgcacaaaagcatcacaccaaaggacgcgtttacatcatagatagtgtagaaatggatgtttactctgaccatttttcagcagatggcaaacaagggtgtgaggatgggccccttattctratttgcacaagggcatgaaacaggctcctgggtggccctaaatctggcactaaagctgagtgactgagtgaacagaccagggctcgagggtgggagtaaggagactgttgacgaggcagttgtgccccctcagattcaggcttggtgtcagatttgggttctcttgattgaagtagagcccggagctgagtgtgctggttcacacctgtaatcccagcactttggaaggcccaggtaggaggatcacttcagcccaggagtttgagaccagcctgggcaacacagtgagactttgtctccagtaaacattttttaaaaaggccaggcgcagtggctcatgcctgtaatcccagcattttgggaggccaaggcaggtggatcatctgaggtcaagagttcgaaaccagcctgtccaatgtggtgaaaccccgtctctactaaaaatacaaaaattagccgggcatggtggtacacgcctgtaatcccagctgcctgggaggctgaggcaggagaatcgcttgaacccaggaggcacatgttgcaatgagccgagattgcgccactgcactccagcctagtcgatagagtgagactcagtctaaaaaaaaaaaaaaaagccaggcatggtggcaccgtgcacccgtagtcccagcttcttgggtggccaaagtggaaggattgcttgagcccaggagtgtaaggctgcagtgagccatgatcacaccgctgcactccagcgtgggcaacagagcaagaccctgtctctttgaaaaaaaaaaaaaagtaagaaacttgaagtagagcccagagtatttgctggaggaacagacacaggtgtgagacaaagagggaacgaaaggggccctctagggttttggccggagtatctggagggctatggctgccagtgacgaagacgggaacatgtagagcagggtgtggccaggagctgaggagctcccctttggatgtggctgagactcaggagacatgggatgtgggtggggttccaaggggtgttgaaaatgtaggtttcttggtgtccagatgagattagacaagaggagctcactgggatgtgagggccacacaggggaggccctgcccatggcggggccggggtgagttgggaggtgagtgataggctggggcgaagcctgcatgcccgtgtccctgggctcacagggttcacgcagcagtgtccagcacagggtcaaagctcaggaagcccgactgtgggcctcgttgcaggaggcaacaagtgctcaggccgagaagtcagacaagcagagtctgagcagatgcgagactgggcagccttctccttgcccccaagctctggaagggaagaaggaggccgggtgcttgtgtctgagacagaaggatggagctcagggtggggtgggctggggcacatgttctgtagatgggcctactttttggttttgagacggtcttgctttgctctgttgcccaggctggagtgcagtagcatgagcatagctcactgcagcctctgcttcgtgggctcaagtgatcctctggcctcagcctcccaagtagctggcactataggcacgcaccaccatgcccagctaatttttaaaattgttttatagagaggtctcagtatattgcccaggctggtctcaaattgctgggctcaagcagttctgccttggcttcccaaagtgctggaattataggcgtgagccatggtgcytagccatggacctactttttgtcaagattccccccttggtacctccagtctggaaggcaccgcagtggcaagtgcgaggcccatggsggcaagggacgcatgcacagttctgggccttgagggtgccaggctggaggacactgatgtacctggaggctgagctttctcttctgtccccgtgttggccaggcaaccacgagacagacaacatgaaccagatctacggtttcgagggtgaggtgaaggccaagtacacagcccagatgtacgagctctttagcgaggtgttcgagtggctcccgttggcccagtgcatcaacggcaaagtgctggtgaggacggcgygagccctgagtgtgggttccccacccagccacacctgggcagatgtgctggtgaaggaagttggggcctgtgggtgggtggcaccttccctcacagcggsatcccccatctccccagatcatgcacggaggcctgttcagtgaagacggtgtcaccctggatgacatccggaaaattgagcggaatcgacaacccccagattcaggtgagcagcgcggggccaggtgtctccagcagaaaggggcagcctgggctgagctctcccctgcaacccagccctgcctcggaggatgggctttgtgcccttggcaagaaacagcgggtctgagcctcagtttcctcacctgsgacttgggccagtgyamctccttcatggggctgtgatggcaagcacggtcgtgaccatggtgcggggtgaaggcacggtgaccgccgagcacacctgtccttatttatttgtgagttcagctgtggaaccctggaaggaggggaggtcttggggctcctgtgctagtgacgggcacacttcagagagttcacccacaggtgcacacgcacgtgcacactgtgagtgctgcagaggacatggattgggtgggctggtgctgggtgctcaggaaggcctctccagggaggcgaggtttgagctgacactgcgggaagcagaggcatctgccgtgcacagagcctggcgagcatattccaggcttgaggaggggtcctaaggcagggagaagttggcgagtgggcagggytgtgctttgagggctgacattggacatggggttcactgggcccaaatcctatggcgctttacaggccccagtgaggaactttgttcctagggcagtgcggagccaccaaaggctttgagtgggagaggggcctgatctgaatagtgacattgaaagctctatctggcttcggggccacaggggattgaatggggtctggagggcagatcagcagagagggtgggggtggctcagaatcacagtcacctgtcctgaatgtccatgtccatgctggatgtcccctgcccaacacccacccaggmtgggctgtggggtcagcacctggccgggccaggaggtggcctgtgagtgaccacccccggggaggtggacgagtccctaatgtttccctcgctccccaccagggcccatgtgtgacctgctctggtcagatccacagccacaggtgagtctagggtggggtgcagggccggcgggtgtgggctgtggcagcaggtggaggcagacagtcaccctgaacccctgtctctcccttctgcccaccctcagaacgggcgctcgatcagcaagcggggcgtgagctgtcagtttgggcctgacgtcaccaaggccttcttggaagagaacaacctggactatatcatccgcagccacgaagtcaaggccgagggctacgaggtggctcacggaggccgctgtgtcaccgtcttctctgcccccaactactggtatgtctttgcctttccagcccagggcctctaccaagccacgggtttttgtcttggtttttgttttgcctttttatgatggaacatttcaaagacaggcaagagcagataaaagaacatgaygaacacscccgtatgtgtcacccacccatgcagcaccagtggggccagcctgtgagygctgaccagctgccctgtgttacagcaagcccctggcacttcacctttctcccactgattgcccagcacttttcagaaggaaagggatctttttcttaaccacaatatcgtgtttacacttttgagtgctggctgggcatggtggctcacgcctataatcccagcactttgggaggccgaggtgggcggatcacctgaggtcaggagtttgagaccagcctggccaacatggtgaaaccccatctctactaaaaatacaaaaattagcagggcgtggtggcacacacccgtaatcccagctactcaggaggctgagtcaggagaattgttcgaacccgggaggtagaggttgcagtgagctgagattgcaccactgcactccagcctggggaagagtaagactccatctcaaaacacacgcacacgggcaagagtaagactccatctcaaaacacacacacacacacacacacacacacacacacacacacacacacacacacacacacacacacacacacacacacacacacacacacacacacacacagtgttgatcccttgcccccacccgaatcctgccaagttctctttctcctggtctctcctaagtgtcttttccagctgacttcttccagacaggacctaaacaaggaccacattttcagtctctttgcctgtgagttccctgtctctccccacccgcatcatttatttgttgaagaataggttgctgcctgctgtacgagtcacctgtgtcctggactaggctgactgcatccccgtggtgccgtgtgacatgttcctctgttccctgcatctctgggtgggcaaagctagaagcgtggtcagattcctagtggggtctggcgagcatccacctccatgagctatgccctgccccttcctgctcctgcttcctgcactcccaccctcttttccccatccccatcctcctgcccctcccattctttcccctggattcgtctttcccatctctgtctctctgtccatctgtgtctgttgtggctctgtccctccctctccctctgtcccttcttgcccagccmttycttctcttaacccaccagccccacccagccctgaccacactgtccactctgctcctgtccctgcagcgaccagatggggaacaaagcctcctacatccacctccagggctctgacctacggcctcagttccaccagttcacagcagtggtgagtcacccctcagggcccctgccccttccatcccggcctggggacaaggaggctgagaccctggtaaggggcrggggtaggttctgccggtgggtgctcaggggctctgttctgacttctgtccatcccacctgccctggtcccacagcctcatcccaacgtcaagcccatggcctatgccaacacgctgctgcagctrggaatgatgtgaggtgacgggcggggcggcctgcatcccagggcccctccaatcccaccggacccaggccctgggctaggggcagagcaggccccgccccagggcaatgttggacccccttttactttgtaaagtttgtatttattcccctttaggtttgcagagggggtaggggcagagtcaggggctggccagagggtctgctccctggacagagargaaggaggtggagcagctggggctgggggcacagcctgggcattctgtggggaggccgtcctcggggtggggtggggccgagtggctgccctgcccccctcatttgcatggctcctcccccactcaagcaatagggccccgccataggaagacccccagagagagggtcagcaggggggccccgcctgcgcctcccctcctatagccccatggtggggctaggctggggctcacccccctccccagctattttatgtctgtaattaaatatgttaaaataaagtcattatcggaagtcagcttgtctctggatggtggagccgaaggagctgcccgggttgggttacgcctgmtcaggagatccggagggtggggaggccgcaaagtcccgctggccgggcccacccagctctgggctgaccgcccaagtggcctctgcctctgcccagcaccgtgggctcctggggagagttctgccccctgggtggggcgatgaggccagcactgagtggagcggagcggaagctgaggcatagcctcatcctttgctggctccagcaacaagcatgacagtgccgctccctgctccctgctcagggtaggcccagcagtggttcttgacatcacacgatgaggcgcgcatctcccgtcatccagggagaccagaggacccttgtctcactcccagttggctcttagtcacaggtaacgttggattccattcaggctgccctgccaggccttgaccctccagagagattgtgttttcaagtttgagctcctctggactcagctttctccagtggtatgtggcactgggggatggtctacagcaaatgactcctgcagggccgagtccgggagtgtttggccctttggagacctcccaggcagacatgaggcgtccgcggtcctgattgcgcgtaggcgctggggaggtgttctctaaggcccatcagccttacagtaagtgcaycgccttctggggtcaggtgcgccacggtccagaagccaagtacacatggcttcaggaaaacaggcacgaggcccaggttgccagtgccattcatttctcctgggaaagacaaaaacagccaccatgactgtcgggagggtgcttcagacctgatgggagtcagccaggcgggcagctgtgaggctctcagactcactgggtgtcggggttccctgccgctgcagttcaggaggtctcccaggacccggtatggtcattatcctcacagtgagggcctattatagcaagaatatggggatgagaatgagaggagggaagaggcaggcgcaagcgtcccactgccctctcccgtggagctgtgtggacagcgcttattttccccgcatggatgcgacagcgtgctggagtgtggccacctagggaagctcacccgggcctctgcatccaaggttttcttcaggggttggtcatggggactgctcaccccgcgtggctgaccgtagcctccagagagacccacggcccccaccctaaatcacatccttagcatagactgtccactgtggcccagggccccagataaagagacgctcctatgaggtaggacacaccgagggctctccggtgacctcccaggagccagccttttcttccgtcagggctgcagccatgctgcacagctgcataacaaacaccctaacccccccccaccccctcagcttcaacaacgaatgccttgctgtcttcctcagttctgtgattggctgggcttggccgtgcagggcgcacctgagggctgaggcatttgtggtcgggggcatttggggctggaggcatctgaagactcgcccggctggactccgtgggggctcactcccgtgacggcagttgctgtgggctgttagctgggctggcactggaacgcctgcgtgtggcttccatgtggcctgagcttctctcaccgtggcagctgggtccctcaagggagcattaaatgtttatatttaagtcaaccaactgcattccagctgtagctcttgcctcagcaatgtcctgccacacattcaattgtctctttcatttccttcaatctggaacatttcctcagccccgctttgtctttgacatggacgtttgtgatgatcacgttcctcccgctccccgtgtctgaagagtgctccctgactggctgccgtctcctccctgtcgggtctggctgggttctccagagggagtgctgcggaggggacacagcagaggccccatgctcgtgatgtatgttgcagatcattttcccccattctgtccttttttgttaaattgtggtaaaaagcacataacataaactgtaccaccttaaccatttgaaagtatatatcccagactgtcttttatctttagacttcacttgtggtttgttgccacagtacaagtttatttttatgaagccaaatgtatcagtatttctttaattgtgctggcgtgggagtcagtacttctccctacacccgggtttcagggaagttccctcgggtttcttctggtttttgtacagttttcttctttatgtcaagatctccagtctatttggagttccttcttgtatgtgatgtgaggaatggatctaattttatctttttccaagtggatattggaggaagtttttaaacgagaagagaaattcagaagatgctgcaagagatgggacctttacggcgatcaatgtctcagtaaagtcagaacaaagagactcaggcacacccaccacaagtaccaaaactttgagcagatcaacgccacagagctgggctcgggaaaacggaagggccatgggagggagggaaagcatttaatgggggaaggtctgggtaagccgataagttttggggaatcaagggggataaatacacgtgagtagggctctgaagttagaggcaatgaattgaccaaaaagaaacagtaacttccaaaagggagtgtgacggagagatgcccatagacgcaggtgatgaacatccagggctggccgggcacgggggctcacgcctgtgatcccagcacttggggaggccgagtcatgtggatcgcttgagcacaggagtctgctaaaataggggacaccactctagttacagtttggatcagggtcatcacgctggggacgtgccaggcacacggaggtgggggagatgctgggggctgggggcaggtgtggacactaagcaatggtgtcagaggctgctggggagtctcagggtctggcaggagcagatgtggactcccaggagtcatggacatgaattaggggtcctaagaagcctcgccactgacaaaggaagctgtgaagggaagaccagagaaccggggggagcgggggtcttaggtgctccccaccccatcgaccaggatggacccaggcatctgcccagctggatggaacagagactccaaggcaggaaggacccgagttctgtctccctgtcgttctcttggaccctttcacgctgtctttccccacccccatctgtcaatggccatgattagatcacagacccaagctctggccaccagggaaggcagaaagatgacctaacctccatagcaccgggtggggcccctgcctcccacctgtggggggtgtcagttgcttggcagccagagggacagaggccaccacccctcccctcccggccagcaccacagatggagaaactgggcccatggttccctctgcccacaccctcccatggctctcatctccgtggtccagcggatggggggaaacaggttgaggaatttggacactggaaaatgggtggaagcagttaaaacctgaggggaccaggaggggcagggtgggcacccatctcagatgagtcgaagagcagcagggtgattttccatgcccggccccttggctctgttctaagagtttacacgcattaacatttcattctaactcagtgagtcagacacttttcagatgcccattttacagataagcaagataagaagtacagagaggttaagttacatgctcagagtcacacagccagcaaatggcagaacgggacttgagcaccagctgactggctgcagagtctgtgccctgagccagtttgcagtagcattgagcactttatgtgtcaggcagtttacaggcactttgggtcctcgcaacagccccattttacagatgaggaaactgaggcacagaagcagcaatatacctgaggacacacaactaggaaggaggatagagcatattcggtgggagataataaaacctttgatgccaaatgctaaaataatatttggggaaaagcttttgaccccttttagcaaacaaaaattttatgatggcaagaatttatcctgctggttaatctgatttttccctttttagtacatgggtgttccctaaccttacccctgaagagaaaactcacgacttcccccagagctgtgcattctcaaagctttttttttttttttttttttttttttcctgagatggagtcttgctctgtcgcccaggttggagtgcagtggcgcaatctcgctcactgaagcctccccctcctgggttcaagcctcgtaagtagctgggattacaggcgtgtgccaccacgcccagctaatttttgtatttttagtagagacggggtttccccatgttagtcaggctggtctcgaactcctgacctcaagtgatctgcccgcctcggctgcccaaagtgctgggattacaggtgtgagccactgcgcccggcctcaagcatttttgttagcggtctttttaagatttctccaccgggtgtggtggctcacgcctgtaatctcagcattttgggaggccgcggcgggcagatcacgaggtcaggagtgtaacaccagcctggccaacatggtgaaaccccgtctccactaaaaatacaaaaaaattagctgggcatggtggcacgtgcctgtaatcccagctactcaggaggctgaggcaggagaattgcttgaaccaggacccaggaggcggaggttgcagtgagccgagatggcgccactgtattccagcctgggctacagtgcgggactccgtctcaaaaaaaaaaaaaaaaaaaaaaaaaaaaatttctcttgtaactgttctgtgactgtccactgtatggcgctagggggcgctgtaacaccacggtgttttatagtcattacaacactcttccagcagatggcggcaaagtgttggggaaagagggtgcctttttgccaatccccatatatttttctaattttctttgtatggtatgcaaacatttccaatgctcaaaatttggtctcagctaccattctaactatttgaggcttacgcttctctgtttcccctccaatctgggccgaagtcttcctgtcagtgaaacagggatgtttaaaggagtttttttggggcccctttcccagagctgtcctgatggcccatttggggcagtttctctctttttggagcgtggagctgctcttaaggccctgcctgctggattctcaaatagcatggtggacactcccctccagacctcctctgtgggcccagcctcccctctcttagccccttggagttcctgccccttttgggccccaaagtcctgtctctaactcaaagacagttagttatctgtgttaaaataaaataacatgggccgggcgtggtggctcacgcctgtaatcccagcactttgggaggccgaggtgggcggatgacctgaggtcaggagttcgagaccagcctggccaacatggtgagacccgatctctactaaaattgtcaaagaacaaattaaggtgtggtggcgggtgcctgtaatctcagttactcgggaggctgaagcaggagaattgcttgaacccgggaggtggaggttgcagtgatcggagatcgtgccagcctgggtgacagagcaagactccatctcaaaaaataaataattttttaaaaatggagaccaggactgagaattccccaaagcagacaaaagcagttaggccatgtaaacacaacttaatctagtttgacttctgaatgtgagtgaaacttagcttattccctgtaaataaatgctgctgagaatcataaacaaagctgaaatcgccttccaaaaggatgtaagacaatcacttttaaccgatcccttgtcatatggaagcccccaccatcatagtcggtcatcgtgaaggtgaagccacctcctggtttttgcttttttttttttttttttttttttgagatggagtctcgctctgtcgcccaggttggagtgcagtggtgcgatcttggctcactgcaagctccgcctcccgggttcacgccattctcctgcctcagcctcccgagtagctgggactacaggtgcccgccaccacgcctgactaatgttttgtatttttagtagagacaaggtttcactgtgttacccaggatggtctcgatctcctgacctcatgatccacccgccttggtctcccaaagtgctaggattacaggcgtgagccaccgcgcctggccttttttttttttttttttttttttttgagatggagtctcactcttgtcgcccaggctggagtgcagt

SEQ ID NO: 94926 - DNA, 95808 bp, Homo sapiens
  misc_feature (1)...(95808): n = A,T,C or G
gttcttgagcactcagactccttcccagtctctcctgcaattgggttagggccatgtaactgggtttgggccagcagaatataagtcaccacgaagcctgacccttaaaaacacccagtgcggccctcctgccctgtcttcccttttggtagtgactgtggtggccacgttgagctggcagaatcccaggatgaaaacagcaggatgcccaagtcatcacatggaagaccgctctggagagtagcctgataccacataaactaagctaatgaggtttcaggcattacttgttactacagcaaagcctaccttatcctggaatattagtggaaaaagaatgtccataaatgaaataggaaataatgtaagacacaatactatgtacgaaaagagtcaggagtgatgtggaagatgggagtgggcaagagtcagtttgggctcatgtgctgggacagactttatggagaagaggggaagagataatttgaatgagtagaatttgagttgtaaaaaaggtggtgggaagactatgagtctcagcaaagtgggaatgagcaggaaatataagtgagggaaaatgaagacagagtcaatatgagaaagttaacaccgtaacagtgtggtggcatgcctgtagtccaagctacttgagaggctgaggtgggaggattgcttgagtctgggagatggaggttgcattgcgccactacacttccacctgggttacagagaaagatcctgtctgaaaaagaaaaaagaatgaacgcacgagagaaagaaaaagaaagaaagaaggaaataaagaaagaaacagagagagaaagagaaagagagagagaggaaggaaggaaggaaggaaagaaggaagaaaagaaagttaatactagctggggagtggcaaaatgaggcctgttagattattaaattgtccaataagtggaacatgctaataaaattgtgaggcttcttcaaagcaaacagtgtggagcacaacagatagccatacaatggtgatcacttcctggttcttagcaagttttggcctgtgcactgggcatggtatcactgaattttcacagaaaacctatgaagtctatgatcctcattttacagatgaagaaactgaagcttagagaggtgaagcatcttgaaaatgcattagtcagaattctcctgaaaaacaggaccaataggatgtgagaaggttttatttgaagaaattggctcacacgattgtgggggcttgatgagtccaaaatctgatggggtaggccagcaggctggagacccagggaagaggtgcatctgctggcagaatccattcttgctcagggaaggtcagtctcaggggctgtagtgctgcagtgtccactttcaggtggtgcctgcacatcatgcagaaccacctgtaaaccagccctgagctttctcttctctacattaaacccaagtaggcctggcatttctcactcactcactgtggtctaccttttggtccatgtttcagtcaaccaacccatcagttatagcactaactccctgagttgcaacattaaatgcagaaatcttgctcaatcggcccctatcaatatattcagcctgattcaattttatgtttcttccatctttatcccacacctttaatttccattctcacacatattccctgaatttctgactaaataagaaaactcaagtagttcttttggagtgtagtatgcctcatggatcacatttcatgcctcaccttttgggactgctaggacttgagtctagttaaagttctagaagccaagaggggtaatgggggtgtgtcctgaggagaatcagcattgtcttgcgagacaactgtatcaggggaggtcatgatagattccttaagcaatgaaaggttagttccctcaggtgggggtggagaggatatatctactggggtggagaaaatgcttctacgggcaaagatgactcattggaacttatgaattcaatgtccccagtgccatcaaggtctttccatatgcccccattccaactttcaggatccaattcgttcccaatcaatgccctcactttagaagtagacaacctgcaaagtcaaaaattcaatctgcactttaattcagccacttacaggatgtgattcggagttgatttttaacaatcttggctctgcagctataggagataagggtctctttcagggcagaaatagaaagtttcaggtcacttatgttatacttgagctgggaatttgaatccctgagctcatccttttcttttcccactttgtccagcaacattaggggcaaccaatctcattatacttgttattttggcaaatatgttataaagtatcatacgcatggtcacccagatcttgcttctttttagttttggtaatattttgtgtaattctactacttcatcatgccatagactatcaagtgttttatttactactggaaagtcattcctgtttttaatctaatcagactagagaaccacttccagaaacctcagaaccaattacaaaaatgcatccctaagattccgttccgcttgaaccacttctagtaccagaatctgtagctgtcagcgttctctagagacatggaatcaacatgtgggcatatacaaagacatttattataaggatttggctcacgtaactatacagactggctaatccaaatctgcagtgtaggccagcagattcaggactcaggaggcagattacatctcaaggcagttggctagagaattccctcttgcttgggggccagactttttgttctattcaggccttcaactgatgaaatgaggtccactcacattatggagggcaatctgctttactctactgattaaaaatgtttatctcaacccaaaatggccacaattactgttttaaatacatcaggttattcacaatgaattttgtaaggataaagaaggaaaggaatcacttggtagaaggaccaatagtaggcaaaaaaaaactgagaatttttttctatgataattacaatgttaatggggcttaaaaatgaattgatgaatatttaaaaacatcctagtttccacatattatatatttttcatattgtttttcacattaatgtaatccagatactagctgtggccttcctctctccctttgagatctgggcaaaaatgtttcaaaacctctgggttctctgcctgtataagtccaaagtctggttcagtatttctgctaatttattttctttttttttttttttttttttagatagcttctcgctctgtcacccaggctgtagcacagtggtgcaatcatagctcactgcagccttaaactcttgggctcaagtgatcctcctgtcttagtctccccatttgctaggattacagatgtgaaccaccacacctggcctccctgctaatttccaacactaataaattctcacctcttctgcttctagaggtctgctatgttgcccaccccgtggtggttccaaaccacagtgaccccaactggagactttttatttgatttctacaagaaaaacccataccaagcctgagtctgacaggctttactggacacattgggccagggaaagtgtcacaatacttagtccatatcctcctgccgcctttcaagtttcttctctcttttacccactccttctctgagtgccaaaactccaattttagtacttctatgcaaaccaatttcaccacccaggtgaattagcttgcactccccaaattttgttactggactctttcctttgtaagggataagaatttagcccaagccagcttagggcaaaaggaaacttttggctgggagtggtggctcacacctggaatcccagcactttgggaggccaaggcgggcggatcacaaggtcaagagattgagaccatcctggccaacatggtaaaaccccatctctactaaaaatacaaaaattagccgggcgtggtggcgcacattggtagtcccggctacttgggaggctgaggcaggagaatcgcttgaacctgggaggtggaggttgcagtgaaccgagatggtgccactgcactccagcctggcaacagagtgagactctgtcttaaaaaaaaaaaaaaaaaaaaatttggctcacagaatcaaaggacagacttaatcaaactgcaggaagagagggatttaactggaaccagggaattaaccctgcttctctcattgcctactggcaacaagtcccaattcttatcttttagcgttcacgcactggaaagatgcagtcttaaatttcttatggttcaaagctcaaaaatgctggtaaggctgggtgcagtggctcacacctgtaatcccagcactctggaaggccgaggtgggcagatcacctgaggttaggagttcgagaccagcctggccaacatggtgaaaccctgtctcaactaaaaacacaaaaatcagcggggtgtcatggcaggcgcctctaatcccagctactcgggaggctgaggcaggagaatcgcttgaacccgggaggtggaggttgcagtgagcctggatcttgccactgcactccagcctggrtgactgagactccgtctgaaaaaacaaaaacaaaacaataaaccctcccaacccgccaaaatgctggttaaggattctaaatggctcaacttggccagctgtctatccctgaactgcctatggtgtacatgttcctataacagcacctcccagggaaaccagaggggctgcttccaggtaaaaggaggaatttcaccatagacataatactttggaatagttttggctatccttaagtaaaacacgggatgactatttctctaatttccacactagtagtttaaacaaagtagtcatcagaccacagaggagggggcaataaatactgcctgtgaggtaactcggcgaaatactttcacagaggcctcatgaggtgagcatttagcatcgtgtgtgatgtgtgtcaaaccaagaggggattcagggagacttccaggcttgagcaaacggacaaatatacctcctcttccagacctctcctttcatatggaaaaaattcgtttgggaccaccagaaaacaaaagataaaagtatcgtgttagaacaaggacggattaaaaatgacctttgcttgaactgaaacagaagctatgtgcataagtgacttaactcctctgtaacttggctttcttatcatttacacgagggtgctaacagtaccctcacaaggttcaagtgaagattacataggacaatcccttagtcaatgtcttggtacactgtaaaggctcagtaaatgctggaaaatcatattagcaactattttatacccgtaattgtagctggaagattgtattggatgctaaataccggctagattccattcggtaactatcataattatttatttgcataacaatcaaattattggtgcaaagcagccattattactgtaaaatgctttaaaatgctccttttgatagtccaggtacgtactgcagcacaaaactaggagaaaccaggaaatggaagtaacgagtaagtttggatgcttcgattctaccctagattgagacgggtgagcatagaggcaaaaaaagacattttcttccaaacaagaggtgaccaaacgggcaagggagacctcctcccgggcatgcagagcgcagcgattctgtgcccagggagccggagggctggggctgggagatcccggcggagccccggcagagcagtcgcccgtgagcccccgcaactcagacgcgctcggcctcgcgctccggggctgggaccaccgagggcgagctgcagccttcgccacccggtccgccgccggactccgcctcccacaaacagcccggcaaggcccttttccgccgctccctcatccagcgaagcctccttcccagcttccccggcggcggcgccgtgacgtcacttccgttctccagcgcgcacgtgggaggaagtgctggtgccctctgccgctgctcccgtctctttggttacgctcgtcagccggtcggccgccgcctccagccgtgtgccgctatgggagtcccggcgttcttccgctggctcagccgcaagtacccgtccatcatagtcaactgcgtggaagagaaggtgaggaggcgccaggcggccgccacactcgagcccgggcccccggcacgtctaggccgcggcccatgggctccgccgcctgcccccggggagccttgccggagctcgcgccctgctgccagccycgcgagcagtcgcagccccacacgcgatgggacgcgggctgtgggattcagcaccccgggggcgaggaattcaggaccctcggcggggcaagggcctatagggttccgaactcgcaggagggtcgctcctcccctactcgctttttcccggcaccggaaggccccgcccactgctttgtttcctctccagaccgcgcattttgggtctcggaagaggttcagaggctgttgttgagcaatgcatgccaggtcagctgagctagcgggttatggatgcacggattcggaggccagctttttgacaaccttgtaaaggaatccctggcggcgaccttttcgttgtttaccaattgtgccggaaaggttttctcctagtgttcaggaccatttgttgttctggttagattggacgctgaaagcagtatgtcaggtccaggatgagcgctatagaattctgagaagttacccttctctgtgtgccctgactactgaacggggtgggtgcttgttgaaaatttcaagattactggatgtacttgagcagtacaatttttgttgttagttaatacgtaagtagatttttggccattattgagttttgtttttattgttttcgtcattccatgcggattcgattttgtgctcttaattagaatttctggattggaaacgttcagaggcacatcacgcgtacctcactccttagtttttgaaggcagtgcttgcctgtcactgtgaacttatttctgcttttttttttttttttaactttcttggcttctatccaaggaggaaccaaaagccttgtcttagtgacattcccactatttcttgtttttttcaaaaagcaactgctaaattgaatacttgtttcctttgtaaaattttaatcgaactttattgaactttacttgcacgtgggttaaacaaaaagcaacagttcttgctctaccccttctcatcccatttctccacctttaactgttttggttctgtctctaagtatcatacttatacgttatcacttttagatctgttgaattctagctggaataggagaggatttagtcacctattcagccctccctctatactcttaatggagtaaatcactagatatatatttttattggtaagctttataactaagtaatttgcctttttcattccatcgcctgtgtaacgtatcccttgactcaatgctttctaaggtcgatcttagcttttcttccctttcacctcaagtttgtcagctgtacttttgcgttgtgggcatccaaaattaaatgatcagggctttgactatacagatttaaaatgctgaaaaatcagataggatagttgactattgacactgtgtagattcaggttatgtactgtgattttgttttttgtgctgcttttgtctttttccctggggctgtctttctttttccactttacatcttgccgcgcccggactctattttaccaggtagtctatcaagagtcatctttcttcttgaatagtccttcttggggtcttatttatttttgttgctgtcacacctggctattctgtaggcttgctggaaagctgcatctgggattttattattattattgctatcatatctttcttcagtgggaggtactgttttctggatcatcatcttacttcatttgtttatttatttagagacggagtctcgctatgtctcttaggctggagtacggtggcatgatctcggctcactgcaacctctggcctcctgggttcaagccattcttctgccacagcgtccagagcagctaggactacaggtgtgcgccgccacgcccagctgatttttttttagtagagacggagttttgccaygttggccaggctggtctcgaactcctgacctcaagtatctgcctgcctcgtcttttaatttttggatagtattctgtgtgtagatacaccacattttatttatttattcagatgattgatgaacattgggattgtttccagtttttggctttctgaaaaagaaacctatgaacatctctgtacaagtcattgtagggacgtatgcttgcatttgtttgggggaaaaacattaggagtgaaatggttggattgtatattaggtgtgtgattacttaaaaagaaaaacctgccagactttttttttcaaactggttgtgccattttacattggcatcagcagcatatcagggttccagttgctcaacttcctcaccaacacttgatatagttagcccttttagttttaggtagtccagtgtactgttaccttattgtggttttaacttgcatttccttcagatgcttatttgctttctgtatatcatcacgggcagggtgaggcrtctgttcagatcttttgctcatttttatcttcrgttgtcttacttaaatgtagagtttgttacatattctagatagaaatccttagtttgatatatcttttgcaaatattttctcttgatctgtggcttgtctttttacttcttaacagtgtcttgggagcaaacatttaaaaattttaatgaagtctgattaattttttccctttatatttctgctttttgtatttaaggaatcctttgtcaaagccaaggtctcctgtgttttcttagagaagttttatagttttacttcattctgtggtttccattttttggtctagtcrtatggtgaattatcggtctttaaatgctaaagccaccttgcattccttggataaacctcacttgatcatgttgtattatttttatatacgttgaattcaagtttgctaaagtttgctaaagttttcttgagaattcttgagaattgtgtctctgttcacaaaagatatttgtagcattcttgtaatgtgtagttgagatgtcagaataatgttgacctcaaattgagttccttcagttttttggaagagtttgtgtagagttagtattgtttcttcctaaaatgtttgatagaatttaccagtgaggccatctggacttggagttttgtgggaaggctttaagctgcaaattaagtttctttagttgatctagaactattgaggttacctatttatttatttatttattttttggatgagcttttttagtttgtatctttcacagattttgcccatttcatctaagtcaagcttgtccaacctgtggcctgcaagctgcatgcaacccaggatgctttgaatgcggcccagcacaaattcgtaaactttcttaaaacatcatgagatttatgcacagaccttttctttttttttcagctcatcagctgtcgttagtattagtggcccaagacaattcttcttccaaagtggcccagggaagccaaaagattggacacccctgatctaagtagttgaattggctgacataaagttgttcatagtattttcttactatccttttttttttgttattaaaatgttttcactcctgtttttacttctcttttgttttcttttttcttcctgttaacttgttattatccttttaatattgttagaatctgtagtgatgttacctctttcattcctgatacttgtaattctactttctttgttttgtcccattatcagtctggctacactgttctcagataactagcttttggtttcattgattttctttattgtttttctgttttctatttctttgattctgctcttatatgtatttgttatgcttactttgggttyaacttgttttttctcttccttgtttattaaggtagaagctgaggtcattgttttgagacatttcttcctctctgatatagatcttgagtgccataaattgccttctagatattgtttaaacagtgtgccacaaatattaacatgttgtattttcattttcatccacttaaaaatatgttctaaaactccctttggcccgctggttatttaagagtgtgacttaattttcacacacatgggagattttccaggtattttttcctgttcgtgatttttaatttaattcccttatcagagatcatatttaatttgaggtctgttgaagtttatcagactggttcagaatatggtctctataaatgttttatgtgtatttgaaaaggatacattttctgctgctgtgaaattttgactataacttttggatttttctgtttctcctttcagttctattggtttttggttgtgtattttgaagctcttttattaggtgcataaatgcttaacattgttctagttttttggtggataatacacttattatgaaatgaccttcattattcttggttaatatttgctcagaaatctattttatttgtcattaatacagccagttattctgactagtgtcagcatggtgtgtttttttctattcttttattttagcctgtttgcatctttatgtttaaagtggacgtttttgtaggtaacataacaattgggtctggcttttttttatttttattttttattttttattttttttgagatggagtcttgctgtgtcrcccaggctggagtgtagtggcgcgatctcggctcactgcaagctccgccacccggtttcatgccattctcctgtctcagccttccgagtagctgggactacaggcgcctgccaccacgcccggcaaatttttttgtttttttttagtagagatggggtttcattcactgtgttagccaggatggtcttgatctcctgacctcgtgatctgcccgcctcygcctcccagagtgctgggattacaggcgtgagccactgcgcctgtccgggtctggcttttttatacagtttgagaatctctgccccctctttttattgggataaaacatacataaaattaccattttgactgttttaaagtgtacaattcaatggaaccaagtatgttcaaattgttgtgcaactgtcaccaatgtttatttccagaacaattttatcatcccaaacagaaacgctacctgttaaacagtaactccttgtccccctccccactttctatctttataaatttgcctattctagttaccttatgtaaatgaaatcataatatttttccttttgtgtctggcttatttctcttaacatagtgttttcaaggtttgtccatgttgttgcatgtctcagaatttcattcctttttaaagctgaatgatactcccattgtatatgggagtatatgtcacactctggacactttggctggttctacctttagtctattatgaataacactgctatgcacattggtgtacaagtatcttttttagtccctgctttcagttcttttgagtatgtacctgtgagtgcaatcattggatcatgtaattctgtgtttagcattttgaggaaccaccaaactgtttttctagtctgctttgtaattgggccatttagaacatttatatttaaaatgattattgatggccaggcatgttggctcacgcctgcaatcccagcactttgggaggccaaggaagatggatcatttgaggccaggagttcgagagcagcctggacaacatggtgaaacctcgtctctactaaaaaagtaacaaaaaaaaattagctgggcatagtggtacaacacctataaacccagctactcaggaggctgaggcacaaaatcacttgatcctgggatactgagattgtagtgagctgagattgttccactgcactccagcctgggcgacagagcgagcctctgtctcaaaagacaaaaaaagattattgatatggttagatttaaatctgtcatcttactatttgttttctgtctcatctgttcattgtttcagtttcttaagtcttatgccttcttttaggttgtgtttttttttgtctttttgagaggagtttcactgtgttgcccaggctggagtgcagtggcgcgatctcagctcactgcaagctctgcctcccaggctcacgccattctcctgcctcagcctcccgagtagctgggactacaggcgcctgccaccatgcccagctaagtttttgtatttatttatttttttttagtagagacagggtttcaccgtgttagccaggatggtctctatctcctgacttcctggaattacaggtgtgagccaccgtgcccggccttaggttgtgtttttatgatttcattttattccctttgctcacttattaagaactctttactgattcagtcatcagcttcttcacttcatatactttaactgcttggctcatgcagtcctccatttatcagctttctgaccatcggaaaatgacttaaatgcctaaactctagagagccagagcttcttgttaaaaccaaaccscaagattttttttttttttttttttttgaagacagagtcttgctctgttgcccaggctggagtgcagtggtgcaatctctgctcactgcaacctctgcctcctgggttcaagccattcttcctcagcctcccaaataactgggacaaccagtgtgcaccatgacgcctggctaatttttgtatttttagtagaggtttcaccacgttggctaagctggtcttgaactcctgacctcaggcgatccgcctgcctcagcctcccaaagtgctgggattagaggcgtgagccaccatgcctgggccctagataaattaaataacacagttcaattgagcaatgaacagtttgccagttgagtggccctcagaaccagaagaggtttggggagctcttgaaaacagaagtgaggtacagaaacagcttaatcttttggcttatttaaacatggccagataagttggcaacctgtgattgactgaagctcgactgctgcgattggcggagactctgctttttgttacagaagtatgctcctaagttaggcttttccttagtggactttatgtaagtaatattgcagttcttcaagtgaagaatcagtaaggagccatcctcaggccaaatttggtgtaagttaacacactaygctacactgtgctgctccctacagtttccccctctggtcatctctgtgcaagggctgaaagcagaaggctgcgtgtcctcatttgttgccagctgggaatgtgtatgttgggtgactcaatttttcgctgctctgtgcatgtccacaaatgactgcgaaagtaccatgattattaattttggggttaaaaataaatttcagtgagtagacatatttgcaaatatgggattcatgaataatgaagattggctatgtatgtatcacagagggtggttgtgtggattagatgtattaataccagttacaatcctgttacagaagcatttgctaaatggcaactatttggaaaatctgatttcagaattttatttggtaaattaatgtttagtagtttatgtgtccaagtaaaggcagagatgtttttgagtctaactcttggtaatactgcgttgtagtgtacagtgtggtcttactgttctcatgtaatgaaatccaggtttcctccactgcctcttttctctcttccatttcattgagtactacttttgtgataggcatcactctgagggaagggagaaaaatcataaggtggacatttatccttgaccctacattctattttctctaatatgattatttctttggagctggttaccacattctttaaacagctttgttgagatatgatttgcatacaataaaattcacccatttaaagtgtacaactcagtgatttttagtattttcacaaatgtgtgcatccatcaccacagtcaattttagaacattttaatcaccttgaaaagaaacttgtaccctttagctgttgtccctctaactgctgtctccttttctcccagccttaagcaaccactaatctactttatgtctatatagatttttcctagtctggactttcacatgagaggaatctatagaatatggtcgtttctggctggctgctttcacttaatattatgttttcaaagttcacccatgttgtagcatgtcgcagtactttattatttgcytatggccaaatactgtgccattgtatggatataccacattttgttcatccatttgtctgttgataaacatttgaacagtttctatgttttggctattatgaataatgctgttttaaacattcatgttatgtttctatgtggatatgttttcgtttttcttgggtgtatacctaggcgtagagttgctggattatatggtttaatcatttgaagaactgccagccactttcccaggttctcgctctgttgcccaggctggagtgcaatggcatgatcatagctcactgcagccttgaactcctgggttcaagcgattctcctgcctcagtctcctgaatagctaggactataggcatgtgccactatgcttggctaactttttttttttttaagagatggggtttctctgtgttgcctactggtcttgaactcctagccccaagtgattgcactattttatattcccaccagtagtgtatgagggttccaatttttccacatttttgctgtgaagcaggtttactgtgtgttgcttaccaacttgtctgagtctgaggagacaaggacatccatgtacaatgttacatgaagagkgtttattatttacaaatagacagtaaaggacaacagaagcctaggattcattctgaatgggtcccccatggctcaggaaacatgcccggggcagatagagtcttgactgcaggggccacacttacatggcgggagaggaaccctgaaaggcagcccactctgggttatacacctcagggtttatgtgacacactgagctaatgctttaaaaaatgtcctgcttccaggggtgaaaggaacaaagcccaccttgtcccgggcagttgcgccctcactcaagatgttaaattcctgggagggacaggagcaaggctggacattttcaggcagttcttccctatttcaggatattgcattaccatcacattctacagtcacttttgagaactatgagcaagaaaaggaactgagttagtccaaggccagccaaagaactatgccacacttgccaacacttgttatctgacttggctttagccattctagtgggtgtgtgacgtggtatctcctgtggttttgatttgcattttctgatgactagtcgtgttgagcatcttttcatgtgcttactggccatctgtgtatcttttggagaaatgtctatttaggttctttgtctcctcttcccccttttttttgagacagggtttcactcttgttacccgggctggagggcagtggcacaatctcagctcactgcaacctccatctcccagggtcacgttatcctcccacctcagcctcctgagtagctgggactacaggcaggcaccaccatgcctggctaactttttgtattttgggttgagacagggttttgccatattgcccaggctggtctcgaatcaactcctgagctcagatgatccacctccctcagcctcccaaagtgttgggattacaggcgtgagccatcatacccggcctctttgcccttttaaaattgggttgtcctattgaagtgtaagagttttaaagaatgtattctgaatataagtcccttataagataaatgatttgcaaatattttcccacattctgtggattgtatttccactttcttgatggtgtcctttgaagaataaaagtttaaaattttgtccggttgtggtgactcacgcttgtaatcgcagcactttgggaggctgaggtgggcagatcacttgaggacaggagtttgagaccagcctggccaacatggtgaaaccccgtctctactgaaaatacagaaaattagccgggtgtggtggtgggcgcctgtaatcccagctactcaggaggctggggcaggagaatggcttgaacccaggaggcggaggttgcagtgagccaagattgtgccattgcactccagcctgggcaacaagagcaaaactcagtctcaaaaaacaaacaaacaaaaaagtttaaaattttgatgatgaagtgcagttcatctgcttttttcttttatcgtttgtgcttttgatggcatatctaagaattccattgccaaattcaaggtcacaaatatttacacctgtttttcggaagagttttatagctttagctcttaaatgtaggttcatgatccattttgagttgtttgggttgagttaaggtgtgaagtaatagtccagcttcactttcttgcattggctatctagttgtcctacaccatttgttgaagactgttcttttccccattaaatgatcttgacaccttatcaaaaatcagctaataatagctgtgtgcatttatttctggactcaattccattccattgatctaaatgtttatccttgtcccagtaccgcactgtcttgattactgttgattacagagcacgttgaatttgtcaatcagtttggggagtattgtcatcttaatgttgagtcttgtgttccataaatatgggatgttatttgtttagaactattttgatttctgtcaacagtgttttgtagttttcaaaatataaatttcgtatttctttgttagatttagccctagttttttgatactattgtgagaatgttttaactttatttttggaatactcattgcaagtgtatagaaatgtaattgatttttatatattgattttgtatcctataaccttgctgaagtcatatatcgtaataattttctagtggatcccttaggattttctatatacacaatcatgtcatgtgcaaatatagtttaatttcttttttttctaatatcaataccttttccttttcctgcctaattgccctggctggaacctccagaatagaagtggcaagagcaggcatctttgtcttattcctcattttagagggaaagcatttaggctttgaccaccaagtatgatgttaactgttaggttatttttttgtttgtttgtttttgtttttgcagatgccctttatgttgagaatttcccttctatttctagatgagtattttttttttaatcatgaaagtgttggatttttcgaacgctttttctatatgaagatgatcgtgtcattttgctttgcaatctgttaatatgatgtgtttaattgattggtttttggatgttcaactaactttgcatttctaggataaatcctacttggtcatggtgtataatattttaatatattgctggcttctgtttgctagtccagtcgtcttgcagtatctgtgagggattggttccaggacctcctgtggatgccgaaatcaacggaggctcaaatctctgatatataatggtgtaatatttgcatataatctatgcacatcttctcgtatattttaaatagtctctgggttacttaaatacctggtacaatgtaaatgctgtgtgaatagttgttatactgtaccatttagggaataatgacaagaaaaggtctgcacatgttgagtaccaacgcaactgtccatttttttcctgaatatttttgatccatgattgatytattccacagatgtagaattgacagatacggagggctgactgtattttgttgaggatttttgcatccatgctcataagagatgctggtctgcagttttttcttttatgtttttgtgtggtcttggtattggtcatattggcccaataaaatgtgttcggaattgttgggaagagttcatgaagaattcgtacaaattcttcttttgaatgtctgatgcaattcagcagtgaagccatttacacttgacttttcttttgggtagtttgcggattactgatttaatctctttaacttgttatgggtttatgcagtttatgtctttcttgaatcatttttggtagtttgtgtctttctagtaatttgtccatttcatctaagttatctaatttgttggtgtatgactattcatggtatttctttataatcctttttgtttttataaggttagcagtaatgtcctgtctctcgtctctgattctagtaacttgagtcttccctcttttttctttcatcagactagctgaaggtttgtcattttttgttgacctttttaaacaactagctttgttggtttcattgatttttctctatttttaaattttcgtttcattaatttctgctctcatcttttattctttctgcttgctttaggtttagtttactctcttttggtatcttaaggtggaaagttaggtaattgatttgagattttttttttaattaactttttcagagccaaatacttctgaagagatatttcttaatctaagcatttgcaactataaatttccatstgaacactgctttatatgtattccataacattttgtatattgtgtcttcatttgtattgatcccaaagtagtttctggtttcccgtttgatttcttcctagatcccttggttattttggactgtgttgtttaatttccacatatttgtgaatttgccaatttttttttctcttaatggtttctaattttatttcattgtggtcagagtgtatactttgtattatttctatgcttttactttttttgagagcatatttcgtgtacacctgagaatgtatattctgttaagtgtaatgtgctagaaatatctgttaggtctctgttgatagtgttgttcaaattatctgttttcatgttgatcttctgttttgttctattattgaagggggagtattgaagtctccagctatcattgttgaattgccatatgtcttgttttgtgtattttggtgctgttattaggtgcacctgtatttttaattgttatatctttttcttgatggatttactttttatcgttataaaatgaccctctttacctccagtaacatttttttatttgttttagtctgttttatctgatatcagtatagccactccagttttcttgtggttgctgtctgcatgattatcttttctcatccatttacttttactcttttgggtctttgaatctcaagtgtatctcctgtagataacgcagagttagatcatgtttttaaaatccactttgacaagctacctttttgttggattgtttgatccattcacattttaatgtaattattratagagttacattttactttttgttttttgtatgtctcatgtcatttttctctatttctcctttgtgctttcttttgcaatgagaggatattttctaatatagcattcaaatttttttcttttcttattcagtggccagttactagaaggattctaaattcattagtaattttttccactatatattttttcaaagtcattgttctagagcttaccctatgtatcttgctagaatcaaattcagatttatacttgcttagtttcagtaatacatgctaaaatttattgaactttactgctatatagttcagttcccatcccccctttgtatattattgttatatatattacatatattgacataatccaacaatacatttttttaagagttactttaccgtctgtagccatttccttagcccactgcaactttgtttccatccacccctttttgctattagggcaaatatattacacatatattacattctgccttataagctcaacattatactatgtaatatttatacaattgctttttaattcaattaagagaagaaaggagggaaaatatacttgtgcttattgtttgcatggacttgaattaccatctagagtcacttgctttagtaactttagtaaactttttgtaactttatagcttgaagaacttcgtttagtagtttttgacagtgtggtctgttagcaataattctctcagctttttattgatctgagtctttatgtcaccccagttttgcactatagcttttctggactgagaattcttggttgacagggttcttttgttgttgtttgtttgtttccacttctttactgctttttatgttatcccactacctattggcatcatttatttatttatgtatttatttatgtatktatttatttatttatttatttatttatttattttgagacggagtcttgctgtgtcacccaggctggagtgcagtggcacgatctcggcttactgcaagctccacctcccgggttcacgccattctcctgcctcagcctcctgagtagctggcactacgggcgcctgccaccacatccggctaattttttgtatttttagtagagacagggtttcagcgtgctagccaggatggtctcgatctcctgacatcgtgatcggcctgacttggcctcccaaagtgctgggattacaggcgtgagccaccacgcccggccttatttatttatttttgagatggagtcttgctgtcacccaggttggagtgcagtggcgtgatcttggctcactgtaacctccatctcccgggttcaagcgattctcctgcctcagcctcccgastagctggggctacaggcatgcaccaccacacctggctaattttttgtatttttagtagagacggggtttcaccatgttggccaggctgatctcgaactcctaaattgtagatcttttcaggaattagtttctgacgtcagtgtttggtatttgtgctaacaccaggagggctcctcccagccatcttaatcccgagttttcttctgcaaactagcctgtagtccaggcctgtatcttcattagatctattagtctcctcccagttgctcttcaccatagcttgcactgttttggtttgtttctttgtatttgagacagggtctcactctgttgcccaggctggagtgcagtagtgcgatcttggcccactgcatcctcaacttccggggctcaggtgattctcccacctcagcctcctgagtaagctgggattacaggtatgctatcacacctggctaattttttgtagagatgaggtttcaccatattgcctaggctgatcccaaactcctgggctcaagtgctctgtctcggtgtcccraattgctctgattatagttatgagccactgtgcctggctgtgtgtgtgtgtgtgtgtgtgtgtgtgtgtgtgtgtgtgtgtgtgtgtagrgtctcattttgtcacctaggctatagtgcagtagtggcacaatcagctcactgtagtttccaactcctgggctcatgcagacctctgccttaatctcctaggtagctgggactacaggtacatgccactgtaccttcctgattcttgatggggctccaggactcttatgttccccaggctggccttgaactcctgggtgcaagtgattctcccgcttcagcctcccaaaatgctgattacaggcatgagccactgggcctcattctactttcactgttcttgagaacagcttttttttgtttgttttttaaactttactgtgcacttttgcaaatkaattttgttctaaaatttttacaggttttcttgatttgcttgctgtttgccctcaggatcatttccaaaggctttaaatgtttttgttttaaaagtaatatttaccagtttcactggggagcaggtcgttgaagctcttcatgctgtcatgttagaataaaatcttctgataagactttatttagcaaatgatgatcaatgtcacacaccttgcctattttgtatcctctgtagtacytgatatagaccttggyacacatcactttgaatctagtgaaattacaattaattagtctaacatactggttaaggtaccatctctgagtcatggttttaaatcctagttcctgaatctatagtagtgtgactttggaaaagccacttaacctctctaagcatttgtgttcttaattgtaagtgggatactccagacctcacaaggttgttgtgaggatagaatggaataatccatgagtaaaagcccttgtaacagtgcttatcacgttaagtgctccgtaaatgctagtggtaattattagtcctcattcactaacgtcrtataaaaatgaagatctaacacacgtacaacttgaaaaaatactaatcacccataagtgttaaaattgtcttattataggttgaatttttaagccaaaatactgtaatttcaatttttcattagccctttggccatttctctctaaaatatcacccatggtttgaatttcttttcatagttccaagcttctttaagggaaatctgaaactgagttgtatggtttggcatatgacttccatcagtgggatactcctgttgccctggaacctcagacatgattcatggtttttctaatgttcctgttaaatcctttgtaggtttaaacaaaaacaatgcatctactgagctattggtggtggtttctcctcataaggttgactggaacagtgggttggcatgaaattcattttagggatatacttcaaaacctgtgtaatgtatatttatacaaacattatttgtatatttgtattatctttacttctttaaataccttctttatcttgatttcttggcattttcatgcacaaatataatgatatcccaactgcctatttggaataaatatatcccctgctttatccatgaagtcacgaaggagcaggcttcctactaggcagagctaccttgactgccagccttctggtaggggtgctctctgttccttcctaggcattgttactcagccagggcactgcactgcctttctaacctaagccttcacattctctgggagcttctgtctcaagttgcctggttcacatgggacctgggtgggtgaagggagaggagagggcaggagttgacccatctggctgttgctgtgactggcgctgatgaatcatccagaagctgtcccttgagcctcctctctgggcctagagccctcttgtgttagcccacctttggcagcatatctcttctcacatgttggaggtactgcactccatcttcagttagggctattggttgcccatattttaggtatcactcatcatttctcagccacaaattctggttttccgccgtagttatacagtagatttgtttgtttgtttgtttggtctttcatgtggtcttggggtagaaagggaagactgcagtgtgtgttcagtctgtcatctggggaatccaaaaaataattaaaagtcattacttgaaatacattggttttagggttcagagtggctctccttttagctgccctttgattaaggatctctctttaactgaacaggaaacgtgttggtatagcattggacaaggttcttgaggagtcagttctttgttgagcatcagagtcttctcttgatgaaaggaattctaaagttacataataagtgtgttggacatgtctacagtactcttgaggggaaaatatattcagttttcttactgggaatacctggagctcttttctcaaaattaggacccacctactccgtactttattttttttcctaggtagtagaagtagaaattctcatgtagctccactccatatgaagagctgtgccttttcttgtgctaggcactagggcagggattagcctgctggtgacgtcctgtttttgtgagtcaggttttattggaatacagccatgtccattcatgttgtgttgtttatggttgctttcactcttcaaaggcagatattagttgttgcagctgagatcatatggccagcaggtctgaaatatttactgatttttttcctggagggcacaaagaatgagttttgattttcctgagtgtggtgggccgttggacaggatgaaggtggatgtggactttggggtgtagaggttagatgaagaggcagagagcctcttgccatcatagagtttgttttaattttggggtcatcaaattatctttttctatagactccacccacccccccaagaattgacctgcttttttctttaccacttattccactcactgttcctgatcaagcctttttttcttgattcacagcatgtatgtacagaagattgtctagtagcttcttctctgttctgccttaaatcccttttgttattctttccctccaattctaagtgcaacttgaagcccagttgcattcccgtgattccttctcaaagacagtcaatatcctgaagttggtgtttatcattcctttgcttttcaccatgctttcattgcatatgtattcgtccctgagcaatattgaatgctgttttatttattcataactttctgtaagtggtatactgtatatgttcttttttttttttttggcytagtatgtttgtgaccatctagctctagctcttccaatctcacttgcatctcacaagtatatggatgttatatgagcttattcttttcctgatgggcttgtttcctttcctctaagttgatctgtttacttgtttaagagatgagatcttactctgtcgcccaggctggcatacagtggtgtgatcatagctcacggcagccttgaactcctggcctcaagcaatcctctcacctcagcttccgaagtagctgagactacccgcacataccaccatacctgattttaaatttctatttctaacagctttattgagatataatttgtgtatcatgaaattgacctgctgaaagtgtatgattcagtggtttttagtatatttacagagctgtgcaatcatcactattatctgattttagagggtcttcattctcaaaagtaattagcagttgctacccatctccctcccctgtctccaccctcacctgaagcaaccattaatctactttttatatttgcaaacatgtctattttagacttttcatataaatgggattgtatagtacttggtacttcatgactggcttctttcacttaacctaatgtttttgagcttcatccatgatgtagtatgtacatgatgggcttttaaattgcttacagtttttgctgttacaagtgatgctttatatgtgcttgaggaactgttatttttttaagtgacttttattgttaatagtaaaaattagatctcatagtcttaatctcttgctgaggctctggaagagaaaaacaaaggaagtaacatttacaaaaacataattgagtatctctggcagtgagtaagcccttatcttttgaggaactcaatgtagctggggtagattgactaactgtaaaacagtggaagtgctacaagtgaataagcaaaattatgaggaaattcagaaggaacaatttcttgggagatatgtacaaggtgttataaagtgagtgacatttgatttgagtgtagaccctggaaattagtaatttttcaggaagtgggtgttgacaagggaggaagaaggtgttctgaaagaagcatcatgtgacggcattgagagatcaaaaggcattttccaggaacttacaagagagtgagtgggcttcaacaatagtatggcaggataggagactaggaaggctccaggctcattgataaacacctgctgtgagaatcattagaaaaattaggtaagattaaggacgtacacttttatgttttagaaagagaactctgacaatgcagaaagtgagctggagaccagagagtctagaggtggggtagactagatgaaggttgttgtgctcttttaggttagagatggtaacttcttgttgttcatggtggtgggaatgaaaggagatgaagtaggtaagcattttttacgttactttgacaggacttactgatgtgagtggtgagggaaatgaattttaagatgactcccatgatttctcacttgaacaacctgaatgatttgtgaattttctaaacatctacattgtcaaaaataacttgtgttagaagccatccactttctacagataaaatatctgcttcagtttgctttaaggaataaaataacttattataatttaaaggttacttgaagtgttttatttccagttcagaaatgaaacacaagttcatattgagcctaggatctgtcatttttagacttgaacaatcaaactactattaattatcacttcctcatagccaaaagaatgcaatggtgtaaagattccagttgatgccagtaaacctaatccaaatgatgtggagtttgataatctgtatttggatatgaatggaatcatccatccctgtactcatcctgaagacaagtacgtaacccatttttgtcactgatatagcaaatcacagaggaaacattatattatattacrttgtttggttgtcattatagaccagcaccaaaaaatgaagatgaaatgatggttgcaatttttgagtacattgacagacttttcagtattgtaagaccaagaagacttctctacatggcaatagatggagtggtaagtgctaaaataattagaagcctccattttgtttttttttgctgtgttaccagtgtctagaatgaaagtcagctaaataatgaaaaatgttgacagtgatgaacttgagaaagaaagcctcatccttcagtcattcattcagatgtttttttgtgtgtgtgttttgtgcttattttgtgctcagtactgtgaaatactggggatgttggcgactgcccttgcttttgaacttttggcttactgtcaaagggaaggaggcatagataaatgggtgagcttaattatttataggcattataagcactagataatacatgcagggtgttgagggaagaggaagtcagtgctactaaggaagttaggatatagagaagaggtgacttttgttccatttctttaacaatgaagaataattgggagattggtgggtggtggtgggagatggatgggacarggtttggrgagggaggaccttccagatttctcaaatgtggcaggtaaacacactttccgtgcctttgaccacactgacatgttttggcaactacaggtggtttgaattgagaagggaagtatagcaaaagcttgagaaagccttaccgtctggagtttggactgtatcctataggcaatgagtagtcatgaaaatgatttgagaggagtaagttactgacctatgataataataccaagtagctccttttataaatgaccagcaaactctattaggggggtaaggtaagatataactctaaatttatttagctatctgcaagtagattcttttaattttagtgcatcctagcggctaatgggatgattttggaaattcagagaactttgaatccaagaagattaacttttctgtgagattcgtcttactcagtgaaaaaccttagctacctgataacttgctaagttgcagttagaatggagtaaagagtaaaaagaaaaggaatatgtcttgtttagagcacatttcagtttatattcagctaattttttttgaagaaatctttagctttactccagtgtgttctttctgctacatcaagtataaaatatgtacacatttatatgcatgtgtgtgtacatgtttatacacacatttttttgtttatatataaatgtagatacagaactttgtacttgagagggcttcattagatggtctcattctacagaaaagggaattgtttaaagagaatattaaataacttacatttagatgtaaacaggatatttcacagtttcttcccaccccaaaactcagttcagtaacttcgaaaatcttacaatctagttcactttatttgggcttttccactgaaattgcatttggttagagtgatttaaaagtacttctggttaaggcattatttctttctaactgctatgccttattgaaaagacagaaaaattataaaccttattgtgggaaatagaagtgcaccgagattcttcacataaagaaatagttttctgttgcttttatgagacattgtggatcccatttggacaccattcttccttttaggtgtggacatagagaatgtcttcctgatcttaattcagtagtaactgctcatcagatgttggctgggtcttttgagtaaagtgagctttctttcttgggtgccctgaatcaagcaccctaaccgaggggaactggtgttagactgggagggcttgaagtataagtgctagggcttcataggatgtttgtccatttgacgtggcactcattcacctgattgagctcagcttttgggttctcggtccaaatttaagttctcagcatctggtatctgtcatgaaaggattattagacacattacttacctttcttccattttagtgtactgcttttataagaacaactgattcaaaataaggtacagatttatttgtgaatattttgatgagtgttatggaatatgaaatacattttcaggcaccacgtgctaaaatgaaccagcagcgttcaaggaggttcagggcatcaaaagaaggaatggaagcagcagtcgagaagcagcgagtcagggaagaaatattggcaaaaggtaaagaatatgcatcttgaagttggattttttcataagatgtatgcagaatgagggggtggtggcaactttttcttacaaagaggcaagcttttaatttaataaggatcccagaatatccagtgttcactgttgaggaaaagtagttcatgaaatctaccaataggcttaataggcttgtttattttcaaactctccagtaagagggagccttgggaatagggaattctggtggagattgcagattgtcaactcctctcagggccagtgcagctctttaacaaacttttatgtctctgtagaatagaaatatagtaagtattttttactacttttctctgtggcggctgtcagaaagctatagtgctgtaaacattttcctcaaatcagctttggtttgcttgctttttgaaactcagaggtctatctgaggaagccggaggtgattcgatycacatttacaggctgttgccaagtcatttgcatactttcaatataggttgatggagcaggcacagtacttatggttccttcaagtttggaggggttagggtgggatgtcttcatttttgcagttccccaaagccttaaaattcctggtggctacatgggtaggaactgactaagcctcagagaaaaggaagatcagggagtgttgatgccagttgggactggttctctcctaccacacctgtgtgtgaggtagggtatggttgtagcaggtttgtttggtgttctgctacttaagggggtataatagaccagaaaagccacagtgtcttggctccggataattgcactctgcagttgaaaaaggatgccatagtatagccagctcaggcctgcaattacaataaattttatattacttgaattttgctggaagtgtacaagtatatagttcctttagctgcaacttgtaattaagactctaaaacctgtttgtatttataacaatgtttctgattttaagaatgtcttttttttgaagatgtgatgaaatatatttgtttcttgagaagcagctaatagtgatagagaggaaaaaataggatttttatattcctctacctgataattgtatttcttatcctgtaaagctgtgatgaactcggcattttaaatttcatttttcttaggcacctttattttaggaactgttatcaaaaatatggcctctaactggtgtgtgtgtgtgtgtgtgtgtgtgtgtgtgtgtgtgtattctcttacagagtgaagaacttcataatttttatgtaacaatataatatcttttgtgtaccatatattgttttacagtcttattaaaacataatttaaaaggctgagcacgatggctcacccctgtaatcccagcattttgggaggccgaggacggcagatgactggaggtcaggagttcaagaccagcctggccaacacaatgaaactgcgtctctactaaaaatacaaaaattagccaggcgtggtggcaggcgcctgtaatcccagcttctcaggaggctgagacaggagaatcgcttgaaccccggaaggcggaggttgcagtgagccgagattgcaccactgcactccagcctgggtgacagaatgagactctgtctcaaataataataataataataatttaaatttgagagatggaatcttattttcttcccagtgagggaacatttttcctcggatgacgagacttcactttcttttgtagtggaactttttgtttttgttgttctggcttaatgttgagtaatttatctcactttttatggggagaacaaaacgttgcctcttttctctaggtggctttcttcctccagaagaaataaaagaaagatttgacagcaactgtattacaccagtaagtagtctcatactttgctagctattgctaactcttaaatgataggttaatttatttctttctatcattttagggaactgaattcatggacaatcttgctaaatgccttcgctattacatagctgatcgtttaaataatgaccctgggtggaaaaatttgacagtaagtttcacattttgatacttcagaaagattagggtgatcattcgaggctgtactttgatatgactgacattatttatccttctgccctgccccataaaatgctagttgactgttggaagaaagaaaagcttccagggtttttggagatggggtatccttgcatggttaggttttagatagctgaattttctcttaaagccaattttgtcctcttaccatcactatgaagctataaaatgggattcataatttaaaaaatatatataggaaagtaatttttaaatggaaatttccattattacatatcaatatacagcaaaattagtaagttgtggggctgtcttaaatggctgtgttcccaaatatttaaataatatgtaaatgaacttgtttgtaattttaggttcataagctggcttccctattaatgagaaatggtaaattatattttatagatatgtgttattgattattcttggggcatatatggttcagcactatatccttgcatagtagtgaaaataggagcttgtgaatgatcagtttttctgatggctaggtctgacccagacatttcattcctttccattacatgtagtaagtcaatcaatgaagtggttttggtgtctctcacacacacacaccccttctttattcagaaaattttcagtgaagtagttttggtgtttttcacacacacacacacacacacacacacacacacacamcccttattcagaaaattttcccgtaacacttatctcagtttttcttgagacatataattcttttgatttttgtgcctatagaaaattggggataatctgaaagtgttaacaatttttttataggttattttatctgatgctagtgctcctggtgaaggagaacataaaatcatggattacattagaaggcaaagaggtaaagcttayttaccnatatttgattatatgttctatttttaaaaagccattrcatagaaaatacttggtatgaagtgatattcttgtggtatataatatattaatataaatacatgtttctctcttgtttagcccagcctaaccatgacccaaatactcatcattgtttatgtggagcagatggtaagtttcttctttgggatttgcttcttttggattaaaccatagcaagttgatgggttggtgtgcagtaatggattattcatggttacctggaagttccaaaatgccttggttattttatgttcgacagggaactagtattgagttgctgtttaatctgtggtcaatgatctttaatttcttttcttctttcttasatttttcaaccttttaactccccatacctttaaaatggagaatttcccaagtgtttaatccttagtggcagtctatgttgtaggtccacgtatctagaggacttcctgttaactgggaaatgccaggaagtgtcaagctttggggctttgctgctcatttgggtgctcatttgggcttttctttgtgttggcatctcatagtagtttatggtaagacttctctcagaatactcactgttsgatgtttttctcattgttgattgatagctgatctcattatgcttggccttgccacacatgaaccgaactttaccattattagagaagaattcaaaccaaacaagcccaaaccatgtggtctttgtaatcagtttggacatgaggtcaaagattgtgaaggtttgccaagagaaaagaagggaaaggtaagaactttgagatggtagttgcctcattaaaaaaaaaaaatctattgtggtaaaatgtatatgacataaaatatcatttcaaccattttaaagtatacaattaaatagcattaaatatttgagttaccttgtttttaaaatggatgaagagaagattgtggttgattagttctttatgtgcttgttctgttaccgttacccttcacagagatgtatcttttttcttttttttttcttttgagacagtctcgacagagacgaatcttttaaagtactttaaaataaacctgcattcaaaaacatgcacacactcatcctttctacttagcactttttctgatattgcctatatctacacgaggcttagttcccatagataataatgcccatagcttgtaatttgtttgtggaagttatttgtttgaaatactcttcttaaaaggaactacaacttcttaagacttttaagttactcccactttttatgtattttaggttcacttggttatgtccagtcccctttaaaggggcttctgtttcaataatatggtgcctcttgagtcatatgctttttgaggggggaaaaagaatatggtgcctctttcaaagacatcgttaagtgaaaaaagagataaatatagtgtattatttcagatatgtaatacaataaagacagtatacatgtatctatgcacatctgttcacaaggaaggggtaatcattggttgggtataggtcatcagttggcaaacttcartcctccaggtttggcctgtgagctatgttttttacatttttaaagtgttgttaaaaacaaaataaaacatgaaagactattaaacagagatcatatatgtcccccagtagccaaaataatttactgtctggccctttgcagaaaatgtttgctgacccctgatctagacgtggttgattttatgggtaatttttattttaaaatgcattggtgagcttttaaaaattaaatacttgtgataytaaaatggattgtgcgttagaaaaagccttaaaatttgcttggttggaaaaaattactggaygtagagtagacttgtttcatcttcattcctgttcttgcagcatgatgaacttgccgatagtcttccttgtgcagaaggagagtttatcttccttcggcttaatgttcttcgtgaggtatgtagcaataatcattgaaatcagcactctaaagcagggtgcctttgatagctgtaatggcrgcattcctttttggttgtagtatttggaaagagaactcacaatggccagcctaccattcacatttgatgttgagaggagcattgatgactgggttttcatgtgcttctttgtgggaaatgacttcctccctcatttgccatcgttagagattaggtatgtgcatttgtgtagcttttcaaacgactgttttaggcttcttgactttactgtgcctactrgtcctaatgcataatgtttgtctcttgctgacagggaaaatgcaattgaccgtttggttaacatatacaaaaatgtggtacacaaaactggggtaagttcattcttgaatgatttcaaaacagaagtatttgcttttataagaagatcattttacatatattttatcacttacagggttaccttacagaaagtggttatgtcaatctgcaaagagtacagatgatcatgttagcagttggtgaagttgaggatagcatttttaaaaagagaaaggatgatgaggtaaagtgtttctattgcagtagctaaaattgctcctgtctctaataggctatgatgatcctgtgattacttttaatctctttgagtgtgtttttatatcattatggtgtgtcaacactaatgtaatcatgagtggtcagtgctttgattattttataaaggttgtgctgcttgctctgtggaactatgtattgtaccctgtttgagttgcattgtaatgttttttctgtcttcataatctgaatataaatccaaacacatttctaatcaataggatttgaaatgcgggtaccaaggctggaagtctattgggattgaactagtggctgtcatgttttgaaggcaggaagacaggttaagaagaattgacaatgtagggagtgtgggttggattatatcagccagggcagagggttgggagaatgtaggatctgtggagagctgaatctcttaaaaaattgaaacacaagaaggaaataaaatagcaaagcatttgaaaattgattgcatattatggatgagcgcttacatgaaaagtccaggttctggcttgggcagttaggaatttgctggtgccatttactaagatagcaagcactaggggtggaatgggttggggtggggacaaagtaaaaactgagtttcattttggagatgtttaatgtgagggggctgtaggacacctgagaggagaaaagtccattaagcagttgaatgtgtataaagctcagggcagaagtcttttgaagagatttgagaaccattaactaatggaagatacttgaaactatgagtgtactatgagtgtgaccctgggagcttgtgtggagtaaaagtacctttaatagaagcctagggaaccacggacatttaaagagaaagaggagccagttatagagaggtagaaggaaattcctgaagagatgggaagccatgctcaaggggtcacagtgagatggacaggcacttcgtccgtggacagggtttgggatccactggtgagctgataggagtggaggagcagcagcctggaggcagagtgattggagggtgattgcagggtgtagcaagggaggccagcagtgggcaaaataagcaggtaatagcttcttagaaacagcaaggaaatcctttcagaaactgattttataaaagtcatgtggctattttaagcagataacaacatatattactgctacattgcttcatgatctcccagcacattaaaatgtgtcattgaatcttattttctgttttcatcaactttgtatactgtagctagtgatctcttatttttaaaactttgggtgtcattttatgtaacatagtgrgttgactgtaagcattctttccaaaagccttcagtacttggtaatstttttatgtgatgtcaagagttttttgcatatagaattcaaattacagaactagctttgtctggaagatcagatgtcaattggaacatttttaactactttttcaacaattatggtggcatcccttgatctgctgctacatactttgtaccacttggtttaaaaaccttgagttacagtagcttctactgtctctttagccgactctgcaccttgagttggcattagaggaggaagtatgggatttggtagacaccatagtgttacagatttaattaatacgatttttcagctgacctggcaggagagggcattttaaagctttggatctttgttggtgttcctgaagtcatgccatgtccttcagcatgattggacaccaggggaaaccctcaaaaacgcaataggaaagtttccagatatatgtatttttctgggaagtatgtccctggcatttgacagatttccaaaggagttcatagcacaaaaaagggagagatccataaggtccacccaggtggtcttctgtttgtgcgtgactaccacccttagagataggcatttaacagaccagcagaacamatgatagaaaaggaatacattaatatttgttattggctaagcgtggtggctcatgcctttaatcccagcactttgggaggctaaggtgggcagatcacctgaggttaggagcttgagaccagcctggccaacttggtgaaaccccatctctactaaaaatacaaaaatttaagctgggcgtggtggtgggcgcctataatcccagccgcttgggaggctgaggcaggagaattgcttgaacccaagaggtggaggctgcagtgagctgggatcatgctactgcactccagccagggcgacagagcaagtctcttgtctccaaagaaaaaaaaattgttattgaagttgagcatttaggcaagaaatgtgttgctttttattgtatgagctttcatgtttaccttttaacttgggaatgttgttcatttattaagcaaatatttaagtatttaccatgtgccagacagtgttctgagtgctagtgatacagcaaaaaacaaaaaaggagacagaaatccctgccctcatggagtttacattctcttgggagagctggaagataaacacagtaactaagtaaacctcattaagtgttagagaataagtgccacaaagaaaactaaagcaggtgaggaggcatctgggaagggagaggttgggcattacagttctagaaaaggtgacgagagatggcctcactgacagctgaccttgattaaagttgtaaaggatgtgagggagcacactgcagatgttttcaggaagcacattacagacagagggaatcaccagtgccaaggccctggggcaggaacatactcaggatgttcacagaacacaaaggagccagtgtggaaggagcagaggaggcaaaggaagagcagtaggagatgaactcagaaagaagacggagggcccagtctggtaggacccaacaggtcatcataggactgttaactttcattgtgcatcagtgtaaggttttgagtagaaaagtgacaagatttgacacatactgtaaaaggatcactctagctgccatgttggaagtactgtgtggagggaaaggtcaaagcagtgagccccaggccagtgaggagccttttttacagtaatccaagggagcctggatggtagcagtggagatcatcagaggcagttggattctgaacatgttttgaaggtagaaccagtgggattggcaaatggattaaacatagagtgtaagagaaggaaaggtgacacaagactgaaagatgttttgagcaaccctcatggaaagactgggaggtgcaaaggtgggttggggattctatttcagacatgtgaagtttgagatagccaaatggagatgctaagtatggagaggctctggttggggagtcatcagcatgtagatggtgttcaaagccatgagaccaggtgatgactcccatgggaggagagaagtggagagatccaagtactgggcccaggggagcaccaacattaactcatttctgcccagtgttccattattggaacgataagcttgtgggagttatttatatcctactgctaaaggtcatcaccaaggtttgatttttcacacaaaaaacttgcaacctccagcataaatgggttaagaggctggggagttgaggaacaaagacacatagcaagagggaaggagatcaggtgagtgtagcctcctggaagccaagtgaagactgatccaaggaggaaagaatcctggtcagataaggactgaaatctgactaatggatttcatagtctgcaggtcattggtgacctacacaagagacgtttcattgaagatgggacagaagcttgattaaataaatcagtggtttctacatcagaggaggttttagggtagttgatcacctgggctccactttagagcaggagacttatgtatccggcattcagctttttgcctggcagaaagcaccaatttccaatttccttaaggccttatattgcagttggtaggactgactttggaagtgtacctactaggatgaccatcagtataggatccactggcccctgttttaggctacaacagtagctatggccaccctagctgtcatttcagttccttgatactcagggaaacttgggcatggttatgggaggcctgcgaatggcccagagttagtagggaacaagatgaacacaaaattctgtctagttgaaaccatggctacaatttggaaatgagtagggggaaagaatcaacgtgggctggaccctctcctgtgaattaaattggcccagagtagtaagccgtgcatacacctcaatttccttcctttttttccatcggattgatatttttggaatctggccagggtgagggataatgtttgcgtagagtcccacttctctcttttctccattgtgccatgcatgctatagaataagagccctttttagataacagagtctaattaaattgtcttgctgattttttwaaaaatggataccttagttattaactaccttcaactaaaccttaagaattgttgagttgtttattttattttattttattttttaacttacttgtatcttctccatattgacagcctgtttgctccaggataaaaccaagggtctttgtaatggctttgcattttcctaaaatgattcaaaagctttctgaacagaattaccaagatcaattgaattgtatctaaattcagtcttccattgttaagttctgataagcagcattttgaacatatagtcttattgcctggtttaatcatgtacctagatttctggggtcgtcctttaaaacttaagttgtctcccaaatcattcctggtaatgcttaactctgacatttttgtgtaattatttgacagaatatgtggattttatacttttaggacagttttagaagacgacagaaagaaaaaagaaagagaatgaaggtgagttttaattaatttcatgagattggcaatagcgtaattttacaatttatgaggaagatgttcattacagtagctttattccttgtccagtaggacttrgtcagggacgtaagtgtccacccagttacctttttacctgtagaaagaacactggtgtcgatttaaagaaggtcctctaggctctgatgtctgaagggatacacttgggaggtgagaggtgggtggcagttagctatttgaatggtttacagcaatcaagtattgttttttaagtaaaaatggtcaatattttgtatccccttgaaagttactgtactcttatttctacctctttgtcagattaatctttctagaacacaacactctaaacttgtttctctgctctaaaagcaccactgactccttaatcccctcagaatccaattctgtcttagtttggtgttcagagcacactgtcatccagttgaattccagccgtccagcacatcccctgttgtcttctaaatacgccatatccctgctgattaagagtgttgccttcatttgtaacctctgaatggatttttgactttgcagctcactgacatcataccttttctacaaggcctcccttcttggttatgctcatagtacaggttgagcaatcctttcttttaactctggtgcttcctatgtctgatacatgttttcttacttaattgcataatgctttatagtcatttaacttctttagttcttgttttcttatcttccctactagattttcaagcttgtggagtttagggactgccttttactacgttttgttagaattaagcaatttcaggaaacaagaagggagaaaagtagagttatttattgttgcagtgggttcaaaatcatttagattgggaggggcatatttggtttctacttatatattaytatttttgtcagtatcttagtcagccaagactatcacctatgttagctataatcatatctaattaattggaaataaagagttaaattctagcaaggcaaagggtaaataaaagttgtatttccacaaaaattagccgggtgtggtgacgtgtgcctgtaatcccagctactcgggaggctgaggtgagaggatcgcttgaattcaggaagcagaggttgcagtgagtggagattgcaccactgcaccctagcctgcacaacagagtgagactctgtctcaaaaataaataaataaatttaaaaagttgtatttcctaagtataactcaaactcaactttttttaaacctaaattattttgtttttattagcctgaaattgtgtctcgaatgttttctgtaattataaaaagcagtgggttagcataatgagacttgaaagattttctctatgtttcagtataatgtattatatgtactttargactgagttattaagtattataggctattgtttagaaggtataagttaccatcaaatcaaagtgtagacaaccttgtaatattaacgaagatcatttggttttttagtgagttttgtaaagtgcttacagtttggactttattccattgcccttctttyctttctgtcatctaactgtgttgtgatttaattttaatttctacattcattccatttatgttagagagatcaaccagctttcactcctagtggaatattaactcctcatgccttgggttcaagaaattcaccaggttctcaagtagccagtaatccgagacaagcagcctatgaaatgaggatgcagaataactctgtaagtggcttacttttatgtgacatttaagagtggtgaatatcacatacctcttgcaggggtggtgtgtgtgtgaaatttatcacagcctggagttttgttttatagtttttcttaattgctttgccttgagaaatgtttagttctgttaagtccatctttatcaatatgaaaatatccaaatgatgtgaaagaagagcacgtaggattgttgatacatgcgaatataaagagctgattccagtttgggtgacagcgtgagaccctgtctcaaaaataagctaagtggctgcagtgtttttgtaatgcagatgaaccacacactgcttctcccttctccaaagaatagggtggtgaatggttctagaagcttgtcaagggacatccatatgtctcaaagctgaggcaagaggaggaggatgggttttattcccttatttcccctttccttcagtgggcagttgtgagcattttgcaaaatagtattccttaggtgtaaactctggctctccaattcagcatggaatagatctaaataaatatcttaaggtagcacttactggttactccctgtttgtgaactcagcaactgcatgcatttatttgccttgtggtattcttccatatttgaacttggtaatccaaactccagaagcaaatcaacctatcctgcaaggctgtactttgtccaccaccttcctattgtagtggaaatagaccatgagctctcagaatacccagtgggacagcaacagggctgagggaacagaccctgatctaacagtagaggaaggaacatacacttttgctatgatatatccaaggaaattgaataagcttggatatttaatttctgttattctgttagttatcctattgatgctcatatggaacagaaatagctgatgcccatcattcaagattttagtgactaccatccccgcagagcagaactgagagtgactggtggtgttatatgccctgttgatggtagagtacttttttttttaaatcttgggaggcaggcaggtttaaactttgccagctgtggttgcttcaggaagcattccagtattatcttcaggcccggtagtattaggccacaggaccagactgtagatcgataacatctgccataggagtagtaatggggagactggtgatgaggttgcttctttgattctgtcttaattaacttcccttgccacaattatttctatatagaggaggtatggaattcgaatctttgcagagtgggattttcacctagaatgttctaaatttaaggaaattttgaagtcaaattaccagtttatttaaagggagccattaaagttacagatttctcgtgttttatttttctgagctgttgggttgtagtctctaatacttatctactgatgattaacattcttagtgttttattaaatagcttccatttccttatatttgtggttttatatttagcgttcttcagtgtggtttcattatatctaatttgatgaaaaaaacagcttaagaagaaatttgaatttaatatgaatctggtatgttcacaagggaatatttttgttggtagagacagcagcggagatttagcattaaatggtgaacagcatttttttctagaaagtatattattatttgttttctaaagatagagtttatatcttgttagtaattaattttgttaaagtttgctttttacacaacttctctgtagacagttaatgggaatgtcactctcataatttaatacaaatggattagtgtagggttgaaaaaacaatagtgattacttactgaatggttaactaccatgtaccatgtaggcagcatgccagtaatctttcacatgtattgatgcatttaatccttgcaataacttgtaaggaaacagaacgttatcatccccattttaagatgaggctcacagaggttaagtaataaattgttcaaggccacacagccagtaaaggttgaatttggtatttcagactcagatctgtatgactaaaatacaacaatacctgcctcgttttccaagtacaacagtgccttcctgtatttatttttattgggkttttttttgacaatattgtctgtaccttttcattaataacattgacattatgtttttaaaagagatgtgctctaagttctatgtgaaatatgatttcgtattattttaacttttcttgacctgtggtatgaactgtgtttatgctgtggatactctaattattatatcattcaaatggccttctgtgctctcagtttaaaaaaaattcagtttacttgaaatagctaatatactgtgagtaacagaagaaaaacttgactgtggaaatgtttctgccccttatgtttttggtgatgtggtcctttagcttgagtaactaaagttgcagaacattttcttttaatttttaaatattaaaatatgttagggttatattaaaatatgttaattaaaattaacgtattatgttaattgagttaggtacaaagggaagataatactgaatttaaagtgacagctaagtctttgaaatacyaataaaatctgcatttttctaagatgactaatagatttttatttgttgattgatttttaaaactgaacatataaagtaatttaagttatctaacacagtcttattaaacttgcttttcagagtggttgtactaggttgaagacttaaccatttagctgcattctcaccagcattgactattttatatattattacatctatattattatatattatatgctatatatgtaatgcattttatatatcacataattttttcccctcatagctttgccatttggtaggtggcaaatgattgtgaattcctaacaggaattgttacaactgattgtcacaaatgattgtgaaccaccaaaggaaaataaaattcaagtactataatttttaaaaatctataaaattaaaactttttttttcttcagaaacttttttttttgccctaataatgttaattgtttttartttaagcatagaaagtttgggtattacattacttcttttgaggggaagtgaaatggagcaagatcagtctctgtaccttctaaatatgtttaccatctctatgtagtagctttaaaaatgttactgtgaaacatggtaagtagtggtggttggatgtaccttcttatgtaaaatgaataatgaaatccttcttctgtaatgtcatcattgtctgcagagtccttcgatatctcctaatacgagtttcacatctgatggctccccgtctccattaggaggaattaagcgaaaagcagaagacagtgacagtgaacctgagccagaggataatgtcaggtgaagccattttttggtagcactttgttagcaaattgctgaaatagatgcagtctaattaatgctatttagcttagagcagcagtgccttcagatgcttgcctgtgatctttttatccatcagtaattaatgtggagggttagaatagtcagtaaattccagtgagatgtgtaagctgtagctgttaaacctaagtgtctagattagtatgcgtgcaggctttcgtcctccaatccacttttccctctgagaccaggcacaagatcggctagatatcatatctaggtgtttagctctgactatgtgatctgaatgttgctgtttggagactgattaaattttcaagctgcttaacctagaaagttcagttatacktagacacttaatatagtttgccttaatcttctctattgaaagagttcttcctcaaaatgaaatatgcagaaatcattctgttaagagatcaatatgtatgttttttaaaaaccacagacttgcatatgcgcaattatatttcatgacagaggagtttccctttaactgtatacttcaaatttaaaataggaagctgattctttaattcatcctgaagtttgagatcattatataataagattaacaacctctcatgtaattaaatccagatttgaaccgtgggctccaagtgcaaaaggccaacaatctcaataattgtagctcattaagaatttaggaaaacgatctatttcaaaggtaaacaagacagtagtcacctacagctcatgcttcttttacaggacatggaaagtgtgtgatttgtgtttatgattagaaactttgcaagggtcacgtgtggttctgcacatttttctaacattctttgacttcagatccatgtctacttgtgattgaacatttactctgtatatctttagtttctatcctctactttctgtactttgggttttcctcttacagcatgtctttggttttgtttactatgtagccatcatgatcaatactagtttaataggtaacttgatttgtttagtattttattgtttaatcctagaggaaattgtttaatcctagaggaaatcattgtttaatcctagaggaaatgcctctaccaagaaatgcttggggcttttagcattttttcattaaccttttctgtaaaatagtgataatccaccttatgaatgggggatatttctaattgttattctgtgactcctttgtgttgtgggaggggcagattaaaattgatayggtatattctgaaacatgactgcaattaatatgtgaaatctggcacatggaaaagaggcctaaatggagaatcatcttgatgttcttgatctgttctgatgtttgtaaagtgttatttggcttctttatgttccttaaatgttaaatcttagagaataagaaatggattcttaaaaaaaataatacattggatgaaaatgtggttggtcacattgtattttcagtgatgaatgataatttagtggattcattgacctgcttctagattttaccataacatacatatgtttgtgtgtgtgtatgtatacatagatatatagagatatagaatgtgtatgtctctctatatatatctctatctcctttccttaagccatcaacaactcttagctgaaagagggataaggcccaagcaaggatagagagagtaggtatacacataatttctgcctaatgtctagattattcttttataaactattttttacatttaaaaaagttacctgtgtgcgtcttaagtaatttagttgactttctttgtatggtttaaatatattttaacaaactaaggaacttgaactatttaaaatatcttcaatatttgaatcttaaaatgtagctttagaattgtacaaagaaacatataaagtagtattaaaatttgagcaaatgtgttctgtatctttttcaataacatttttgaaaatgtggttttataatggtcttaccagaatcagtgattggggtgtgtttaactgtctttaagttgataataaatcctatgaaattagactttttagaaatagttaaatgaatctgtgttagcatgactgtttaactctttcacatttcccctgggtattaaatataaattgatttggggtataaattagtagacagcctgttactgaaggtgtgttaattcagcataaatgagctgtgcctggttttaggttatgggaagctggctggaagcagcggtactacaagaacaaatttgatgtggatgcagctgatgagaaattccgtcggaaagttgtgcagtcgtacgttgaaggactttgctgggttcttagatattattaccaggtacaaaaagaatattttcctctgaatttgtagttaatcatttaagaaaaatagtaatttctttttttttgtttgttttttgtttttgagacggagtcttgccctgtcacctgggcgggagggcaatggcgtgatctcaactcactgcgacctctgcctcccaggttcaagcgattctcctgcctcagcctcctgagtagctaggattacagagcgcaccaccacacccggctaatttttgtatttttagtagagacggggtttcaccatgttggtcaggctggtctcaaactcctgacctcgtgatccgcctgccgcagcctcctaaagtagtgggattacaggcatgaaccactgcgtccagcccagtaatttctgtaataatagtattattgagctggatcttgaaaacaaacccaggctcattttttaaagctccctattcagaagtccgtatttgtaaatatttgtttctgaagacgtggaagtttcttagatattaatatagaaacaaagctaatttttgttaaaagtattttcaggatcaagtaatgtggttgactgcactttgtctttaagatgacgaaaggttagtgctttttaaattggagtttaaaaataactgagtaatgaattgacagtcactgaatgactgaacagaggacaaaccctggaaaatacaaataagaattctaaaggaatttgaatgctacgcttttcataatatagtgatgatacatgaagcacattctaattggaataacctgtatcctaccttttgataattgagatgtcagattggtgagagattaggtagacatattgaggactgtaacactgatagttaatatctggtttcgtgcttagagagcaaaccaagttaaatttggtgtgacctgggaatagatgaagtttgttgacaagtagaaagtaacacagtgcactgagtattgaccgttaagtactctgtttgcgttttactcctactgtcaagatttmaactcactagacactgtcttaacacatcttagatatctctttcctatgagtataacttgcttttgttttctttttgctgtgtttactcacatgtttttatagtcaaaagaaacttgtcaggtgaaaatataatggtgaattttaaaatgaaactcatggctgttttactttcaactgctgttccaataatgtctctaacyaccttacatgctcagtaaatgtctgctgtgactgcttttggttttacttgatgatgacagctctagagatggaaagaaatgtcaccaaatgtattttaaggataaaaatcttaccaaattgtgtttgtgaatatgaagtttggcagtaactactgatttttcaaagatgctttgtagcatttttaaagtcaaagagccattgatatgaattagaaacttcaaacttaaggaatttttaggagtcatggaaaagatcagtatttggaatatatgccagaagtcatgtgttttataagtagaatattataggttaacagtctaatttttgtttttttaattgtgttcatcattaacataggtttttgattttgttgttacttttttaatgattctagggctgtgcttcctggaagtggtattatccatttcattatgcaccatttgcttcagactttgaaggcattgcagacatgccatctgattttgagaagggtacgaaaccggtaagcttaattacttaaagtcataaagtttatagaattctggattagataataatcttgrgtctttaatgttttttcttttttcagtttaaaccactagaacaacttatgggggtatttccagctgcaagtggtaattttctacctccatcatggcggaagctcatgagtgatcctgtgagtctcagtattttgagtgtgtgggtgacaggatttttgtcacattttattcatatcagttacaattgcttttgcagctgatagttaaaacagtgaagtacagaaacagtatgttttttactccaaacacacatatatttcctgctttctttggccctgcacagtaaatcagtttgttttggggagaaatttttttgtttagtttttgatttttttgtttgtttgtttgtaagacggagtcttgcactgttgcccaggctggattgcagtggcaccatcggctcactacaagctctgcctcccgggttcacgccattctcctgcctcagcctcctgagtagctgggactataggtgctcgccaccacgcccagctaattttttgtatttttagtagagatggggtttcaccttgttagccaggatggtcttgatctcgtgacctcgtgatctgcccacctcggcctcccaaagtgctgggattacaggcgtgagccaccgtgcctggccggggaaaaatttttgttctctggctacctgtaagtctttaattttatttgttccagccatatttggtagccaccagagatgaggaaactgccttacccaaaatcacctgtgaacttgttttgtatgctagctagaaagagtgagacccagccgggaagtaggaaatgttagagtacgtaaaccctttactttctgcctgyctgaagcccatagttgtcaattctaaaattcttctacagtaatgctttttcatcttttaaaataacattgttcattttgttttactatacttgggattaatgacctaatgtctcttaacattttttaaaaggaatgcactttattttctcatcagaccttataacttgaatgaaagtcatatcaaattctttataacagagatgtgtgacttctgttttgattctttacttttctccctaatataggattctagtataattgacttctatcctgaagattttgctattgatttgaatgggaagaaatatgcatggcaaggtaaaatttakacgttcttttctggtaaaactgtgaacaaacataatttttgaaatgaaataattctgtaaaagataaatattttagcctgggcaacatggtgaaatctcatttctacaaaaaatacaaaaattagcctggcgtggtggcttgcacctgtagtcccatctacttaggaggctgaggtgggaggattgcttgagtctgggaggtctkggttacagggagccacgattgcaccactgcattccagcctggaagacagagtgaggccctgtctcataaataaataaatgaataaataaatattttaaaaggtaaatattttgagaattatatgtgaaatgttgatatttctccatccaacctgggattagcaatgattaatagtaaatttaattataacattcttagaagcagtaaattgggttgaaataggttgataattacatcttttgtttcctttgtgattaattaatggggcttgttacattcagtcagtagctcattaacaccttttgaggttgctgagaaatacagaaacacagtagtatccatgtggagatttatgtatactccatggaaacttttgaaaaatatgctagaaacttttatgtagtttaaatacttgatgttgatcattacttttcctactagtttttcattccattaacagattttgtaggaatggctatataaaatttgtactaactttaaggtgtgtttaccactcaaccaatatgtaatgatgattgaatgtaaaatacaataaagaaatatcttggccgggcgcagtggctcgcgcctgtaatcccagcaatttgggaggccaaggcgggcggatcacgaggtcaggagatcgagaccatcctggctaacacagtgaaacacygtctctactagaaatacaaaaaattagcctggtgtggtggcrggcgcctgtagtcccagctactcgggaggcagaggcaggagaatggcgtgaacccgggaggcagagcttgcagtgagtcgagatagcaccactgcactccagcctgggcgacagagcaagactccgtctcaaaaaaaaaaaaaaaaaaaaaaaaaaaagaaatatctcttacacagtaaaccagctgttgtttcacactaaagtcatcctgcagcaaattatttaaccttttcttccaccatacattttcctagggtaataaacacatttggtaaaatcatattttcattttttacttattgttctctgtggttggaatggccaataaaatgacttacagagaatcttgagacaaagggggaataaataatacaatttacaaattgaaaaatcaggaggctttggagttgacttgatttatttagtagcagaaatatcatatcgcttcagtggaatgatcatggaagtgcacccattggggttatataagggttgtgtgcttcatgakcatgtattattacatgttaaatggattggagattcgggtttttcaaggtgctttgtggaggatgtcttgattaaagcagagagagaagatgcatgggacagtgagggatgtaaaaatactaagtaaattaagaagcaaatatatttttgtgtttgttaaataagtaaattattaaatcgttgtctgggtttattaagtagataattaaatatataaacatgcaggtgacttgtcaactctgtcattgtggtatacattatttctttcactgacaggatattttcaatataacttaactctaggggaaaagtgagataatgtacaagagttcagatttcttcacatcctctccaacatttgttattttgtttttattagtaataaccatgctaatgggtatgaatggtatttcattgtggtggcgatttgcattttcctaatgattagtgatactgaacatcgtttcatgtcctttttggccatttctaaatctttggagaaatgtctgttcaaatcctttgctcaattttgaattgggttgattttgttgttgcattatagaagttttttatatattctagacattaatcttttattggatatatgatttgcatgtattttctcttattctgtggattatcttttcaccctgtgatgatgtcctttgatgcacacaagtttttaattttgatgaaatcaagtttatcttttttgttgtttcctgtgcttttggtgtcatatccaagaaatctttaccaaatccgacatcatgaatcttttttcctatgtctgcttctaaaagttacacagttttagttcttacatttaaatctgatccattttgaattaatttttgtatatggtgtaaagtaatggtccaacttcattcttttgcatgtgcatatcagattttcccggcaccacttgttgaaaagaccattcttccccccattgaataagttggcactctttgttgaaaatattctgggctgtctattctagtccattgagctatgtgtttttccttatgccaatgctatactgttgtaattactgtcgctttgtagtgagttttgaagtcagaaattgtgtcttccaactttattcatattcaaggtcccttgagatttcacatgaattttaggatgggtttaaattttgacctcaaatatttttgtattttatacaatgttttatataaatatttttacttagcttagtagcgagaacacacttttcttgaggtaaaatttagtactgttgggaaatacagtttcttcctcatacatgtttttaaaacttacttagtgaaagtaatgataatacttagttaagctcttacctgggttgagcacatcttaatagaagataaactatatctggatacgtcaacatttttaaatgtgtgcttatcaacattatatgtaatttttttttttttaaagacagagtctcactctgttgcccaggctggagtgcagtgacgcgatctcggctcactgtaacctccgtctcacaggtccaagcaatttctcctgcctcagyctcctgagtagctgggattaccgccgtgtgccaccacacctgcctaatttttttgtattttttgtagaggtgggatttcaccatgttggccaggctggtctcgaactcctgacctcaggtgatccgcccacctcagcctcccaaagtgctgggattataggcgtgagccaccgcacccggcccaacacacgtaatttaaaagcagtatcgttttggtcaatttgcttagtactatatagatatatagcatagtagttttgatgctgtatattttatatatgaatagagaatttaagtaattccatcaagtcacacagtggcagagttaagacctgaactcagaaagtctgatactagagctcacatttgaagtgactgtgtaatacctaagttattaccagtacttgggctccctctgggtattgaaagaattcagtgagataatgcatgtaacataagaagtgttcagaaaacagtagctgctattctcatgtttactatcagctcactgtagctctgtcatatctggatgtaaggcattcctttctatgctggccagtagggctaatttattgcttagtaattttcttgctgttgagtagcacttcacattgttaactgattggatttagcttctggaattgatattgtagaaaagtcttattttatatatgtataatatttaatatataatatttaatatttaatatataatataatatatgtttatatatattttatatatatataaatataaataaatgtagtgggtaggatatatatatatatatmtcttaaatgtagtgggtagaaaacaagctagatgatgctgtagtttccccttgatatagttctcttaagtgtatgactaaataatgttttagcaatttcctgggtttttttcatgtgtttatcagtaattgaaatagcctgactcacatgttaggtattaagagccttgaaatcactcttttaggccattcaaaattcatactagaacttagtttctttttaacttaaaaagaaaaaaaaaagatcaggtgcagtggctcatgcttgtaatctcaggactttgggaggccaagttggaaggattgcttgaaacaaggaatttgagaccagcctgcgtaacacaaggagacctcatctctacaaaaaattttaaaaattagctgggtgtggtggtggcatgtgcctgtagtcccagctactcaggaggctgaagtgggaggattgcttgagcctgcaagtttgaggctgcagtgagcaatgatcgtgccactgcactccagcttgggtgacagagtgagaccctatcttaaaaaaaaaaaaaaaaacaactgttactaggtagtgaaattgaacatgattcctaaccttggaataattaattaagctaaataagacttggaaaccttttcatttctcataattttaaagggaataatcacaaataacagtggttttgagtagcagtagtttcagaattatttaacactatttagcatttgtctttgctgtgtattgtaaaatttttgtttagccaaaatactacttatactgtgtagagcagaaaatatatacgcttcaataactttgtatatttttcttatagcattgtattagtgatgtgcttctttgaaaattatgcttttgggtccaaataagtgcccttaatttcagcatactccagaggatcattttaagtctcaaatgaatagcctctgttctgtcccctgccccctaagttatttaagcaagtctttaaaatttttttgtatataaattaattagtaggctttaaaatgtaaaaagaatactatggaattttagagcaggaggagatctatgcattttggttgaacagaattgagtattttagttgaaatgctctcattttacaaaagatgaaaccaagtactagaaagaagaaaggacacactcaagccctagggagagtaactggcttgcttgggggcatcttagtaactaaagtgagaayatattactggtatccaggtagccatttgttcatttatttaaaatttttatcaccatggagttaagattcagaaaacatgattttccatataagccattttaagaatggaaaatacgtagaattttttcttctgcaactacaggggaaatattagcatctgagttttggcttaatgagacaataagagttcagttccaaaatgtttttgtatcagcaaggaaactctactagaaacgttcatttcgagcaatgataagttggaatttgggtgatcctggtagcaggggtggttcatttgcacttgttttttcaggtgttgctctcttgccattcgtggatgagcgaaggctacgagctgccctagaagaggtatacccagacctcactccagaagagagtaagaattatacttcttagttaacattgatctgtgtaatatacactttatatttctgtataaaattagaccttccttctcctgtttgtcagatttcccataaaggggatataaatcattgattttattttcttattacagacgttgactttgcttcttaattcattatctgtaagttgagtagtagttaaataaaatgttttaacttacaagtatttcttaaattttttaaaaagcaatacttcaacaatatcctttgacattttgattcttatatgacatgcacacacgaaagtatcttttgcctgttgggaagatattattcattttctccatctaccttcttccctactcctcctttctccccagtaataactactttgtttaaaaggttagggtgaaacaaaagcatatgctcttagagtgctaacttgaaatatgacataaaaggaggcaatttgtaatcaatactgacagtaaaaagtattcatattcggaaattgcaaagctgggctctattgaaaaatttaataccattataataagcctctagaaacaatttctgtatcaaaaagattgtcttttagaacaatcttttcatcaaatgacactgtatatgtttccttagggaatgattatgtatttcttatactaagaaaatgagtttattataaaaagaaaatattgccctttatcttgcagtatattcatacgtatttcagtgggttttttttcctgataactattgatctttttgaaacttttttgttaaaatatttttttccccatagaggcacatcacgcatttagatctatcactataattaaaaaattttttttaaattgatatgtaatagttacacatgtattttgggtccatgtgatattttgatacctatatacaatatgtgatcaaaatagggtaattgggatatccatcacctcacatttatcttttctttgtgttgggaacattacagtttctttcttctattttgaaatatgtaataaattactaacttctccacagtactatcaaatactagaacttactcttgtctaacctatcactttaaaattatttttcataaattttataattaagttcttaacacttagatgctttcccttgttttatgctcataaaaattggtcttgcaggtacaatttttttatgtgtaggtcttattcttttctttctccctagccagaagaaacagccttggaggtgatgtcttatttgtggggaaacatcacccactccatgacttcattttagagctgtaccagacaggttccacagaggtatgttacrcaatttggttaattagaaatgcactttttaaaattttggtaaaatatgcataacataaaatttaccattataaccatttttaagtggttattctgtggcattaagtatatttccagtgttgtataaccattagcactttttcagaactttttcatcttcccaaatagaatttctgtaccttttaaataatgttaaataatgtatcagaatttcatacctttttatggctgaataatactctatgtgtacttttttatccacttatctattggtaaatatttgggtttgtttctgccttttggctcttatgaatgatgctgctatgaacactcaagaatctgcttgagtcccagttttccattctttgcatatgagatcaggaatgcatttttccacagccagtggaggtaccccctgaactatgtcatgggattcaaggaaagttttctttggatgaagaagccattcttccagatcagtaagtttcattttgtatataattgaggtgactggaaggaagtttagttaggatttttttccttgttgtctaaatgtttattttctaataatagtgagaaaattgtatttaaaataagacaaaaccttgctgactgaaaaatgcttgggttcaaagcctagctcttcaaagtagctgtgtcaccttgtgcagggagctctgggagtccctttcaggatattctgaaggttaaaactcttttcataatgatactaagatgttacggtgttacttgcttttcttacactttctctcttgagtgcacagtggagttttccagaggcctctcaagagatagaagcagaggagagtagctattaaatagatactaaccagatattaatgagatttttgaaagtatacaacaatgacatcgttttgctttgtaaaaaaatagctttttatmagaatgttatttatgttaacatgtagggttatcttttagtattttaaaaatttcttagtcataatttttaatgggtaaatgttcataaatataaccactataaacaaaagccctttgagatttaagaatgtaaaagggttctgagaccagagtttgtgaaccacatgtcaagggtacatttccaggaatggaactgctggccatagagtatgtgtatcttcattttttttctaggtaatatttctaggaggtttgtcaaggtggttacactgtgttgtaatcccagtggcagtttgtgagagatcttgttgctctacgttttggcaaacccttgtcacagctttaatttctgtcagtctggtggatgctcattgacatcttgtggtttatagttgcagttctttgagtactaatgagattgaatgccttatggttaatagttaaccatttcatgtatgtggtacttactctttttttttaagatataaatggtttttattgtttttgttagtgcattctaatgatttatcttttctaaagactaacaaacatagcaacatcttatttccacttacctaaaaggttacagtttacagagagatgtttcttctcttgtttccttctagaatagtatgttctcctgttcctatgttaagggatctgacacagaacactgtagtcaggtaagttttccaaaattcatggcattcacccagaacacagctctgaacttgcaaatccattttaaaagacctttgattcacaaggaaatggcagctgttaatccaccaatgcttcgagattggagagtccctgtgttgcagaccttacagcagagcctcttaactctaaattatgtatattgttaaggttactgatttaacatgcttgcttatctgttttctggtttcccatgacaacctgtaattcttcctggattaggcaagtgggaggtaaagagtaggagtatctagcagtttgttatataggaacaaacagaactctacaccccagaggttcacacagcttccctgtattacaacagactattttacttatgtttataatcatggccctgcagagtttgaacacaaaaatattctgtagtatgttttagttaagatgacatagaacagaatatatttgtgaaaatttttattagcaattataaacttaaagggctaatttcttctctctggaaaactaatttatatctcagttctttggtgctgacagcattttctattgagtaaaaataatataaaatgtaatatgaccatttggactaaaatccaacaaattgactactcatttgtattttataatgacaaatcttgatgacagaatttagttgtcattttctccaatctttaggtaagactaaagcaaacacatctcaggtattcaagaatttgataaaagcctgctaatcctgaatcctccttttccatccatttttgtttctctccccctcaggaaatattttagatttttttttagatttccctttgtgaaatataaacatgtttatttcctatcttaaatggattcaggtagtaaatgattgccattctagaaaggcttttatttaaagaaaactactgtgaattcgaaaaatctttctggatgagttgcttacgtttatctttacgtataattttttgtttatctttacacctaatttgtcctggttctttgtctttgtgctcttttgttaagggtggagtacagaattgaaagccacgctcctaaacccatcacaaacaatctggctctgacagattcagtgtgaacactgtgtattaacccttggagtctctggctttcattaaagcattggcgcttcaggccaattaattccacggttctctctttggattgtcacatgtttgcttgtgcttctcaatttttctgcatatattcaagggccttcctgcctaaccctctagaaatagttaattctacttaactttctaattaggatagagaggcttgcccagaggagagttacagarttaatggaaacattttggattttttgtttggatgatgatgatgttggttggttgtttytgagcctaaaggggcctttggtatttagtacatactrtgttcacaagattattaaatttataaaacaggccgggcgcggtggctcacacctgtaatcccagcactttgggaggccagggtggtgggtggatcatctgagatcaggagttcaagactagcctggccaacatggtgaaaccctatctctactaaaactgcaaaaaattagctgggcatggtggtgcatgcctatagtcccagctactcaggaggctgaggtgagagaaccgcttgaacccaggaggccgaggcctcagtgagccaagatcacaccacttgggcaacagagcaagactccatctcaaaaaaaaaaaaaatgtataaaacaaatcccagatctaaatgcatattcaggtgtatattgaaaataactttataataaaatcaactaaattaggttaatttgctgaagatttgtgggagaccaaagttaacttttcccttaggtaaaagtaattttcagtgttttctctgaagggcggcaacattgaggcagagatccagtttttacagcaggtttttgcatgtttgttttagggcttgttgtacattccagtgttaaatttgctttataactttaacttacaattttcagatttaaaaaatctcagaatatactcaccagtcatttgccagttatttctcttttgactcctggcatttttttcctcttccttatttaaatacatctagtatcccatttgatatttgagaaatcgtttcctcaagttgagtttaggtaagttcttcccattgtattcattcttatctgtagtgctcagaaagtatgttatacaagctgttgaagtcccttaaattcgtagacagacccttagagaatatagtcaactctaacctaggagatcatatttttttcccatttctaattccacaaattattcaacatattagcttctgcatgtgagttttcctcccagtctgtcatctggagggtaagtgcatatgtgtgcttttactttttcaaggcctgatgcaccttggcagggccctggccctgtgcttgaacccccaggtcctcaggatgcttccttcctgcccaggctgatcccttcaataccctttgacctccgcctcttcctcctgttgtttggagtgctcttcctttcttttctccacctgccccatagcctgccgtttattgctttgcttttcttctaaagcataatttatacagtttttatatatgttgtttccagcagtagtgttgttaggttgttttttttttttttctcatagcacctagcagagttctaaacccatatttaaaaagctcagttgttcatagtgttgcaaccagtgtttgccaaagtctttgaagagcgtaaacttttttcttcagaggagtgtttcttagactttttgtattcacttttggatgaatcagacaagatatagaatgttttattccttcaaggagattttttgttttaatgtgaatgtgtatggagatggattttttaagtaactatttctgcagcatttgcaaggcttatgcttggcaagcagataactcaagatccaaagcctgaaggaagtggaatacatgcagtcagcagtggatttgatggtggaaaacagttgggagggtttcactttcgatgcttaattggttaacctcttctgatagaatgtcacaatcctataaactctttaagtgttttaaaatgtcaagtatatgaatcatgagattttcctgcaagaacagtttgcctttgtatgccaatttagcattaattatggaatgtatcagggaaaggttgtgtaaaaatgaaacttgatatttggagttttctgctttctttctgaattatgttaacactctctaacagtaatacttaaaatagcatttctaaggataattcttaaagcgaatcagaaaaaggtgttctatattccattccttttctattgagactttgctacagtattttcttcttaccagcagtgctgaaagtgctacttgtggtataaataaaagcactgttcagtttccttattttcaaccatgcttaggttttaaatttttatttactttgcccttratgtgtttatgaagacaatcaagcatttaaaatagtgaggttacctattaaggaaaggatctgttatgctacttgggggaaagctggtctggtacataaaagcttgatgagtcaacagtgtttcacctgcatttggaaaaagtggatgaaaatactgttgtttaaaaatacttcagtttacagaattagatgaagcaatacgaatctaaacacaagtctcttacctcagctggtcagactgttgagtccgtaggctgtattaactcatttccttcctctgcttctcagagcttgcttgagggtgcttctctctttacctcagtgttacttactacttccctagataagccttccacaagtaacccttttgcttctgatgatggaatttaaatgacatagacatgaaaaaaataaaagaccttcaaatgtttggatccatataaaaagttacctttctgagtctttgcctaatgggttcctgcttagtctgtgtgtttgacttttaggaagtttgtttgaatctgagttatggctgttatcacattggaaaaatacatttctaaaaacatagtagatcttagtatacatttttgggaacaaattaagatactaagaatctttcaacccttggaagcttaatccattttaggagagagtgtgtcttcaaattgttctcaaagatccaaggaaaaatgatattaatactttggtatcataaatagtgtcctcatctttgaatggaaacttccaaacttatttttagatactccttttctatctcctaatggtttgtattgtattaagtgtgtagatccttttgttgaatgtggttctgaggggaagtagggatgatcttggagactgtcctattgacttggaaagtttttccctttcagagcatgagcatgaataatggaattttaaaaacaattttattaaggaataattggaaaacaaatggatttgttttctcaaactttagtttcagctgtcttattaaatctcttgttataaccattctcctgcagaagtggttatctctgtgacsctgggattttctcttctccctgggagcttattaccttggctatttccttcattttcttagtttcaggtctttctgtgcatgacttggagatcttcatctgagctcgatctccattctagttccagccttaccatttcatttactttcccaacgttcccatccaagatgtgtgtcgaagactgttgcttaggctctgttggtgacctctttatgggtgtccctctgctctctcgcacactgctgctgggttgttctttctgaaattatctttgatcactttcacgtcctcattgactacttgcaaaggcatcacattatactcacacaaaccctccatgaccataacccacttctgttacctttcttcctgccccacttctgctcaaatgcgtttttactctaatttagcccttctcaactggagttccatgggagaattctgccttgagatcttaaagcatctgttgtatgtatcagattgtaggtagcagtttgtgtcctgtatctctagaatgatactagctatgttttttccttgggagaattgagaatgtactcactcatcattttttgtagggcttaattccctcccacatccccattgagaagggctgctccagtaaaactgtactgttccttggtcctgggaccctttccatatctttgttccatttgtttcctctgccaccctgtgaccaatcctgtctcatcttaaaccgcagcctcttggatgatgttttccttggtcctcaggtgaaataattccctccccgcagtacacacatagctttagcccacactgacaaagatgtttatatggaaggtgtatacacacacatgctttgactcagcatcttttctgtgcctgttgttgcattttccactttcttccttatttcccttattagaaggggaggcaggcttgatgcctggcggtgtgcataacctccctcccaccgtgaaccgtgcatgcrataggtattctaatagtttggcaaagtgctaaaaacgccctgctgaaacacagatacctgcttcaaaacactttatttgcaagtcttgctttgttacttgactttttatctgcaaagccctaatgagcacaaatacttaactaccattttctctgtcatcctcttaaacctttatcactgcctgtcctaccttgccctgccccatgccatcttgccagtacagaaaatctgagctaaagacagttgtcagtgaagagtgagttgtaagaagaactagttgagtaataagtattgttcagctgttgagcttatggtatatttattgtaagtgaatccatttttgtgtacttaaaatgaaaatttctgtaaagcagatagactctagttaaagtggcagtattcagaaagaaaactgctgtctaaaaatgtcaaccaggtcaataaaactttttttaaaaacctttttaactgactgtaagtgtaatcattggaggaattttgaaaaatatattaaaggaaacaagttactaacttatagagaaaaatcactgataatcgattgatgaatatgtctagtctgttgtatatatgtttcccatgtcattaaggtcattaagtattctgttactaaatttttttttttgagacggagtctcactctgtcgcccaggctggagtgcagtggtgtggtcttggctcactgcgacctctgcctctcaggttcacaccattctcctgcctcagcctcccgagtagctgggactacaggcgcccgccaccacgcccagctaattttttgtatttttagtagagatggggtttcactgtgttagccaggatggtctcgatctcctgaccttgtgagccactgcacccaaccttctattactaaatttttaaaaatattatctgagttcttcctttttaggaaggactagtttttttaaccagtccactgttattcatacacttgggttttacagtctttgaaacattatgaataatagtgttataagtatccttaagtataaatctggtgtataaccagagtcctggaagaagcattgctatgtcagaagacagacttaggtacttaccaacctttgggataggtaaacacacatacataccactaccacggctatcactaccagaaaagaagttcgacccagcttatactcaaagcctgagtgtatagcttttaaaaatagttatactgtccaggcgcggtggctcatgtctgtaatcccatcactttgggaagctgaggtgggtgggtcttatgagtccaggagttcaaggccatcctgggccatgtggggaaaccccatctctacaaaaaatacaaaaattagccgggcatggtgttgtgtacctgtagtctcagctatgagagaggctgaggtgagaggatctctgagcctgggaggttgagactgcaatgagctgtgagtgtgccactgcactccagcctgggcaacagggcgagacctgtctcaaaaaaaaaaaaaaaagcatatttgtgtagttttcaaatggtgaaaattattttattacttaaaaataacacattaggagagaagggtacaagggtccaactgtgaagtttaattttttttgttaagtccatcccccccgcaccatagatttcttagctatttgtgtgcattttttgattttgcaaatatttctattggtatatccatcttttctttattaaaataagagctaatctgcctcaagatgctttggggtttttgcagtggactgaacaaaattaaaggttattttatttttattttttgttgttgtaaacctcttcgacctgtctacaatatcattttgaaatttgagttggggcaatgtctgttacttctctgtcatcaccaatagtcagctagaacataacttttccctcagagaaagttacatgaaggttatatgtaccaggaattagagacagtttggtgaggaagacatttagccatttgtcaaacccatttattaactaaaataatttttggagaggacttaaacatgaaaaatacctcagtctacatgataagacaggctgatataatcagatcattgaattgtttcttgttcttttccagtattaattttaaagacccacagtttgctgaagattacatttttaaagctgtaatgcttccaggagcaaggtaacaacagtaaattacctagatttattttgtacaaatggttttcatccctattactaagtgttgtctttttaaatggtcagaaagccagcagcagtactgaaacctagtgaytgggaaaaatccagcaatggacggcagtggaagcctcagcttggctttaaccgtgaccggaggcctgtgcacctggatcaggcagccttcaggactttggggtgagttgtcagtttttagcccttgtatattttgctttttctgaatcatcccataaaacaagtcagtatttatgccatatatataaatttatgccatatatatatgattatatattatatatattatatataatatataattacatatataatatataattatatataatattatataatatataattatatatataatatatataatataatatatatataaaattataaatttatatatatataattacaggagtgagccaccgtgcccggccgaaacccagtattttcataaagtttatatatataatatatataaatatatattatatttatagtttatataatatatataaatatatattatatttatagtttatatatataacatatataaatatatattatatttatagtttatatatataacatatataaatatatatttatagtttatataatatatataaatatatattatatttatagtttatatatataatatagtttatatatatatattatatatataaactttatgaaaatactgggtttgggccgggcacggtggctcgctcctgtaatcccagcactttgggaggctgaggcaggcagatcatgagatcaggagatcaagaccatcctggctaacacagtgaaaccccgtctctactaaacaaaatacaaaaagttatctgggcatggtggcaggcgcctggcgcctgtagacccagctagttggcaggctgaggcaggggaatggcatgaacctgggaggcggagcttgcagtgagctgagattgcgtcactgcactccagcctgggcgacagagggagacttccgtctcaaccaaaaaaaaaaaaagggaaaaaaagaaaatactgagtttgtttcacacatatatttttgtctcaccaccatggcagaccaccactactactatgtcctctcataacattgcttacatacttaaaaccaagcaaagagtggagctccatctttaaaacctaaacaggcattttggacaacacattattgtacaccacaaatatctaacagaccataaaatacaactgttttgtaagtattttaataactttgatactgctctgcttttcttcatttttaaaaattcacttctccatttatgtattgctatatgtgttgcatgagaattctattactttctctaagacgttttactgtttttctgactcttacttcaagggaataaaacctcctctttacccgcaagaaagttttagctgaattaattaatgtatgatggagactctttttcaagtgttaaccaatatattggtgtagaagcctccagtctcttaaatttttgtttgcccagtgcttgaacagtggtatctcgtagttgcttgaattggcatttccctgcctactgaaattatcttttaatatgtttattagtaatttgtatttcctctcctatgaatttccagtttttatcctttgccctttttagttaactgaattgtctttttcctagctgtagaagatactatagagagaggggacttgtaaacaataacaggtaaagctggtatagaaagagcaacaggcttgccataatgttaatgagttaggattcatgcattaataatgataacttataaatagatgtttccagttagtggggaaaccttaagattcaaaaaattatttaggcagaaggtcaccatcaacatgtaatttatacagcaaatattaagagggatagtgtggcagagtgattaagagcatgggctttagatcttaaatgtctggattcagatacctttttttttttttaaccacttaatatacttgtgaactttaccgaaccactctgtgcctccatttccttatgtctgaggtggagacagtaattatacctacatattcttaaaattatgaagttataagaattaagtgagcctaatgtctgtcaagcgcttagggtagttcctaaacactatgtaaacattagttgttattgtcattgttttggaaaaatcttcattcttagtagcagtaaaagaaatgcagatttaaaatagtcttaactttttgcattatttcaactgttttggaaagcaacatagtatttcctctgaatagagcagtgagttcagaagatactcttaacctttggtccaaattcctacctcttggatttgtgaggaggaaataattttagatgagcataattatatgcccaaatatttatattgtattgtaatctatactactagtacgaaatgagagaaatggtttagtaaagtataagacatcaacatagtaaagtattctataggtttatgtgttggaattacaaagatgaagaaaagatacaggcaagtatttgatatagtaaattaaaaatagcaagatgtagagtagtcatgtatacagtgatagcaagaacatggatccttaaggacaaaactgaaacataatgcaaaaaaagaaaaatatgcaaattatttttcgtatgatgtaagttgtaaatatttaaatggttatcaattaagagtcttggtgtggcagatgaacatttgctatcactattaccattatgtagttttgagctttaattataaaccacctttttgtttgtattatcttaatcagatctgttagtgaagacgtggctatgagcatttgttttatttgtgtcagctgtgttatgatgggtatatcactatacaatttttttttcttgtgttgggtccttttatagccatgtgatgccaagaggctcaggaactggcatttacagcaatgctgcaccaccacctgtgacttaccagggaaacttatacaggccgcttttgagaggacaagcccagattccaaaacttatgtcaagtaagcttttacaaatcggttattttacattataaattaaatatcacagcaaatgttggtttctaatcttctttgctgaaaaagatttgttgtatcagtgcagacagtgaactttaaaaacatgtaagttagaagagttgtgagagaataccttatgcaaaatctttcatacattttttatctttatttttgtgggtacattgtagctgtatatatttatggggaacatgagatattttgacacaggcatacaatgagtaataatcacatcagggtagatggggtatccatcacctctagcatttatcttttgtgttagaaataatccaattatattcttaattattttgaaatgtacaattaaattattgactatggtcatcctgctgtgctatcaaatactagatcttattcattgtttctaactattttttcatagccattaaccatcctcccctccccaacccttcccctactacccttcccagcctctggtaaccatccttctactctctgtctccacgagttcagttgttttaatttgtagctcccacaaatagtgagaacatgcaaagtttgtctttttgtgcctgacttgtttcatgtaacataacgacctccgtttccatccacattgttacaggtgacaagatctcattcttttttgtggctgaacagtactccattgtgtatatgtaccacattttatttatccattcatctgttgatgcacacttaggttgcttccaaatcttggctactgtgaatagtgctgcagtaaatgtgggagtgcagatgtctccttgacgtactgatttccctgttttggggtatatacctagcattagggattgctggatcatatggtagctctatactaatttacattcccaccagtggtccatgagagttcccttttctccatatcctcactggcatttgttattgcctgtcttttggataaaagccattttaactggggcaagatgatacctcattgtagttctgattttcatttctctgatcatcagtgatgttgagcaactttttatatacctgtttgccatttgtgtgtcttttgagaaatgtctattcagatattttgcccactttaaaatcagattattaggtttttttcctatagagttgtttgagctccttacatattctggttattaaactcttgtcaaatggatagtttgcagatattttctctcattccatgggttgtctcttcactttgctgattgtttcctttgctgtgcagaagctttttaacttgatgtgattacatttgttcatttttgctttggttgcctgtgcttgtggggtattgctcaagaaatgtttgcccaaaccaatatcctaaagattttccccaaagttttgttgtagcagtttcatagatttaagtctttaaactatttttatttgattttttatatgatgagagataaatttatggttttattcttctgcatatggatatccagttttcccagcaccatttattgaagagactgtcctttcctcagtgtatgttcttggttcctttgtcgaaaatgagttcactgtagatgtatggatttatttctgggttctctgttgtattccattggtctgttatctgttttgatgccggtaccatactgttgtggttactattgctctgtagtataatttgaagtcaggtaatgtgattattccagctttgttctttttgctcaggataactttgattattctgggtctgtttttcatcttgactatatatagttaaatgaataaggtaatttggatttcttccttaatcttcacttaaaatctgtttctcagttaacacaggcaaaaaaaagtatgaggaaatgattgcaatttatttaattaatacaagtataattaaatcagatatggtagatatggatcgtcatcacttagttgcctgaaagacaaaggtgtccctttcttgattcaaattgtatctcagtgctacctacaatatagccagggactgctttaggtagactatacctttaaccctatatttctggaagacattagtctttccttaacccctcataatctgttttgtggacaggtcagaaatgttgaccacaaaaataattaacatggcatttggattgcagtgggaaagggaaaagatagttgaatgttagacttcatagattttacattgattttaaattgtgtccccatttaatgttatttttgagctccattgttatgcccatttatcaaagaattgtaagtcatgtgccagtgtttgtttctcaaaatgaatgtcttcatgaaggctttgtttctccattcctggttgtctggttgccacaagggcagcatgggggagaagaaacagtgtggcaagatgctcacgtttgttaaatctgagtgtcatatcattaaaacatttttttctaaatgtttgaaatatttcataaaaatttgatttccaaaaaacagagtgatactttgttatagatacccctcagagctgtttttaaaccgaagctgtacttatgaaagaacgtgccaggttaaaatggataattgatgggaaatatttgtactatgcacctagcactgttgtaatgctagttaagttacacaccagaagtccagattttctggatgtagtacccaagaagaaattggttctataggtcttactctttcagggccctctgtttttagtgtattcactctctgtctctgttcctctctctggcagtgtagctttgctgtatagcttaatgacattgagtggagctttgtgaggctctatcatgcaaactatggacttgtgttcagtgaagcacagaaggggcacagaggtacagagtcagtggtcctgtgggaatctgcttggtgcagtggctaacagctgcttcccgtaagatttagcaaataacatttctaggtatttccatgtattcagtatcaagtcataccatgtacaacaggagagtctaatcattttgaaggagctgtctttgccctaagattttactaataaatggtgaaagcatatccaacatatttttaaagccagctgttattgacacattccttatcagtttcttttttcttgtgactttttaccatttacatggataccatggccttttgcttctagcagaaggatcatgttccaataataagggaaagaagccagaaggttcttttatttattagctttacaccaaaggagagaatttcatgcccttaggggcctacagttctatagttcttcgtctgccttctttggaaatagacaactcttgtttgcatctgtgtattttatttcaaataatggagtcccctctctacttttattaatattactttggttaaataactccttatttgccattgttgtggctgttattagatttaatgtgtacttacaaagtacaaaatacttacagactttaattagaatgtattccagttagaatatctttatttcagttacgtcatgaaaaaattgggagatatgttttgtaaagtagggattgatttagagcaagaaacaagtaccctctgcctcgtgacttgtaaacattgactcaactgaggattagtgctgggactctaatgacatttaacatcttttcaaagggcacaggaatgggaggagtgaaaaagtttatggacaaaaaattggcaatcatgtgatatttaaattgagccaacaagtggggaatttgggctcctctaggctgagagaaaattatgagctttgaagtacatggcaagtagttgggtggtgttaagcatagcataactggtacaaaattagactgggagcatacttggaacagattatgaggggaggagagctaatttttaaaatatttttagtgatttttaaatatatttttaaaatgcatttttaactacagtacatgttaattgaataaaatgtggcatgtagcaataaaacataaaaaacacccataattccacagtcccgaaataagcagtgtttctttttattatttcatgtgtgcaagttttgaaaattagattattgtacgtgtatttttacatatagttttttattgaaatgtaacatatgtaaagtgctaaatcgaaccgtacagtgtagtttttatgaaatagatatattcatgtattcaccattcagattcagtagaaacgtgtcagtcctcagaagccccccattgtgtcctttccaggcactaccccctgcccattaaagggaaccactatcctgactgcagtatcatagtatcatacattacctttttgtttttttaacattacctaatagtttaaaaagctattacatgactacccttttaaaagcttgcctttttttcagtctttgtttctgagatttatattgcttgtagcagtagttcatccgttttctttttcttttttttggtctccctgagatggggtcttgctctgttgcccaggctggagtgcagtggcacaatcttggctcaccacaacctccaccttttaggttcaagcagttctgcctcagcctcctgtgtagctgggattacaggcatgtgccaccacacctggctaatttttgtatttttagtagagatggggtttcaccatgttggccaggctggtctccaactcctgacctcgtgatctgcccgcctcgttctcacaaagcgccgtgattacaggcatgagccaccgcgcccagcagttcatctgttttcattgcttatagtgttaaatcataggactatatcaccatttatttacttatccagtagcatttgggttggtttctggtttgaggttgctggattggactgctgtgaaactgtgcgtccttcaatgcacatatgtaaacactcatgatggatatgtactccataggagtggaattgcaagactgtaggattgtgtgtatgttcagctttagtgaatgaaagtgccagacacattttccaaattacattcagtttgtatgaatttacactcctccagcagtgtaggagagttctggttgcttcatgttgttgccaacccttggtgttgtcagtctttgcacttttagctatttgactaagcagggagtgaatatctcaccgagcttttagttggcatcttcctggtgactaagtggagcattttttaaaatgtttattgaccatttggatatttttgtttgtgtgatggtagtgttcaaggtttgtgtggtttttttaaattgggttgtctatctttttgttttgtaggcgttcttatattctggttatgagagtagttttatattggaaatatctttttccacttggcaatttgccttttcgctttattattgctgtcatatgatgaacagaggtttatgccagcatttagggaatgtgggtgaaggggatgtgggaattctttgtactcatcttgtaacttttaagtttgaaatcatcacaataaaaaattcaggacaaaaagaattaatactatataattgatgtgttttgatgttttaagtaacagtatcttaaatatcactttctaattgcttgtttatatgtagaaataaagttgatttttttgatatttgtatctgacatccttactagattcatttcttctaatagtttatatgttctttgaaatctttttgtgtacacaattatgtcatctccaagtagtgaccattttatttatttattttctaatcttaatgccttttttgtttgttttttgttttgctttattgcacaagctaggacctctcataattaatagaagtgatgatggtagatatttcattcccaatcagttttaagggggagacttttactgtatcatcattaaatatgaggtttgctgcagtttttttctgtgtagataacctttatcacactgaggaagttcttctattctttgtttctagtgggtattgaattttatcagatgcttttttctctaaaacctgggggttttgtttgttgttttttctttgttgtgttaatatggtaaattacactgattgattttgaaatattaaaccaacatggcatttctggagtaaacctaatttctggaatatatcatctttttatatgtcactacattctatgtgtcagtgtatggtgggatttttaaaatctatgtattatgagagagattagttttatttcccttttttggacgttctggggtagggtttttctggccttataaaacaaattagaaaatattttctacatttttgttctctgtatgggttatcgttagattgtcgtcatttcttaatttttagaagaattcagtggccaagccagttgggcttagagattcctttatgaaaaggttttcaattatagattcaaattttttagttctggcttttcagatttttcagtaattcttatgttggttttggtaagttcttttttttttttttttttttttttttggggggaatgtgcccattctaaaatttcaaatttattgccagaaatttttcataagatttttaatgactgtaagacttcaaaattaagtgctgatactggtaatatatagtcactcttcttttcttgattagtgttgctagaatctatttaattttttttttttgagaacctgtttaattttattgtttttttttcctcccattgaastaacctttagctttgttgatatatagatatttgttcttttccctccatgtacatttgttttctattgatttctgcttttgtcttcattattctcttctacttttttgggggattaaattggcattctttttccaagtttttgagatggagacttaggtaatttatttttggtcttttccaatatatgcacttcagtgttacagatttctctctaatcactttagccttatcccacaaagtttggtctcacatatttattatcatttagttcatggtattttctgatttttattttttattatgtacccatggattatttagaagtatattgcttaattttttttttaatttatagggcttttccaataatcttttaaaaatatatttatttcttaactgcaggctaaatttctagaaatggtattgctggatcagaaggtatggtgaatttctagacttttggtcagtatcaccacattaacctctaaataagagtataccaatttgtacttcctacaatagcatatgagaatgtctaatatcccactcccaccaataccaggtgtttttatttatttatttatttatttatttatttatttatttatttatttatttgagacggagtctctctctgtcgcccaggctggagtgcagtggcgcaatctcggctcactgcaagctccrcctcccgggttcatgccattctcctgcctcagcctcctgagtagctcggactacaggcgcccgccactacactcggctaattttttgtgtttttagtagagacggggtttcaccgcgttagccaggatggtctcgatctcctgacctcgtgatccgtccgcctcggcctcccaaagtgctgggattacaggcgtgagccactgcccccagccaccaggtgttattttttaaaagttcttggccgggtgcagtggctcacacctgtaatccaagcacagatttaaccaggcgtggtggtatgtgcctgtagtctcagctactcaggaggctgtggtgagaggattggttgagccccgggagtttgaggctgcagtgagctatgatagcccactgccctccagcctgggtaacagcaagaccctgtctctttaacataaaataaataaagttcttgctaatttgataaggaataatgtgtctttgttttaagatatgatttttcaatttctgctttggtcatatttttactgaccagtttttcttttgtaagttggctgttcttgtcccttgctgatttaatttgggcactagtctgtttgtttataaggttttaaaaactctagaagaattaaccagatacctctccattgtagaaccacaactctgtgggttaaggagagatgatgagggtctgaactacactggcagagtggatccaaagtccggaaggtgggaggaagggaaggctgaaagtctggataattgaatatgaagagtgaggaggagagggagaagggaatgaagagtcctgtgcgttcactgtgatgcctgggtgcttactgaggcctttcacagagtttggaaacccaggagggtgaaggaatatgaaagaatgtgatgagtgagtttgtgggggtcaaagtgcctgaaatactttagaggcatctgtgctaggtagtcataggagtcaggttcttgctcaagagagagaggatgtagttggagagaaatttggggattgtctgcatataaactagaaacataaaagctcaaaaaagagttgaatagattgatggatttcgattgctcttggttataaaaaaaaccttggaaagcttgggttaagagtttggacttcctagaaggcaaccatgtcatttcacaaatcattccctgatacttttgtaagaaatgtattggataaataattagcttcatctagaatggtcattaaagtatgataagttcaggcaaatgctgcagacaatgaagaaaggaaatctgatattttcctaatattctttaagcatagtccaacatatgatttgtcggktttttctttttttttttttttttttttttttttggtcagtcttgctttgccacccaggctggagtgcagtggcgcaatctcagctcgctatacctctgccttccaggttcaagtgattctcctgccttagcctcccaggtagctgggattacaagtatgcaccaccatgcccagctactttttgtatttttagtagagtcagggttttgccatattggccaggctggtctcaaatttcctggcctcaagtgatctgcctgcctcagcctcccaaagtgttgggattacaggcgtgagccaccacgtccggcctgtgttttttttttttcttttagtttactgtcattaagacttctgacatatttattttgtgatcttgttacttctagattcaatatttgtgtagaaccagtcttcacctatgtatcaatctttcatccattcatccacatcttgctataagaggaagaaaaacacaaaaggaagagagatagagggcaaggaaaagcatccttaagatgatttggacttggatggacgggattgtagagtgaatctaagcgccacatctctctgttgcttcctctggctatgagggcagagaggtacttttttgtccctagggagataggcttgaccaggaaggggacctggttcatttcacccaggctgtcacggcttcgagagcacctctccgctctttccgtccctcgacagaccggctgatctctttgaagtgatgttgggttttggtttgtgcttcaggaaccgctgatactgatttttatctgatcccttctctttacattttaagtgccagattttgaggggtagtattatccttttaaaaagagcagagattccagtgttttagccaagatgttttcttattttcttcctataaatcctgtatttgcctagatgcttacaactaaaatgtgtgttatttttctttcctatcctaattggatatgagtaataatgtcggttgtaaacctttaagatgttgagagtagttgttaaaccccccatccagtcttgttgaaactgtaagtttctgagcctcctgattaagcagcacaaaatcatgggtggttctcctctgcgtcttctgaaataaattaacatgaagtgccatctcaaccgacagcataaatgaatgtgaaactttgagattgcacagtgtagtagagagtggttacggggacatagcccctggcctcactctgtgacctctgacaggtttggtcattgccccagtttcctcatctcgaaaatagtacagaggataagaatatttacctgacaaaataaccagactaaatgaatttaagtagctaagcacttaaaatagtacgttgtacataataagtactgtgaaagtattaagtgataaaagatcatctttccttttatagaattttgaactttaaaatttagtcaaatagcttgttttagtaagattgagttctaagccatttattcagtctaaaatatttttagtatcataatcattttcttcgtgtagtatgaaattgcactcaagaagggccatttggtcaaactgacaactgtcaagtgtctgctgtaggtatttcttattgttggtgtttgatttgtctttgatgtgtcagttttggctgatgagtaattgtctgagtactgataacttgttggaatcgagtgtagccctgagtactcagtctgaataaagcatttggtttctgtagcccagagaaccttaaatgtgacttctcttcattttagtctgtaaacttgtcarttagccacgttgaaaagtgatttttgactagtgctatcagtaaacatggaatcttttctgtgattgccacgctgattaggtaaattgtcacttgagaagctattggcgaagcttggtttacgtggccttagagctctagaaaagggataagtttttaaagaccaaaggaaaaaattttccactctcgcctgtaccttctgaagtgcaattcactgtctcagaattttttttcttcctctcaaatgggtcttctgttagagccatacaaatgaatgataataagtttgttttaccatctacttcattacagatcagccaggaaatacttctgctttatgaatacttccaggttatatatgttactaagagccatatgaagaaatttggttaaaaatagccttgaaatatttctttgagccttttttctttttggattgaaaacaaggagtgttttaacagttgcatcagagtttattgaaagttttggaaaatttgcttaggttttaacaaaaaactgtaatttttgtatgtgctgagtttatatggaaaaagaaaattgtcctggaggtgagagatagaaaatggaaaatagagaggcacctggcacactagaagtgatatattagaaatgtttgctgttttttaagacatttctagttgtataggttagacaactagttgtataggttagacaattatttcctcctccaaaaaaagcatttacacttagtaaactttacattccagttctacttagaaatactgctgtgcttaatctaagaatagcatgtttgagtctaatgaatatatattatgggtggtgatggcttcatctccattagcacagtttctaggacaaaatgtacaagtttttttcccatctttatttttcttaaaacattagattgtttctgaaggtttctcttaatgtagctgtatctttgtattgtcttcattcgattttaaatttattagggagccactgtggaagctttcgtaagtaccatggagaatgtgtatcctgcgattataccatacataaaaagacaccaggcaagcacaatatggaattaagtcctaatggtaaaaaggggtatgtttccagggtaaccgcagtgattccaggggatgtgaagtagaggggtccggatgaatatttgctgtatttcttttgacttctgttacatttgcaaattttgtatatataagggcactaaaatgaaatacttctgggaacattttaactgattctcactaaactaattttgtacatgagctgaaamagtggctcaaacattgattttactttcagtagattactttctcacaaatggtaactcattgaaattcatatatgtaaatgtatcttaagttttcccatagaaataaaccatacaaatgaaatgattgctattattgtaagaacttcttacttttatctcttcagaaaattgattttctgatagtgtatagtctgtagtaatgactcagaacttactctgggcgtagggtggggaactgtcttcctctgttttctgtggagtgtgtagtagtcagcatcctccacattgttactcggtttgactgctagtagtttggtttttaagaaataaaaaaggaacttaattccaattgactaaagataccaccttttaattcacaatgggaatctgcctggaagtgacagctggtgaagggcttcctgcacctttctgagaggtgggtttggcacccatgggtatggctgcagaaacttttccagctggccatggactgatgtgggagtgggctgtggcagctgcagatggctgccctccttcaggtagtttgtccacataaggaaaactttcttcagtctggccttctcagcatgtcgagatgggaaggaagccagggctgaggctgccagttatgagctagaatcattgtgagcagctagatattttattgattccgtgttctttgtcatggggcttttaaagcatgattctacttttttctttctctctctttcttaagtaaaaaccatatatatttttggtttctaaccagagataagctttcaactcttcttttctttaagtaattttgaaaagcatttttctagtttgtgtttctattaaaatgtgagcctgaatacattatggtaagcgttgtccttggtctcgggagtctagaggaggttactgtcctcacatggtgaactcattagacaacttctggaaccagcagttttaattaggtcacagcagaccccgctgaaggtgaagtgactgcaagctgtggttcgctgatatagacaggcccagatgtttctttcatcctatatccgtcagtttatgtagaagagcaggagccatttaattgtttcttctagttagatgatgttgctagttcagctttgcgttacaagaaaactatcagaaaagatggagaagtgggtggtcccttcattaatgtgttttcttggtttgtgttggagagattgtgtgtgctctgcttaatgttaatgaaagcaatttatgccttcagaaggaaaatttcaggatttctgttgtagatactattcattcagtttgtattaattctatttatggaaaagaactaaacctttccttttccacagcatttaaaatataaatgtaaaaactgtgtgtaatgtatgtatctttacttacacacacatacacacacacacacacacacacaggattatgtgagtttagtgaccaggggttactaaacctattttgttatcaaaggaaaaataataaaaaatttgctgaccttgttagttacttacctttttacatttgtggtgtgtgttattatgatactagtttatttggtttacagtctttctcagatttttttcaagaacttttaattataaaatattgggtagttgaatattggttacttttaaaaatcttcttaaccctttcctgtttctttttcagatatgaggccccaggattcctggcgaggtcctcctccccttttccagcagcaaaggtttgacaggtaatattaaagtagacatgacttttaaatactttctgacaccaacatttggggtttatgggttttatggaagctaaaacctctgtggtttgaaatgtactttttcccaccaaaaacaatttcccttgtgcctatcctttaagaaaatatatagctaatactttgaattaaaagactcatgtttaatatactttcttacttttcttggttcttggcctttattttattgatgcttttgagatgccctgaaaaatgcaacacagcttaaaactgtattaggttttggtcaggctaaacaaatttctttttagaagggttgtgcagcttaatgaggcataactaatggtgttccacttttatcatttctgtgcgggcaatgcagcgttagtacagaccaaccattgattcttgctacaaacctcttgaagtcctaatcagcttctttggtacaactttttcagggctgacaagcctattgtagggcagtgtcactgtaggtcagtagttattagttgccactgaaaacagtttctttaactacttaagactgaactgaattaaacgcagaagggactcagaagaggattatgggatctgcagtctaataagtaccatggactaggaagaatgtgacatggtttaataacaagggatgtttaacatgtattccttcattgataagttgtgtgctcctaagtccgatggactctgtacgacaagacaactaggcacattatgaataattaacatctgtagaataatttttaaaggccagctttaagatgtatcatttcatgatggttttgccaacatcagtaaatgcaaaaacaaattaagccccatcataataaggctttcttttttgccttcccagttttaatctgttttattctcttctcctctgccatgtttacagtctctaatctgttcacatctgaaatgaatagtgtttttataaatgggattctaaatgcagcttcccttttaagaaaactttataactctttagagactccagaactttatttcattgttatcttcaagaggataaaaggaatcatgttattcgatgtttactaatagtgtcaacttagtgcaagtctcattaaatgcaatacgactagcaatgtgtgtattaatgttttgattttagtatatgttctgaaagcgcacagtatgtgctgtttcattttcctcagtaccacaaattttaagcagaaattaagtaagtaaggggtaaatttttcctaaattatatacttggtttctctatcttattgctcactttccatactaataataatggcaaatgtttgtctgcttacaaagtgttaacactgtgttaacatcctttaataagaatgatttcatttattcctcctagcagtgcattgaaatagatgctgttatgtttacatttttgcaaatgaagaaagtgaggcacagagaagttcagcagcttacctaaggtcactcttttgtgccattctttaccaagaaacttttcactggaacaaaacttaccagaatatttactctgagcgtaatataaagacgtagggacttcaaaggaagtaaaggatctgtttccacttctaaggccccaacagctttcctcccctctgttcacattaaaagttttcctaagatcatcatcattgtcccttcccttaccctgctgtccatcaggttttgttcttattctaccctagccaagtactagtattattctgactttgtgaacccagcaggttagtgacaagttttgtgggaatgttttttggtttagttttagtcagatacttaaaattatgcctgaaagcaaaaggtaaatgtgagcataatagagttctatcataaaagtcttacatcacagacatttaagaaagataccattttgttccagaaccaggttttaccagttcttagttcagtatgtttccacgacgctactgtttgttgagaatcctattaagagaattttgagtgtcttttttttattacattgcatttcttgaataatttcctactttaagatggtatgtataatccatatatccagtagatttaaaaatacaacaggaacatcctcccaacacagacacagcctagagttaatagatacccagcattggagttccctttgtcacttgagttttgccacattgtttgggttcttcttgtcaatggaggcctctttttcagtcatttgcaaggcagccatttagttttttacctatgagtgttaagctcaatcatgaaaaatcttttaaataaaactccgattttaccatatgcatacatttaaaatattcaaattggtagtagttcacatctccagtaactttccaaaacaatttggaaacttaaaaaaattgttgctatctacgatgccaaatggctcaaataagttgccttatttattaacttcttttattgatttattgattgagacaaggtctcactctgtcacccaggctggagtgtaatgtcatgatcttggctcactgcagcttctgccatccaggttcaagtgattctgatgcttcagccttccaagtagctgggactacaggctcccacaccaccatgcctggctgatttttgtatttttagtagagacggggttttcccatgttgcctaggctggtctcaaactcctgggctgaagtgatctgcctgcctcggcctcctggagtgccgggattacaggctgagttactgtgcctggcctaattgctaatttttagaatttaggatatgtcartttctgtgcttctatcccagattttaaaacataatttcctaggcaaatttttagttttgtaagtatttgcaaaatatataattagtctagacatrtgataaacttgttgaaaataaaggcctttctgtcataaaagtcagaagaaggtagtacatgacatccttgctttgttcttctgtttaattttaattattgatgatttttttcataaaaattatatttgtcaaaaacattataagtaatcaattcaaacaaaaagaactttgcgtttttaaactgtggctttgttcttaacctgtttttggaacataaaatagttttgaattgcatttataatgtatattatttatgccagcagatcttcctaaaactcaattgaattttattattgtaagactcaaaagaaaaactgatcacagttaagatgtgaattgtgtttttagcccgtgggttttgcattaattggcccagttttgatgagactttggttacagcacaaaccttagtttagcccttcactcctgcagagactggaagagaccattcctatctctgcacacggagctcttcttgctaaaacagatggaggcattcttgctaaaatatatttgtgctagtaattgtcctgaaaaataattaaaagccctagccatatgcattttctttctgagataaaaacttatttttaattgtattctgaattacttataacacattgttattagagctctggtttcagctaccaactgtaaagaaaaactttagcctttctagagttctttagagagcagttcatctcttcgaatcatcacacaaaaataattatctctggtgttgttttaataaaaagaaggcaagctccaagtgaagggaggagagtgggggtagagaggatggattcaggcttgaatagctgtgagaagaatgctttacccaatgagcccagcgccgggcttttttcccctaagacctcggaagtgaaattcttatgctgatatggttataactgattaccagctagtcagcacttcagtgaatttaaagttttattgaattcctcctaacatggtcagtggccccaaagcttctgatgttcaagtatactggagcatttgcctctgtttattctttgtagtgccttccataaaatagaagttatggaaagtgccttaaggagaaagtaaagtcttaaatggtgattgcctttagaaggtatatccttgctacattgtttatgtgacagtttttaattaagttatgatttagtacattatacctgttgctttgcatctgcaaagttaaaatagtcacttgaagacaattaaaacatttctttcgactagtaatctgcgacagcaaactgggttataatagccgttgaatctgtgttcccatgtaaactgtacaccaaatgccagtcagcccatgccaattagtgctcatgttgctaggtcaccgtggtcaattgaaagctgcatcaatagaacttgaaaaggtttcctcccaatcagaccttctgacatattgaacagaataatggatgggaaaaaacagccaagtctcctaccctggattcaaaatactcagcagtaagaattcatttgcaacctgcaattaagtagaaagaatggatccaagaacgagtctggacatttttgaaaataaagcctcattctcctgtcttgtacatgtttactctttggatagcatcttaaatgtagccatcttggtgatcttgggtctacatctttaagtgactaaaaaggaaatttcccaattgaaaatgaacaaaataacttttaaaagtcagaacttctcagttgagtttaaacatccattgtaataaatgctgatgcttcatgaaacatgttagattatactggatataagggacacaaaggccattctgatactctgtatcccatatgataaatccaggtaaattggattgtactaaaatttggagatgatacctgccgattttaggctttgtgctrtataataggtgtggcttctgatgtaaaactggtactttcctacagaggcgttggggctgaacctctgctcccatggaaccggatgctgcaaacccagaatgcagccttccagccaaaccagtaccagatgctagctgggcctggtgggtatccacccagacgagatgatcgtggagggagacaggtaaatggttgtgggatgaaaagtatactgctcactttatatttcaacaagcctcacaggactccgtattttcttaccaacatttctggagaagacnctgatagagtagcttagagtagcttggctgaacttgggtctgtcattaaaaatgtatatgggttgagtacctgcttcactaaataggttatataccttgaagatgccaaagaatttctaacccaaaagccctttaaatcatagcagtcagtgataattagtccaagtatagtcagtcaccaaaacacattgtttttcctttaaggatattgttcttcaatagaacctagatccctcttaatgggtgatgattttctggaagctggaaagtaagtctgctttttcagctgttgtcttttagaagtcattttacaatgttgtcattttagaagtctcctgccttgattcatctgatatccctcctcataaaagaaatttctgcttgataatcttccacatatttttcttctcaatgtaagcagctgtatcactgaatgactatcataattcctagacaaatttagtatatgtaagcttcatgtccttctctttacagcatccagttttagcagcatttaagactgaggtctatttgacataatttcctccagcaatttgacaccctggccagtatttacatgctcttaatggaatccttactagagaacaagattagaatgctatgattcagagtaatgtgtatggagtttggcacctgcagtgatgtgaagtggtttttaaattgcttacctggtgttgcctccaggccttttgcagtgcttcacatattaattagtaagacctctcttctcacagctaaggaacatattttgtatgttttttgatgtattcttacaagtatctccaccttacaagaagataatcaccttaattgcaaataatttcttctgagagtattttgttacagtttatttgaatcagtttatcgaattttgctttgaattctttcagcccaggacctctaaaaatcgtgtcagtgaactaaggctctttatgttactatggttagatggcactaggccgtttcagtgatgagcatttttgaagtgaggactatttgtaactggaagaaaccttggagaatgtgtagtctagtcacctcattttccaagtcaggaactgaaaccctgaaaaccccacacggttcagcaggagaactggtagctggctgcctagactgctgaccccagttcatccattttcctctctcctttggagatcttccttttaaagtaactctgtgctgttacaggaggtaaaattcttatttacttagaagatataaaccaattggtaaatttattattcttttaggactttttgaaaataacatttcttctttctcagtccctttgccagggagatactttttattaaatcacaattgttgaagcactattaaattgcagaagtttgttgttaaaaacatagaatcattacttcattgtatttttagtaaagttttatatgaccaaacaaggccttagcctgcattctggccttgagtctgcacatgttcatgtttaaagtactgaagtgctctctgggtggcaaaatgaggtgggagggggttccatttcaaaaccctagaggcctaggaaaggacttataatgaagaggtgtcaggtttatcttttgttatacagaaatgttatttgcaaacatactaggatatgttataaaggtcacggctaatggattgtgtaataaccttaatatgtcatttaaagccctactatttgttgctaaataaaaaatccctaaaatcaattgctcatttggccttaactgacttagcaagctcttgccttggttaaagcaaagttactttccttgtgtaataagtctaaattgatgtgggtatcttaccacaaagtgacttgaattactactgctaggacagtgagaaaattgagaaccactgtctgtacatgttgtttacacagaacactttagttatttgtgtgcatttgtgattgttaaggttttttgttttatttttcagtaatagcatttgtgctagcctccaactttgcaacaagtctgtattaaagctctggatcaaagcaccttttatggggcctttccatgtgctgtacctttaacacatactcagtttccttatgatgtgtttttccatagaggtttaaagttaactgacttgcaggagtatcggtccagaaaataaactctttcttttgtttattttcagggatatcccagagaaggaaggaaataccctttgccaccaccctcaggaagatacaattggaattaagcttttgtaaagctttcccaaatcctttcatcattctacagttttatgctatttgtggaaagatttctttctcaagtagtagtttttaataaaactacagtactttgtgtatttcttttaactgtgtatatttctactgatctgatctcactgtttatgttgctttccaaagatgtatgttgcataatacagtggatctgaatttattattgcttataaaacacatttgatggaataggagtactggtttttcataatggttaaaaatgaaaccagctgtggatttcaaaacacagtktattctagatcatctaagatccatgctgatttttattgcacaagaattaggtttgaactcttgagctggaacctcagcaaactagagtatatattgttcagtatttctttggaaacatttcattaatgtacttgtcttacagaaatttctgaactttagtaaaaaaaaataaagttaaacttttaaaactctgttttgtgttgttattttgcagtatttcaactttgaaaatcttgaccaagcgtggttttttaaaattaacttttgcagaaaactatttctgtaatcagatgtccaaaccaaaggacaaagaagtcaatgaagaagtagattttaaaagatagggtcagcaagacataacaaaagctttaactttgttgtattatgtcagtgactgatctggctaactcagaaatctttgtgagataaattacatttttacaaatttaatgtagacttctccagttttaaggacttgttttaaatcttcaagttgacaattttaattaatggccaaatagtctatgctccttagcatatttttgtatgtcattagattgcaatttgtactcatgtttttccttgctactaagtacactataaattgcttaaatgtgtgtttggagttcacatacagcacttacatatgcattttcatttgattgccaaaacatatttagacacacatacagagactattgctttgtttcagtttttccctcctagcccaagattgtgaggtaaagcttctctttgacctcctgacttaggatatttttgctttaatattcaactgaagcacgcttgttaaacttagtctgtgggaaaaaaaaaaatctcacctcaaccttgaataggaaggtattttgtagctattgagttcattgctaatgatgggtgaccagagcaggatcctttattgttgagacaaagagtctctccatcaggaattaccaacccaacccttacataattgccttcgctcaacattcaagtgataatgccttctattaaatttctctgtaagtttatctcccaaatattaaaaatgtagacagccatctcagtaaagcattgcatattctaaaggagcttatagatgttttactgtttatagttcatagtcaaaacccacaattccactctttatattctcagacctttagttttggcttagttttaagctggcctgagactgactcagtttttgactgaatgtttaaagcactgtttggaagacatctgagcaaaaggcctgatggagaaactgatgacggcagatttcctctgcagaactggcaggtgttccctcgctgagccggcttcaggccctgctccgtgacctcacccttgcttcttcctctccatccttagtcttcatctctttccaacttggttccgcgtttgaatcttccaggaaaatgccctgcccatttcaatcagcaaaatgcttttcagagctttaatgtttaaagctgtaaatatctcctccaaattctgatgtaaaaataaattcgttgggccaattttaagtagttacttgtacgcaattatattctctttaaacggcacattttttcagggtctcctgttaaacaaaatcttagaacctggaaacagcctgactactctggggctaagggcccgtaatgagcagttgtcttccctttaaagatcaaatggggtaatgtatgttaatgtacaaagccgtctacaaactggtattagattgccatttagcgttacaaaggcaaattgggtgtaatgagcgataggttaattttcgtacgatgacgtgggatgccaggaacgggccgggtgaggccggggtccctgcactcctttgctgggcgcgcctggaccgaactgaagggcccgggcgccgcgacctcgcagccgggggcgggatggtggcggcgcccgggccccgcgtgctactcagagctcaggtcctaggtgcttggctcaactttctcccagcggggtcgggaagcgccaggccctcggtgcacgtggggcacgcgcccggcgcctgggtctcccctgcggctcgctagtcgcccggcccagcccgcagaccccgcggctggccctcccgggagccccgcgagccggccgcacgcacaggatgggcgcggaaagccccttcctctaccctcgggcgcaccctccttcctcgtccgcggcgccgcagcttctcaacctgccgctgcatctcaactccctgcaagcagcagagctgtagaataccagaaatggtcttccttccgaggctgccgttttaagttccaagtgtgaaagtaaccgaattttgctatgcttagaaatctaaaatctggacattccctgaagagtcaacttagagtccccagtttctcgatctggctccgtcccactgactgacgcctcctgcccaccccgaaaggatcctggagctgcgatctcgccagactctattcctggtgatccactgctctgctatttcccatcaggaaaaagtcaccaaacgaatgaactagcaaacggcccattctcgatggatttctcctccactcagtaaagcagaatcctcctgtggcttgtttctccacgccttatttatggaatgagggccaaaagagaacaggcttgaattgatgtgtatgaaataggaatatagctgttcactactgcaaaatagtttgcacaacttaaatttaggcaatgttcctagttcctagttaaacttttttagaagtcacctaaacaattactgaaggttacatggaatttcaaaaaacgaaaggcatttcattcaattgcaagtaaacattctaaagcaaaaacaaaaccaaacccacctctcccagaaacttccattacctctaaagttaaaaataataaaaacaaaagtgatcctgaaatcacaaagttatctcaatacttactggagagcgcaaattcctgatgggatgtgaatgcagttccccagtctaggcatcttctttgaaacttccccagatgttcaccaaatctcactagtagtgaaagggtatttatatttttaaaaatgtatcatcgttctctgtctcactgggttgcaggataataatagtgtttcaaaaaactgtactcaaataattaacatacagggtttcatccacacattagtgttatggtaagcagtgagggagtattatccatgctttgaactgtgtctgcaatttgtgttgccatcacataatgcattattttctcttcagcacaaattcacatctaaaaatccaattgataggtctttatataattatggctcacaaatttattctaaaaagtcttttaaaatcatcagtattcaatggagttaacaaagcaagtctatggaagatgcttgcatttagtgaacaggattgagtctctgatttgctttaaattgaaagtaaacagtcgctagccgaatggagattgaacacaacatctgtgttgatagaagtctgactacttgttctgaccattaggttttagttctaggcaaagacttaaatagaagacaactgggttacacccccatccttccatatacaaaacacccttcttgtgtccttcaaaactgcacacactcgcacacacagcacttcaatatacatcccaacacagattacagaaaagtacctgcaatccctccgttcctctctgcaactttgactctggcttttggtttccgtgcctcaattggaaaaggtaagttagattgttgtaaaacccaaaaacatttaggaaaaggtcacatctgctgagtaagcatttttgaaacaggtttgctgtggcctctgccaaactttgaggggcctttgttccactcagaccctgcgccagtcctccctctcagttgtggagacacttatcctcctcttcagttaatgagtttcacctagtctggccatttgtatttttataaaagatctgcaaagcactaattgcaaaaagaagaaaacagctcgttttgcattaatcagaaggtgggattctatggtaaaaacatttctattttaagcttcaagaatcaaacctttccctaatttcaggatatgcacacatacagtcagtcagtctctgggtatagaatgttaagccctttgcagcaattatttctggcttggggttttttactctttaaaggaatgctgaaaggaataagatatgcccacacaaaatacacttccagaaaatattgtatataaaagttgtttcttcttaatgtgacatatttcttaaagaaagtgcacttcttcagtctaaaggattttgttccagaaataaactgttcatgaagactcattttctttaaatatgttacccggagcccttggactataagctattattgtttttgtaggtattggactgtaacaaaaaacactgccaaccatgtgggcttttagaacgttttctagaagtaaaatttcagaattatggtactattgtgaggaaatcaaactaatataaacaaacattttgaaatttggcacatcaataatagatttgctagcttagttaacatttctaaagtcatttccattaatatgccaaaaacaccccaagttgagagaatttcctgtgggtgtactgtagcgttttcttacaaatttgtctgctcagattatttgttcttacataaaatgttttaaaaattagatctcattttctaaaaattcttttacggccccttgataaagggtgattcccttgcttctttagtgttttttctccctctgtgaaagaaactggagttttaaaaaattactatacaagagtctagaaaaagtgcaagtttaacttctaaaacaccttcttatgaattcaagttgcacattcagaaaaatgttctaacaatgaagtgaaacacaatgtttcagccccaagctgtaattctaaaatctcaaatgtagaagaggtttagggtctccggtaactatttgttttgatcatttgcaaatcatgctttatccatgttatttctttaattttcattaattatttataagcacaaattcgtcagcttttagtatttttagtccactaccagtcatttatgagtaaactgagctgtgttgtcacatcatgacaattagtattttaaaaacacaccaagccatgtataaacttaatgaaaaagaaatgaccacttgacttttagaaaaaagaacttgtttcttttaagttatatttaaatatccattagaaacataggaaatataaatcggcatattaaagagtaaatacattatttgtacaataaaacaccaacaaaaccagtgcaactcctaagttctaaatatggtggaaaaattatattgtagttacttattccttatatcttgattacaattcaataaatcacctttcttcttcttgtcatgctttgaatatagattaattgatgtcaattttagaaattttacttgtttgttctagtactttatcaaggtattcaaattcagacaagaaaatacctcaaagagagtaaataccatgtttacagaaggatagggttatttattttctcagttgatgttgggagaccagatttcatatacaaatagtatacaacctttcttatggtgagctgcatcttaggggggaaaatcctcttttagsgtaacatacaaacactcacttgccaaataatcatcaaaacattttgaaatcagcattaaatttaaaaagctccatcaatccatataatcagtattttattttgattccattgctctattacctaaatggcaataattcctctgcaataatgttgctatgtgtatgatccaccttgagctacacttcaatttactttcaatcaaacattaatgaaattgcacttagggggcccttcgaaaattaatctcccaagataaattccacttcaaaaaggactgattgttaaagctgggttgatttttatagttacaaacgccaacaaagtttccaactttgagagctgtagttaagaatgccgtgtgaacttctccaccttttcgcgtcatttaagaacttctaggaggagaaaatcaccacctcaaagcctcgtggcataatgttacactactcggtttccgggctgtcgctgtcccccgcccccagcaagaggttcacagcctgctcctctctgagaccggttcgttttgaatcgcagtttacacgcgcgagtcgg

SEQ ID NO: 94927 - DNA, 28304 bp, Homo sapiens
  misc_feature (1)...(28304): n = A,T,C or G
ccttcctttcttttttaaaaacaccatgctggagtgcagtggtgcaatcatggctcactggagcctcaaactcctgggttcaagggatccccctggccttaccctcctaagtagctgggactacagacacataccaccatgcctggctatttcttcttcttttccttctccttctccttcttcttcttcttccttttttttttttttttttttgtttttgtttttttgtaaagatggggtctcgctttgttgcccaggctggtctccaactcctcaagcagtcctcccaccatagcctcccaaagtgctggtgattcttctgtttaaagtcagatttattaaggtgtaagtttgataaagtaaaattgactcatattagtacacatttgatgtattttgacagactcatttggtcatgtagccaccaccatgatcagtcccagcctgggcaaacattggtctgttttcttctgttcctataattctgccctttcagaatgtcatataaatggctgggcacattcactcatgcctgtaatcccagcattttggaagactgaggtggatggatcacctgaggccaggagtttgagaccagcctaggcaatatgtcaaaaccccatctctactaaaaatataaaaattagccaggtgtggtggtacacacctatagccccagctactcgggaggctgaggcaggagaatcgcttgaacctgggaggtggaggttgcagtgagccgagatggtgccacttcactccagcctgggcaacagagtgagaccctgtctcaaaaaaaaaaaaaaaaaaaaaaaaagaatgtccatgtaaatggaatcacagggtacacagacttttgattccggcttaaatattcatacagatgttttgataaaaacgtaacttttcgtttccctggggtaaatgcccaggaatgcaattgctgggttaagtgatagttgcatgtttgcatgttcaatttgtaaagaaactaccaaactgttttccagaggggctgcaccattttatattcccatcagctatgtatgagtgattctgttttgaagtttttagtacatttcagtgttaaactgctgaaattgtcagattcactaggtttaaaacacatgcactgttaaaaatgttttatttctgaaagtgttataattatatttctagaaatgttataattagactccagcataaattaagtcgctgatacaagggggaaaaaaactcatgctggccttattcttctcccccagaaactttaaacaccagaaaacaatggagtaatgatgtttacaaaatcttggaggagagaacatgggatccaggaatatccagccaatattccacttgagcatcctaagagacaagggcgctctgtgaatagagcaccagcaccatgagcccgaggaaaaacaaagcacagcaaagtcaaacaaacaaaagctcagcagagaaacccagccaacccatacatgcatcagaatgaagaatggaaagggaaaagctgtaagaagaaacaggaatgacaattacatccactcaatcatagacttaaaaccaaacaactaggtgatatatagttgaaaaactgatgtggctttatagagaatggtggcacacgcctatagtcccagctactcaggagctgaggcacgagaatcgcttgaacttgggaggtggaggttgcagtgagctgagatggtgccacttcactacagcctgggcaacagagagagaccctctctcaaaaaaaaaaaaaaaaagaaagaaagaaaaagaaagaaagaaaaagaccagtcacggtggctcacgcctgtaatcccagcactccgggaggccaaggctggtggatcacaaggtcaggagttcaagaccagcttggccaagatggtgaaaccccgtctctactaaaaatgcaaaaaaagtagccaggcatagtggcgggcacctgtaatcccagctactaaggaggctgaggcagagaatcgcttgaactcaggaggcggaggttgcagtgagctgggatcacaccactgcactccagcctgggcgacagagcaagactctgtctcaaaaaaaaaaaaaggcctcgtgtggtggtgcacacctatagttccagctactcaggaggcggaggcaggagaatcccttgaacccaggaggcagaggttccactgagctgagatcttgccagcgctccagcctgggagacagagcgagaccctgtctcaaaaaagcaaaaaaacaaaaaacaaaacaacacaaaaaaagagtaaatagtgccctaaattgaaatttctattaaaaaatctgattttgaccattaattatcctcattaggagattgaaattacatttaatacatatataagataatactatacatatcttaaactttacaggaaacttttaggagcttttattttgtgctgctcagcaatctctttattttcatatttatttatttatttattctttgtattattttttaattttttgagacagagtcttgctctgtcacccaggctagagtgcagtggtacagtctcggctcactgcaacctctgcctcccgggttcaagcgattctcctgcctcagcctgacaagtagctgggattacaggcgcccgccaccatgcctggctaaattttttttgtatttttagtagagatgggatttcaccatgttggccaggctggtctcaaactcctgaccttatgatccacccgcctcggcctcccaaagcattgggattacaggtgtgagccaccgcgcccagcctatttatttatttatttatttattgacatggagtctccctctgtcgcccaggctggagtgcagtggtgcaatctcagcaaactgcaacctctgcctcctgggttcaagcgattcttctgcctcagccttccgagtagctgagattacaggtgcccaccaccacgcccggctaatttttgtatttttagtagagatggggtttcaccgtgttggccaggctggtctcaaactcctgaactcaggtgaaccacctgcctcggcctcccaaagtgctgggattacaggcgtgactcaccgcgcctggcactctttcattttcatttgatttgtttttcttctgttaaattcaagaaaaaagtcaagtacagtaataccttatacttcataatctattaacatatataattagaatcccttttaagtaaaagtctctttctcactccccttaatctacatagagagatgactgaaattatctgagagttaacatggtttattcccaggtggcaaaattttcaatgatttgttgctttattctttgtacatttccacaagtctttgatttcttaataatgtgcatatatcctttttattaaaaagtctttaagaatgtaaatagccctaaaaggtatttttaaaacccataaaacaagtgtgtcaacatgtagacttttctggttgaagcaagacaataagaggaaagggaggcggcttccaaagccccacccatctcctctaagctgctcatcggggactatgagcaaacatcacccctccagagccatttgtgctaaggtctatgattgagggctgtgcctctcctaactctacatctccagattctgatccttcaaaatgcaagatacttaatttcattatttttcttaacaaacacttatatggcacttaaaatgtggcaagcactgttataactgctttacaaatattaactcatgtaatcttcataataatccaatgaagtaggtgctatgattatgcaccttttacagaaactgaggcaaagagaggtgaaatacctttgttgagaatgtgaataccctctttgtaaactaccaaggatgacattatcttctgggtaacctgtgtgccactttttcactcagctatttaatcaatatttgctaggcacttactggccacccttcgagatgctaattcataggaggcaatcagcaatggaaactgataacagtttaaaaataagtagacaaacaggagagaagggagaaccagctggtgaatatccaggatattctctgtactgccctgcacgttcccctgaccccatgtgttggaatggccacgtagctataggatatttctgatctgtgcctcaaaatcggaataataattcgtatcggtgcttgcaaactgctggcctacagcatccagtttctgcagggttccaatgctacctttgtgttaaacccacagtgtttttttctaaaaatcaaaatcatgtttattccaccattacctagatacaaacataaagtagctataaacttctaatgtttataataccaatgaatcagagccaaaaatattataaaaaccttcactacttcataaggaacaaaattcaaatcaacattagttcatgtcacacacaaaaaattatgaaacactttgaaatggccagaaaaagattactgtttagtacacgtttccaggttttctctgctttttattgtctttgacaatacaaaattttacaaatttgtaagctgaggaaaattgatagtaatgaaaatttttcttgtccataaaatacaaatgcatagtgttatacagtgcccaggagagacagtgattacagctctgtggatattgaccagtttaacactcatgtgtaaatacatttcagcattcctgcttgctttatgtattttatctctctttatcttatctttttgagacagggtcttgstgtgtcacccaggctggagtgcagtggtgcaatcatgtctcagagcaacctctacctcccgggctcaaatgatcctcccacctcagcctcccaagtagctgggattacaggtgtgagccactgtgtctggtctgaataaaggaatttttaacttttaattttaactactttaaatttaaaaactgatgtttggttcagcgatttgaaaacagtatatttggaaccgcttggatatgagaatctgctttttaaccatacattgatgaaatctaaatagagaacaagcatttccgatgacagctgctctctcagattgaaatgcactgcaaatgtaaaatacacaccggatttcaaagtctttgcaaaaaagaatgtaacatatcacattcctttttttattgattgattacatgttgagtattgattggttacatgttgaaatgatatttcgggtataataaagtggggtcagggaaaaatatttttcccaaataggaaaaataaatgggtaaaataaagcgtactatcaaaatcaattttacatttcgttttgcttttatttatttattatttatttttgagaccaagtctagctctgtcgcccaggctggagtgcagtggcgagatctcggctcactgcaacctccgcctcctgggttcaagcgattctcctgcctcagcctccaagtagctgggattagaggcgcgtgccaccacgcccagctaatttttatttctttccttttttttttttttttagtagagagggggtttcgccatgttggccaggttggtctcgaactgctgaactcaagtgatctgcccgccttggcctcccagtgttgggattacaggcgtgagccaccgcgcccggccttctttttgtttttaaacgtggtattgacattttaagatgacatctgcaactcgcaacactgggacaagggattctgggtcataaattctcccattcctcatttactctgcagcaccgggtggctgcgaactccgctcttctgcttgggtttccgcatcaccagcagcttctttccttcccaggtgtcgccgcctgctttctgcagccgctgcctgggaggggttccgaggttctgggcagccacagccccggaggccttacaggagcgacctggcaattcccgccgccggccgccagaggaagctgctttgctgctgtcgttgcccagcaactcgtagcccggaagcagtaccccgtctcgctcggttccgcggcggccacgctccgggagacttccggcagggcgggcgcggggtcttggcgaacggtcttcggaagcggcggcggcgcgatgaccacgctacgggcctttacctgcgacgacctgttccgcttcaacaacatgtgagtgacacgcgcctagggccagccgctcttggccgggcctcgcttcccggccccgccagctccggccccagccgcgccttcccggccggaccccaagcccggacggggacccgcgagaaccaccccccgccggccaacgtgggcgcctccctggggccacagggtccagggagaggtgggcctggagtcgacgcacgccggccttggcgaccttggccgaggtgctcaaactttgtctctggaccctgcgagctggcaggttctggggcagcgctcgggcctccgctcgtggtcgctgtcaggaggcgctggggtgatggggcgagctggagacgcggcctggagcccacgacctgggcttctcgccctgccctactgcttgctggttcgtggccgggccgcgcctcttctgggcagagggcaccgccgacggccaggccgcagagggggcttgcgaggatcggaagctggtcagcagctgttgggatgtgtacatcgtgaagcccacctggtggccgtggttaaattgtatccaaatgaaatgacactgatcactgcgtcccctgcagcagatgctgtctcagtcatggttagtgtttgcaagtttagttactgtagctgcgcaccccggtgtacacacctttcctctgtgaggagtcacggcagatcttaggggaggctcgctgtgcccagagccctggatgcagtttctttggattcgagttaaggccagacctctgatttgcaggtaccaatttttttttttaagaaaacattttattatgaagattcccacacatttagaaaagttggaggaatttcaccatgtgcttttatagacacttttcctggattctgcagttaacattttgctacgctggtatctctccttccttcccatctatcagtcctggatccactttaaaaaaacaacagggcggtatgtgaaaactaaggacaaagtggttccgattcaagtgtcaggaagatggaaagaactatgggataagatggctgggaacatttcaaagagggggtgagccttgaagatggataacacattggtaagtgaggaagacggaagttccggagaaggagcggggcatgaaaatggggaaacttgaagtgcggtcagacaactgggatcagtgcgaatctagtggctggtttctgycactgagcagtcaggaagaaatgggtgaaacaggaggggtttagacttgatcctgtggaaagaattttctgttgggccagtctggtagctacggtgacttgtgttgaactcactgttccctgcattgttctgagtgcccacgtaataatccagttaatcctcacgattctttgaggtgctgtcacccccattttgtgtatgagtaaaccaaggcatggcaagcacaagtgaattggcccaggtgagaatgagtaaagcgaggaacttcatccaaggatattggctctggagcagtggttctgaaagacttggtgcctgtggtcaggggaccatgttagaaacgcacattccgtttgcgatccactgctctggagtgggtcttaacccacctggagcctctggagaggctcaccctctctttaaagtgttcccagccatctcatcccatagtcctttctatcctcctgacccttgaatcggaaccacttggtttttcgttttcacttactgccctgttgtttttaaaagtggatctaggattgataggtgggcagagagaaatgatgaagccagtgtagcaaagtgttcactgtagaatccaggtgatggattcaaattcttaaccactgagctctgtgggctgtcatgtgatgacagcaggtaaactgggcaggtaagccattcaggaggccttggcagtggcccagagaygatgacttgacagaggcttcagtttgggaggtgcagcatgggaggtgacagggtgccttgaagcttcaagaaaaggcagagcctcatggagaatcagttttaactgaagatctaggaaaggacaacagttttacatggaaatgaatagaaagaaaatacacaggaacacttgcaagaaaatattagatttcagagaatcatgtggcctcttcagaaggtgccagtaggggaactccacttattccccattttcttttattttttgagacagggtctcgctctgttgcccagacaggagtgcagtggcacaatcctaggtcgctttagtctcaagctcccaggcccaggcaatcctcctgcctcagcctcccgagtagttgggactacaggcacgtgctgccacaccccactaatttttaaatttttttgtggagacagggtcttgttttgttacccgggctggtctggaactcccaggctcaagtgattctcccacctaatccttccaaagtgctggaattacaagtgtgagccaccacacctggttcccatttttttgtatttacttgcctctttgattagggcattttggtagaaaactctgagaatgactcagattagatgatgcagttggaattgaaataatccatggatgtagaacactgcaattaatttaacacatattttattcttggaaaaatatttgagtgcctactgtgtgccagttctagagacacagcagtgaacaagacataaacaaaaaggtgtctttatagaatgtagattttcccctctaaacacctwaatgtatcataaagtagctgtgacttcatagaacacctgaaacaattttggggaccccctcaaatcctggcccacaccttgggaatcacagtgcggggagtcatgtggaacttagtgttcagttacaaaggaaaatagaagcagggaaggaaagctggaagtgagtggggattcagctttagtttgggggttcagggagactgcccttgaagaaagacctggggaagttaggaatgagttacatgaacactgggggccaggggagcttccagatagagggaacagtaagtgaagacacccctgtttcaaataggaggcaggccgcatggctggtacagagtgagcatgggagggtaaggggataacagcagagagttagaagggcagggcctggagaggccatcataagacctgaacttctctgccaagtgcaccaagaaacccaggtggaggggccaggaaggcatctgggcatgggcgtctcaagattaggtctgagctaaagatggaaatttgggggtcagcacaagtgtagaaaaaaaggctaagagtttgtaagatggcgccttagggcatcaagtgttcaagtaaaggagaccgtgtggctcagtgaggtgagaggagaaccccatggtctcagaagctgagtgaagacagcatttcaggctgtcccaggagtgggaagctgttcaagagkagctgatggctcagtgcacatcatatttgtacatttcttccaggaaagagaaattgaagatgcagatgcaggagggaaagagaattgcaggaggagggtcccgagtactgagggggtctctcgcccgcactccgtgcctattgacaggagagcaagtagcatatgggtgcagatgcctgtgtgcgtgggttcggtgggcggggggggggggactttggcaaagacttcttcctgttttctcttcttagtgatgaaataggaagcccctgagatggcggggctggaggtgagggtgcgggtgggcagrcaagaggagataaagcagttcagtcgtcgaaaggtgtggtggagtgactccctgcactgtattagagcagtgattctcaaggagtgggccagggtttggggtccccaagattgtttcaggtgttgtgtgaggttagagctatcttcatgatgtattaagaaggtttttcatcttttccactgtcattccctcacaagtagacagtggagcttcccaaggtgtgatctttcagcagcaagcataacaaatgcttgagaatcccgttgtcttttaagcaggacgttgcagaattgttaaaacaatgccattgttgtcactggattttgttttgttttgttttcggaagtatagtgatttttttggtaaaggtatttgtgttaacgtgtaattgatttattatttttgagtgaatatttaaaatttttaaatctcagtagatattacgcgtataaacaaaagttctttggagtcttcagtaactttttagcgtaaaggagttctgaaaccaaacagtttaagaactgctggactacagaaatatgatatgactagcattgttatgggtctcaaaggagaatttgactagaaatcagaagagaacagttgaaaagtagctggttttgaacctgacaaaatagtggctccattaattgactagggaagtgaggggatggagatgggttttcagaatgcagatttgggaatggtgtgctgggatgtgctggtgagctgcccacagcatcggagccaggttgggaggcatccactaagaacacgtgattgaacacataggaatggggatggtggggacagggaggtgggagtgtagaataggagtggggagcaaaaaccgagtggtgggagtgaccacatttagagggtggaataaaggagcaattgtcagggaagacccagacacaggcggggaggatccatggggttggatgctgcagcgggcgagtttgaccttctgtctctgcgagatacatccctagttggtctccagttccattagcaatttattgccacttagaaaacacaagatktagatttattaacttgaattttaaagaagcaagtagcagttaagtgaaaaaatatgtaaacaccttaatagtggctgtgacagcttattatggctattaggtagattaaatcatctgcctcagccctaaagttggccttaaagttgttgatgaaacatgttttgttttccttgtggcatattactgttagctttagcaggcttatttcaactggttattgtaaacgctgcttactagagacatttctcttgtttctttcagtaacttggatccacttacagaaactgtatccttttttacaaaaaaaaaaaagttgaatgaagatttactgagaataaagaaaacagaaatgaaaggmaaacagaggagtactgaaaagtttaaaaacttgtaggtcaggaaacatcataagcaacactgaaagcaattttaaaaagtgaaactgagaacaagagttgtcttagatctgctgacaaactgttaatatcatgacttggtagaaatctgtaacatcatagctcccctgccaaccttgcccctcaggagtcagcatggctgtattcaccagaaagcacagtgacttcagcaargtggctgcatagtctccagtgtgaacaaagtctggagataagcagtcccaggcaggtgatgcttccatgaagacaccaacagccaggctctttgcagtttaagcactctacccctcccagggtggccgtaaccttgttccagatgttgccacagcaaacagcatcacagccatgtttccggcagcagaaacagcagagggggaggtgagggtgttcttcccttttaagagtacctttgggcctgtactcccagcactttggggggccaaggcaggcagatcacgaggtcaggcgttcaagaccagcctggccaacatggtgaaaccccgtccgtctctagtaaaaatacaagaactagccagccgtggtggctcactccgtaatcccagctacttaggaggctgaggcaggagaatcgcttgaaccaggacccgggaggcagaggttgcagtgagccgaggttgcagtgagccgagatcgcgccactgcactccagcctgggctacatgtagagcgagactccgtctcaaaaaaaaaaaaaaaaggagagtacctttgggaaatgccacacaggcccgctctgtctcattgaccagcacctgtttcatgcttcacctgtctactgaatcctatctagagtccagaaatgtgccctgctttataaattgggacttgttactaaagtgaaggctttgaggtaacaatgaacagtgtctattattgtcctaatggaaaaatggggcaaagatgtgaagataggatactgtggttatgctgctgtaacagataaccccacatctctagtggcttacaacacaaagttcggattctgtgttatgctctgtatctactgtaggtgggtaggagggttctgctaaccggtaatttatcaaaagagggcatataggagcttaatgaacgtgttaagagttcagtctcatcagtcaaaagacatgtaaactaaaaccaaaatgagatgccatattttatgtatcagccaagattttaaaaaatgataaacctcagtgctgatgatggtgaggtgagaggaacattctcataaattgctagtgacaatataaattgctattatctttccagaaggcactttggaaatagtaattccatttcctgaaagctgaaaataagaagaaataraggcagtttgtcagtggttgacaaaataaggcccataggccaaatctggcccactgcctgtttttgtaaataaaatgttattgggacaccacgctgattaatttatatttttttctgtggcttttgcagtttgagtagttcagcagggactgtatggcccacaaagcctaggatgttaactatttggccttttacagaaaaagtttgctaacccctgagttataccattacaaacattatttattgcaggagagttactaagcatttggaataagattcacacacaacaatcaggagatggttaagtaaattaagctgtactgaagaaggatttcaaacatttttttgagaaacaggaaatgacccaggtgtccattgtcaggatacaggctatttaaggtgtctcttcacataaagaaatactatacagcagtaaaaattaacttacaggtgcaggcagcaacaggactacatatcagaaacaaaactgaatgggaaaagcaaaaaatctctgcaggttcatctggattttttaaattacgactaatgatatcaccacttttaagatttttgaagaattttgaatgacaaaagtttcactatataggaaggaaggattttaggatgcaaatccgtttatatggtgtgcttccagtgacatttaaaatttgcagtgaaagtcccataatccaggtgagcctatatttgaaagtaacctgttaggtcctagaggtcgatgggagggaggggtgtctgggactcctctgttagccacagaagagatggttgtggtatatgtcagtggctggctggcaggaagactggctgtcctgccatgttaagggttgtatttgaggggtattcaaaataatgatggtccttcagaggagattttgaagaatttcgcacggaacaggttttccaggaacttaaaaaatatatttatgtgtgattgatggtgtcctctgataaattgcatcagaaagtttatactaacaagaaatatattttcatccattaaagtacagagtaaaaagaagaagagaaatgtaggaatgattacatgtcagtaaggatatcccaaggttgaagagtgaagtcatgagcaaattattcaggcatttactgttaacatagttgattccttaagtcagcttttatctgcattactagaaatgcaggatttgaatcagtggagaggaaaaactgggtaattaagttggctctggaaggacttaggttgtaaagttattttcacagtctcatagctgaagtcaaagtaggaactacccattaatttttcagtgcaattatgtaagcatcagtgtattaagcatctactgtgtaccaggcaccagggacagagggaacatgatattcatagactaagaggaggcagaccgcaaacaaacaatatcaggtgataaatggagagacttagatatggtatggtcagtagggaagtagactgtagaactttggggtcctgattctctgctttctattagacagtgctatcaccattccacacttgaggctatatgtccaggcaattttgttaaaaatcagtgataacctaaatatttcatgtaatggtatgtatgattataggactcatacagagctggggataaagtaacagtatactttttaaaggaaactttttttacaatatcccttaatgaagaactttttactgtccattacttttcacactccttaacaggactctagtatgggattcctttctacctacaatacctcgcccactggccagagtayttcattgttgcagaggcacctggtggagaattaatgggttatagtaagtataataccactagtattttgtggagtaggtaaagattttaatatagatttcaactgattgctttagactgcagaattggaatataatgatgcttgtaattttatttcctcttcaacaattcaagaacttactgatctctgttttgggcactgtgctaggcccaggcgataacggcagtgaaccagacagacatggtcttagtcttcttaaatctttcattctaaaaaaaaaaaaaatctttcattctaaggccaggtacagtggctcacgcctgtaatcccaacactttggaaggccaaggcaggcagatcctttgaggtcaggagttcaagatcggcctggccaaatggtgaaagcctgcctctactaaaaatacaaaaaattagctgggcgtggtatcgcgtgcctataatcccagctactcaggaagctgaggcgggagaatcacttgaaccccggaggcagaacttgcagtgggctgagatcatgccactgcactccagcctgggtgacacagtgagactctgtctcaaaaaaaaaaaaaaaatctttcattctatacttttgttaaatttctacatggtttatttagtacataatgcaggcatcatagcatcctcattgaattagcattactaacagaacctttagctctgaactatatgtgtacatccacatgtacccacatatacccacacccatatgaaatgcagatatttgaaaaaatacatactctggtttttttttttttcaaaattagttgtgttttaagtatatcgttcttttttgttctaattctgattttagaactattctaaatgtaacagatagtgttacatttacaagtgaatttcaaataaaagcactaactgttagctggatgacctcaggtggtacttaaaaacttcnttattagtttcctttgtaataaaaacatactgaacagtaattctatatttatgtgtaaatcaatgtctagttactgaatgtgatttttgttgttgttggcagttatgggtaaagcagaaggctcagtagctagggaagaatggcacgggcacgtcacagctctgtctgttgccccagaatttcgacgccttggtttggctgctaaacttatggagttactagaggagatttcagaaaggtgagattcagtttttcaaatacacttagtgatttgtggacccctaaccattttcttccccttcaggctgaataactgtcatgctttacagttcacaggaatttcatcttccatctccagtagtccttagaacaattctatcacatagtcaaagtgatattgtttctattttgccattgaggaaattaaggcaaagtgttgtagtgacccgctataggcctataagctgaggaattggtgcaattcagttccaaaggctagctctcgaggtttctcttagtgttcctgccacagtggcacacattcctaaaatctgttaccattgctttggcatctgaataaatttttagcagtgctcctcggccaaaagaaaatagttcagtcttaagcagttatattctaactgtttaataagtatttatagcctaacagctaatagccatttagaaaaaaaataaattgaaagaagaaatattttcatttcattcttaaataactgtggctagctaccaatgagakgtgtgcacctgttggacattaaatgacttggcagaaccacttgcattcctgtttcatattgattttcatctagtatttttttttaatcacagcaactgccagaaactcagcttcatagaaatattatgtcattaagaggaatgtagcatgatcttacgttgaatttgtgaactacttcaaactagtttgccaatatctgacatgtaaggttttgctgttttccctgaacattcgaaatatcctttggtggctgtatgagtttgggacaccttagggcacctgagtgcacagtttgcgaactgccagcatggcatttttttttttttttttaagggacgtgttgtatatatcaaacctcttcattactggagataaaagaaatacaataaatagaagagaaggcccctcctcgtatcttcattctagaagagagatgtttgtagtagcttcacctgttgtcaagctgccatttctttctccactgtaatttcctaaaagygtggtaggaaagagaatagttgctgagaagggttcttgagcttaatttctacttaattattagatttaataaaggcaagttttaaagaagtatctgtggcctgacaaagacttcaagccaaattagaggcaaaggagctcaaactcattcagagaagaaattgtgttagctgaaaaagaagtcggtgctaatctttaagattttttaaagttctctctagaccaaacaaagaagggaagaaaattttagcatgattatagtttacacacatttattaatggcattatgttgaaaaaaagtatttggcattattgtatagtgaacagggagttagaaagtgggttgttcaatgagaacacatggacacagggaggggaacatcacacaccagggcctgtcgggggtgggggtctaagggagggatagaattaggataaatacctaatgtagatgacgagttgatgggtgcagcaaaccaccatggcacgcgtatacctatgtaacaaacctgcacgttctgcacatgtatcccagaacttaaagtataataataataaaaaaaagcaggtcgtaactagctatgaccttgcacatataatttagggtatttgtatgatagattctccctctgagtagaagaccactaagctctcttcccttccagtttctaagccttcattattttagactagttgctaagatttaagtaatcttcatttgtaggcatatatatacatatacacatacatgatacatatacatatgcttatatacactatatacatgtatacatagtgcatacaatgtatacattaaaaatagaaaccaaacaagtagaggagaagaaaaattgaatgatagaagtcaactccaaagaagagaaaaaggaaattaaaccagcaaaacaaaatgcatgaaataaaatggtagcccagaatccaaatattgtcagtaattacaacagtaaacgttaatggacttaggactttatttatttattattagttttggagatggggtcttgctctgttgctcaggctggagtgcagtggcgtgatctcagctcactgcaacgtctgcctcccaggctcaaatgattttcctctctcaccctctgagtagctgggattacaggcgcccaccaccatgcacggccagctatgatgactctatttaaaagacaaaggctgtctgtattgtttacaggaaatatgtgtaaaatatattaaaatatttttaatacagaaagattgaaagtaaatttttaaattaccttgcaaattctaaccaaaagaaagttagaatacttattaataatagttatagttgaataattattaccagcataaaaaagggtcactgcatattgataaaatatttaatcaaggaagtaacaagtctgggagtggtggctcatgactgtaatcccagcaccttgggaggccgagacaggtggatcacttgaggtcaggagttccagaccagtctggccaacatggtgaaatcccgtctcgactaaaaatacaaaaattagccgggtgtggtagcacgtgactgtaatcccagctactcgggaggctgaggcaggagaattgcttgaacctgggaggcgaagattacagtgagccaagatcacgccattgcactccagcctgtgcaacagagcgagactccatctcaaaaaaaaaaaaaaaaatagcgatttaaaatggtatataccaagtgacatcatttcaaagtaaaaatgcacaaattgacaaaactacaaggagaaatagacaaattattattataatgggagatttagacatgcttttttctaattgatagaacaatgagatagaaatttgtcaagcctatagaacaagaatcagcaattttcttctgggtcagatagtaaatattcaggcattacaggccacctaaagtcttggttacatagttttttgttttgttttgttttgttttgtttttaacaaccattgcaaaaaccattcttagcttgaaggcagtagcaaaataggttataagccaacccctgccctaaagaatttcaatcagtagcccaaaatcttttcacgaagaaagctgtggcttctctggccaattttactaaacatttaagaaataatgactgaaaggtcacttttacacaaactattttgcacaagccaaaaaagggaacattcctcaacttattttttaaggccaggataaccttgataacaatacttggcaaaatatgggaaaggaaaattcgaggaacatctcactcagatgcaaaatctcggaaaaataattagcaaagtggatttggcactacataaataggatgacacatcaggaacaaggtggtttcaactttacactaaaggagaacactggttattttagaaagtgcagcaaacttgataaaatccaatattccttcctgataaaaactgttagcaaactgggaaatagaaagggggaacttccttaacctgaaaaatatctacaagaaatttgtagtraatatatttagtagtgatacactgaatgctttccttttgaaattagggacaagttagtcccgcttcagtaatttactagaaattatagcacaggaaagcaggaaaaaataaacgataggaggattgagaggaaacaaaacttattttgcacagatatgattatataaatataaaatccataagaatataaatatttagaattaataaaaggcaaagttgttggatataaagtcagtataaaaatcaattgtatttacatatgagaggaaacaaaacttacttattttgcacagatatgattatacaaatataaaatccacaagaatctagaaataaatgtttagaattaataaaaggtaggcaaggttgttggatagaaagtcagtataaaaatcaattgtatttatatatatataaacagtaaaatttagaaaaagatgccatagcatgaaaaaacattaagtacttaagaatctagcaagtgctatgcaagacctctctgacatttaaaaaacttttttgagagatattaaagtagccctgataagtggagcgataaactatcactggattagaggatacagtaaacaggtaatcgaccgcagttccaatgtaattgcagtcaaaatcccaagcattttttatagtacttgttaagctgactctgaaacatacagaggaacagaaagagcaaaaaagagacaagatattcttgaacaacaacaaaaatgggtgatgtgcccctccaggtatcagactgtaaagagtgagactatatcttagtgctgtagttatctagaccagtgttacagaatttgagaaacagacccaagaatatatggactttaacataccacagaagaggcattgcacatcaatagtatgaagatagacttttcagtaaaggtggttggacaattggatgtccctatgggaaaaaaaaatttcccagattaccattattccatacacaaatcaactccagatttattaaaaacctagatgtgaaaccaaaactaagaagtcttttgaatataatatggcagagtgtctctgtggcctcagtgtagaactttttaaaaaggccataaaaaggctaaggaaaggattcatatattcagcttcactgaagtgaagtaactttttatcaaaagataacataaggataatgacaagacaaaccacaaattggaaaaagatacttgcagacattacacagtattgaatattcacaatacatagagaactgtagcgggggaaaaattgtatgaaagatttaagtactatacagaaggagaaatctaaatggccaaccaacagaaatatattcagcattgttagtaattggaaatacaaattaaaatctgagatatagttacactgtaagattggcaaaaataaaaacatgtgatgcaycaagccttgttgctgtggaatggaggcttactcacttctgtgcaagagtaagttggtacaagccagttggaaaaacagtttggtattaactaatgaagatgtgccctgtgacacaacagtgagactcctagctatagaccttacgtgagacactcaacagaagtattcacaggagcatcgtttgtatagtaaaagccagaaacgtatcaacaggaccgtgaatgacttgtgcacaagcccagccactcttgaagctgactcttacaatgttagtcgactgagagaagcaaaagacaaaagaatatatgattccatgtatataaacttcataaacaggagaaactgtaataggtggtgaatttgtagaacaaatgccttgagtttatcttttaagaaaacgtgttgcttttgaaatactagcatgcaaacataaagtcatgttcttacactgcaaagtaattgtcataaatcctaagtaatacaaatttctattaccatgtaatcagctacaaggtcctattactaccattctgagtagtagtcaaagcaaggtaaaaacacgttttaaaaaaaatatgtatctattactttctagggtttctcacattctaacattttccttttttgtttttcttttaaagaaagggtggattttttgtggatctctttgtaagagtatctaaccaagttgcagttaacatgtacaagcagttgggctacagtgtatataggacggtcatagagtactattcggccagcaacggggagcctgatgaggacgcttatggtaagctcccttccatggcagtatccccaagaagtcgaaacagttacattctttctacagattgtagtatttgattattttaataaatgtagaatatttgactttaaaatttaaatttccctcaacctacctttatcaacctattagtagtagtaattaacttacctattaactaaccaatggttaatttctgtaccttactgtttcactctgttacatacatattattttgctaacaagaaaacgtgtattgtgagctgaatactgggtgaggtctggttagcatctggtacacttggcaattgggagacatttataaatacattttgcttagaatatggtgaagtgggggtagggataaaacctcttatgggaactttacctatacactttacatttgatataatacattttttgggtgtttatattaaactttgcttctttacagatatgaggaaagcactttccagggatactgagaagaaatccatcataccattacctcatcctgtgaggcctgaagacattgaataaccctgggcagtggttcttaggcagatactctagatgctttatggacaatattattttcattggatgattctggagctctattaggagaaaagtaatcattttaggtcttaaagacttcaagaaaatacaggttatcaatttattttaaatctcattgtttccagttagcaatatcatacctattaaagctgttcrttgtaacaaaattcaatcaaaaaggcagctaggtcagaaggaaacataccactctcatggttcatagtattcactgtatgtatgctagggaaaagacttgctccagtctcctcctcagttctgtgcctgagaaccactgctgcatatatttgtttttaaattttgtattgaactgttaattgaagctttaaaagcatatatgaaatgtataaatctaagatgtataatacattattgactctatgaatgttttctgaagtttgttagtcatttgtaaaactaaatcagattgtaatcccagtactttgggaggccaaggcaggctgattgcttgaggtcaggagtttgagaccagcctggccaaaatctatactaaaaaaaatacaaaaattagctgggcatcccagctatgcagaagctgaagcacaagaattgcttgaaccctggaggtggaggttgcagtgagctgagatcgtcccactgcactccagcccgggcaacagagtaagaccctgcctcaagaaaaaaaaaaaaaaaaaaaatcaggattgtgaaaggtcatcatcatttaagatacgtttaattaaattgtgacttccatacgtagtattttaaaaatgcacacttgaagcaatcactgtccagcatacttaagaagctcccttcttatcgtgtagtaaattcttcccagtcacctgcgttcataccattatactgtttgtttgttagtcctagatcttttctcctcttcacaatgctttgcttaaatcctgcccttctaaaaagccaaaaaaaaaaaaaaaaaacttgaggttttttttttttttggagagggaaaagaacataattcctaaagaaaggccatataactatatcataggccaaccatgtattttatgtgtagtgtcttcctctgtaatatgtgaaaatatccagttagttagttagtgaaagacttaacgaaagaaaaacccacaagaaattattaaacttttactatcgaaaggatttactttggtggagttgagggtgggagagaaatgaatctttatgttctcctgttagagaatagcttttttccttccagctttcacactggcacatgcttattacaattctaccttgggaacatgacagaatttttttcttatgcattcatgcaacataaacaaacagataattctaggaagactgtgattaagtcacttgcattctgacctattattttcatctctccctgactctgggtgagccaaaggctattaagatgatgttctcctgctcactcactaggcagacctctactcgagaagtgatctgacaccgcagtagctgatgctcgtccagtgactaaagcagtcaggctgaaaacagattttatctcaacaacagtcctagtttcttctgtcctcaaacactgttatttattttcaagataaaatttagtaacaacattacgaagtagcttttattcccttgggtgaataagatgtgcacatttaataataaatttgcttactaaaggtccttttaggggaaaacaaccttaaaaatacagttctagtccttgggcagtgaacaaagaaaaaatgtgcttgagaaacacagtccaggttaaaggaaaactctcagatcggttaatgcagttgaatttttgcttgagaatgtgagcaacgtatcagcaaatacattcattcttgtgctactcttcattatttagcatagagctaccttaggtgtttctacacatgctctaaaccaagagtaagtttaacatgtcagcagtgaggagtagacattttctactatagcacactgggagatgtttactggtactctaggtagaaatgactccattgtccactaagtttgggaaataaataatatggcaacattgctactggagatacataatgtacagaagcctaactataaagagatttgattaacgagacttaagtcttagtccagaatttcccaaatttatgtgaacatgggacatcatttttcatagcacacacgtgaacaagccattattctttaaacaaggtattacaaactcaaccactctggagaactgatgagcgcctaactgaaattattagactaaattcttagtaaacaatgttttctgaaccttgttcagaaatataatcactgcaaattattttccaagtgttgttctaaaaaacaatataactggacactagtaagaaagtaaggtaaattattaatccactcgcattcaattctacaaggaatgaaaccatttttaaaagtggcttagaacaaacaatttactgagcacttactatgcacccaccaggtatattccttttataatgtaatcttcaaaatgagctgtcaaactattggcccattttgtgaatgaggaaaatgaaaattaagttatataatcatgagtggcagagctgggaaatgaactcaagtctgtgactctgaagacatgaaaaagttacacatttcagatgaatgcataaactatctttatgggtatgacatgaaaagtaactgtagaatgttaccttaattacatttcctaatgcatgatgtggacagacattagaaaagtttggactcagttggaaaaacaaatccagcagttaaaaaagtcctttacttgcaatccctacccctagctaacccaagagcatttaaaaaataacttaaaaagtagccatcaaagataccaatcaatttcttactggtgaaatatataagaacttccaggagtcacaagagttccaaacaattaatttataaaaataacaaaacatttgtctatgaaaaaaagatcaggattcactctcatcgaygtcctcatctggatggtgctcagcatcctccttttcctgctgctrtttcttccacagtttggccatggccaggagtttgaggttaggttggttggcagcatcttctggaaagatgtaatcaaagtattcttcccagcctgcatcagactacagaaataaaaaatgaaaagataagcaaacgtgggtgatatactcacatatcagagtgaagaatttttactggaaatccggatgattacctccattttacaaaataacatcaaagtctactacagaaagaacaagggctgggtctgaaagactgggagtgagtaagcagcaactgtagctcagtgagaactaaactggtagaaaaacattctaaaaatctaagcacagctcctctatagccaaccaagatgttcagtgtctccaactacattgtgcagtcttacacttaagaaaacgtttaacgatctttacataatattcacccagtagcaaaagccatacatctgtgcattattattccaactccctaccttcccatcctcacctcctatcagtcactgatttcacttcccaaatattgttctaacaggccctgtggccctgttctagttccagcttccatgtcttgctcagcttataaaaactgcttcctgatgggtcttctttctccaatctaagccccttgagtctgccaggatgagaggctagcaatctggtcacgtcattttatgcaaaacagccttcactgactcccaccaaactccttcttaccgcctacaagccttctctggataggctcctatctgaaagttcagttccatcttcctccacacttacttcctattaaatgctctaaaaatatcacacttcatgaagttcccagactcaaccatcaccaaaacacctttgccaaccccttcccgttctccacctctgactggaccatatgttctaccccgtgtttccataacagccagattgcaaccatctcctactccaggtggtctgcttccattctaagattgtacatatgccacttaaaagtccacatttcgacgtcagaagtgtttctactcatgtgacgtgagatgaacagtcccagggcagagttcttaccccatcatcagtctggacctttcttctcttcttgactttctctggcatgagtttgtctactctctccttatctgaagctgttccaaattcttcttcaaaacttcgccaagattccagcagcataagtctctcttccttttcttcacagtttcgcatggttttgttagcttcttcataaatttgtctgcatttagtcaaacttccttcttttcctgaagacaactcaaactgagcaaagctgatccatacctttaaaaaaagttattattgaaccaaattaaccatatcactcagaagataataatgtagtaataataaagcgaattcccagttaatgacatcggaaagtaatgtgtgcatcactaatgtttcacagatgaaaacaatgaatatatgcttcaatataaacactgaaaatatttgattctacattctacaattaaatgtctgacatagtcttaaactcttgaaaagagtttaacttggctgggtgcagtggctcacgcctgtaatcccagcacttcgggaggctgaggtgggcagatcacgaggtcaagagatcgagaccatcctggccaacaggtgaaaccctgtctctattaaaaatagaaaaattagcctgggcattatggtgcgcgtctctagtcccagctactctggaggctgaggcaggagaattgcttgaacctgggaggcggaggttgcagtgagccgagataacgccactgcactccagcctagagacacagcaagactccgtctcaaaaaaaaaaaaaatagtttaactttttttcaatcttgtgatacccaagctactcacatgcagcataaacaatgacctggtataaacttaacattccaaacattccaaagtcctctgagactcacgtttctcttgaaaagcaaggaagtcattaaaaaaaaaaaaaaaacaaaaacccaaacacttaaaatacagaaatatatcattttcttctggactgctgattcaagcaaaatgaaagatcatctacaaagcaaggataccttgacatgctgcgtccgttgaagcaaccgccggtaaaggtttcgtgttctttctgtttcttcctgctcaatttcaaaatcaatatatgatttccaaagcacctaaggaagaaaagtaaatgggtcagtcttgacatttacaaagcagcatgcccccatccaaagcacagctgaagtatcactctaacctacatctaggaacataggatttttactgaacaactaaagaacacatgtggataagataaataacattggtatctataagctggccaaaacttggctagaattccagattacagaaaaagggccttggattcagtcttagagattctctttggaagtttttcaaatgcttgacttatcaagagctgagaaacttgccaagcatctcccaggtactccatattctagccacacgcaattgagcgtccagagagaaaacaggcccaggttagccagtatgcatgttcttacctctactgtacattccttgttattatgagagttcagtgcaacaagcattcactgaacaggtgcgcactggctcggtgcagcctggcagggaataaggatgaataaaccgtggcatggacacctgaaagctggcagtctggtggaggagccgaggacaactgatgaactcagtgatacccaaagccctgccttaattaatgcaatcagggggccaaaccattaaatgcagggtcatgttagtgcatgagattaacaaaacggctgggtgagttctacgactcatgtgagattcaaatctttcctagctgtggtttggtgctaccttgtgggtcaagcttaactactgaaggcaggcgaggactttcaggacagtgacaacagaagttgcaaggacatcctggtttagagaatacagggatgtgcagttcctacctccatccccctcgttctccgggtgggccagcctgctggcttcttccttgcctggcctcttccccagcccctttaggctttcctgctgcagaaggggcgtcacccacccccatgatatcccagttcatcctgggcatcatcctggatgtctactgctctggtatctaatgagagggctacttcccctgtcccccacagccacctttccacgtacaagcctaatctgagtagaagagactaagttagttagatcatcgttatactctaaaatacacccacatttagatggtcatctaaagtaagactaaacacgtatctcaaacaaaattatatttgacttgagatgctcacctctggcatgtctaaac

SEQ ID NO: 94928 - DNA, 18770 bp, Homo sapiens
  misc_feature (1)...(18770): n = A,T,C or G
ggcatcatccatcaaattcaacacaagccccacgtggaattctaaattttctagacaccatgttaaaagagtaaaaaaagcagatgaaattccttttttttttttttttgcccaggctggcttcgaactcttgggctcggtgatccgcctgcctcggcctcccaaagtgctggggttgcaggcctgagccaccacgcccggctcgttcggctttattgtactcagtcttcagaacccagtgcaggttttattgttagaggcctctctgctaggactctctgctaggactccctgcctttccagtactccctgttcacatgtggctggcggctcccacagaggccagggcagggccaaaggggaaggagtacagtgacttggggcaggaggaatgggttggggcagaggacgtcgccagggtctgggcctgcgaggactggatggtgagaatcctggggagtagcaggtttggggaggacacacagcaccgctgggacaaggtgggtggagggtggtgagtgccatccaggggacgggcgggcactctgagtgggtggcgatgatgtaggccgccaagcctcagccccctctgtcctgctctggcccgcagggcgcggatggcgtcggggcgccccgaggagctgtgggaggccgtggtgggggccgctgagcgcttccgggcccggactggcacggagctggtgctgctgaccgcggccccgccgccaccaccccgcccgggcccctgtgcctatgctgcccatggtcgaggagccctggcggaggcagcgcgccgttgcctccacgacatcgcactggcccacagggctgccactgctgctcggcctcctgcgcccccaccagcaccacagccacccagtcccacacccagcccaccccggcctaccctggccagagaggacaacgaggaggacgaggatgagcccacagagacagagacctccggggagcagctgggcattagtgataatggaggtgagagggtgggggcaggggcgggtgcggcccagcgcttgaggtgcccgcaggaggctttgtcggggtgggggcctgcttagcccagagtacttctacagaagtgcagtctcaggaccccagagccagacaggcttgcctggggcttgctgtgtgatctaaagccagtcccttccctgctctgagccttactggtcctggggccagctctgtgctgggagtggtgggcacaaggacacagagcaggctcgggcttttttctcaaggggctcccggtctagccaaggaactggagtcccggtgggggttgggaggctctggggcaggtcatgggtagaaccagagtcgtttccacaacgcctgggaggccaagcaggagttaaagagttgtctgggatgcagccaacatctgaggaagccagggagggagcagccagctgttttggggggaatttgggggtcgggcacttcccggaggctggactgtaacgctagggctttgcggagttagtaggagtttgatcagtcactaggaggtccttgtttgttgttattaccaatggcaggcctcctcaccattgctggagaaaacccgtgtagggtgaagggcaggcatcctgagttcaaatcctggtggtgtcccttagtagccatgggacctcgggcaagtgacttaacttctctgggcctccaggtctccatttgtgaaacagaggtcatagtcatcccatgtttctctaaggctgtgttttgagtcacattgtcccgaacagatcgtagaggtttcatgttagcagcccgttgtgtgcagctgagagggtggcagatccatagaaactgggttggtttttgccgatgaccaggcaggctgctagaggaagttgtttttgaggtgaaggaaatgggtctcagaagcttcagggaggtggagatggtggctgtggcagtggccgtggctgaggaggaggacacatggagcatggctaggtgctgcctggcctgggcctctaactcaggtcatccacagggctctttgtgatggatgaggacgccaccctccaggaccttccccccttctgtgagtcagaccccgagagtacagatggtgagtgtcccaggctgttcccctcccgacctgggggcaggcacacggccgacacaaaggcagggacagaagctgaagtccaccctctctttcagatggcagcctgagcgaggagacccccgycggcccccccacctgctcagtgcccccagcctcagccctacccacacagcagtacgccaagtccctgcctgtgtctgtgcccgtctggggcttcaaggagaagaggacagaggcgcggtcatcagatgaggagaatgggccggtgaggggcaaatgtggggaggtagggagggcagctggaagggctctgagccgcctcctccaggaagccctccagcatggatgctgctttccacccataagctaactgaatcctcccctcaacctcaagaggcgagttcttggacacgagccttgcagttttaacaattgcagccttaccatgtgtcctagtgccttatagagaaggcctctcctttccaggagcgtctctatttatagaacacctgctctgggcaaggcacaggtgttttggcatgccctccagtggagaaactgaggcttggagggttcagatcacctcccatccccaccctgcacattcctagccctttgcagaatttgtcccaccccctggtcccctgttcaccccttgtagcaacccctgtttgaagctcctgggctgggctctgctggcctaggtgggtcctcctcacccttcactgagcctccctgaagcagaggggaaactgaggcactgaggggacatgtgacttccctgagaggcagagctgggactggaacccaggtgtgtttcaggaaggagctgtgggctttgagggaggaggcctgggtccccacagtccccccctcaagcctcagtgtccttatatgcaaaccagcagtcacagtggtgaccttttctgtgcatcctccctcaatgaagcagtgagcactgaagaccaggaacagggcctggtgcgggcggggtccacctgctgctgctctctgtgcttgcgactcatggcaacacagttaattgaatgctctggcctcttgcgtgctgtgcccgggggctggtctcccactgggctcaggtccagttcctgatctgggtctccgggtcccatcctgcgaggggacaggcccagctccgggtgacgggggctgtagtggaggcagtactaggtgccagaactgcaggctccttggcgggggctgacacagcgagggatcttttctgtagcgcagtggccacatgataaggcagtaacagctgattatctcagccctcacagagaccctgttatccgccccatttttcagaaggggagactgaggcctagggaagcaaaacctcttgctcatagtttgtcagcggcagaggtctgattggaacatgactgaaaccccagcccagatcctcagacatgagacggtgcactcagccttaatggctagcaggcaacagcacttccactgtgtaggaagcaatgtcctaggccaagaaggggagagggagaggggcaggtaggcttcgtggaggaggtgtctgaaccgggtagaagggttcctacgtggagcaagacggggaggggcactgctggcagtgggcatcgcagggcacaggtggcagggcagggacgtgctagaagtgggcttggagcccgggtgcacccctggaccgcgtgtgggtgcagggggattgccctgccggcgctgacctcgccccgtcgccgtccccgcagccctcttcgcccgacctggaccgcatcgcggcgagcatgcgcgcgctggtgctgcgagaggccgaggacacccaggtcttcggggacctgccacggccgcggcttaacaccagcgacttccagaagctgaagcggaaatattgaagtccagggagggagcgccccgggccgcgtccgccccgtcccacactacgcccccgccccactcccggggcctgctaatctgaggccgatccgggaccggcctccttgcgtctcccattcccaagattgtcccgcctctgccaatccccgccgtccttccagcccacgacctgccgcgccgaggagcggcatctgtcccgtttcccgattgggtctgtcgtctctctccgcctagcgacagattccttctattaagggattggctcgctgagttctaagctctaaatgggtcaactcctttgttttccgcctagcgacaagggatttgctcgcacggcattggctccatcccctagtcgctggacagctctttttttgattggctcaaatcctgtaaagggcttgaccagtctctacatagtcaccgtccgcttttcctgagttctccctcccaattggctccagcttcctgggggcgtggccaagccctcctcttcccagaattggcccggggccttcaatttacgttctttacactacggggactggggtcgtctttgcccacgtcccgacaacttgttccctgaccccctcagggatggccccaaactgtccctgcctctggcaccccctttcattggttccatccatccccacaacagcctgccaatcgaagcccgtccctgcatccaggatggtaccagctcccgcccctcgccccccacctccacaggtgccttaaagggccctcgtccacccaaggtggggggcaggggccctcactctccggccctggtgtgggggagagagtgaggggttgggggatcggcagttgggaggggcgctctgagattaaagagttttacctctgagataaatgtgaagtgtgttgtgagtgttcattcaacattttctgaaaccgaatggcagcgtctgattatcagtgaatagctgggggttggaattactgtgcccattttatttacttttttgagacagggtcccactctcgcccaggttcaagcgattctcctgcctcaacctcccgagtagctgggattacgcgccactgccgcccgggtaatttttgtattttcagtagaaacagggtttcatcatgttggtcaggatggtcttgaactcctgacctcaaatgatccacccgccttggcctcccaaagtgctgggattacaggcgtgagccacggcgcctggctttgtgcccattttatagatatgaagacacaggttcatggggtggaggagagcatcccagtcttatgtgaccatggaacccaatcttgaggaggtgagtgttggagacagagcccacatattcaccagcaaagccaggaactccagccgggagtcttctattataaaaggactggagcaactgggcttggtgcctcacgcctataagcccaacacgctgggaggccaaggcgggaggatcacatgacaccaggaggtcgagatcagcctgggcagcacagtgagaccccttctccaaagggaaaaaaaatggctggaggttagaaagcaggtggaacctcgtccgaaattaggactaggtaaacgtagtcccaccagaccactaccgaaagaatgctaacactaaataagacttaaacggatctgagcactttgggaggccgaggtgggcggatcacgagatcaggagatcgagaccgtcctggctaacacggtgaaaccccgtctctactcaaaatacaaaaaattagctgggcgtggtggcgggcgcctgtagtctcagctactcgggaggctgagacaggagaatggcgtcaacccgggaggcggagcttgcaggtgagccgagatcgcgccactgcactccagcctgggcgacagagtgagactccgtctcaaaaaaaaaaaaaaaaaagacttaaacagggctcactaccacccattttttaaagcttttgtcacgtgttagctcctttaatcgtcatggtaaccccacgaagcggaaacgattatcctttttatagatgaggaaactagaacatcgagggtgaagccaaagaaggacttaggggcgctgtcgggggcggaggtttcctcgactgacaatgaccatcagatgggaaaaaaatcttcctccctgggatgaaaattagaagtcaaggtggaaagaggcaaatctgctaacggaggatccagtccccgctaccggcctgagcctcgcgttgcagcaagagagatgaaggtcagggctgccgagagaccctgggggccgggagtcggggaagggggcgttgcagcaagagagatgaaggtcagggctgccgagagaccctgggggccgggagtcggggaaggggcgtggctgctgtgggaggaggccaggccccgccccccacgaggggacgagtcatttccgtccgccgaggaaccgaccgccgccggccgggttgcaggcggggcacctcgggcaggacctccctggtcggaagtggccgtgagcccaagccgcggtcccgggtgagtacggggcggggcggaggcatgtgcgaggctctctgcctgtacgctggaaagtggggattgcaactcggggagggatggagyacgcgtcgtcgcctgggaaacgggtcgacccgcggaaggcgagcgggtgggacttccggagcagttaatggtggggaaactttctagtggatgtgggaggaggcgggacttcctgcagcaaattggggctgtgcgccgctcaagcccgtttacctgctccccaggccggcacccaggatgggcgaggtggaggccccgggccgcttgtggctcgagagcccccctgggggagcgccccccatcttcctgccctcggacgggcaagccctggtcctgggcaggggacccctgacccaggttacggaccggaagtgctccagaactcaaggtgagcggggcctgagctggagggggtgtggcctgctgcaaaagcgggaacaatccagagggacgcttggctgctacgcgggattgcagtggtgcagccagccccgaagtcggaaggtgctctctagggagtacaggaagataaagtttgtgcttgatttagaattagctagatcctttgggggagaggggatcgagccgatttmgggaggatgttcactgcgcggatgatgctcaggccatcgngaaatccagaaacaggcgacgaccttcgtcaagagaaaaatgatcctgtggagaaaagtaaatgtcgctaggttgggatggatggtaacaggccaagccccggacctatatctagccacattttttgtcaaggaggaaaccaattctgtagagaaaagtacctccctgtcccttgcaaggaccagtgtcaggcaatcctagtgccactatctggctactgcatgtcaaggagccaatcccatgtagaaataarctgcctcttactccctggatgctatrgcctgaagcaggccacactccccagaaatgagggacccaatcacacaaggatgcaaatcctgactccacccctccaatcctcagtggagctggtcgcagatcctgagacccggacagtggcagtgaaacaggtatcagtgcctctgcaagggccagcaaggcctggggatgggatttggggaggaattgcaagccgtcagtgaaggggtacattaggaaaatctgattggggccgggcgtggtggctcaagcctgtaatcccagcactttgggaggccgaggcgggcggatcgcttgaacccaggagttcgagaccagcctgagcgacatggtgaaacctgtctctctaaaaaattagcgggaatggtggcgcgtccttgtagttcctaatcgggaggctgaagcgggaggatcccttgagcccagtaggtcaagggtgtagtgagcagtgatcaccacactgtacttcagcctgggtgacagagcgagaacctgtctcaaaaaaagaaaagaaaaaatatggctgggagagaaggggatgtgtccagtaaagaaagaagtgttgcctgtttcagtggggtgggtacctgtccaagaccttagaaattggacaaggcggccaggcgcggtggctcacgcctgtaatcccagcactttgggaggctaggcgggcggatcacccgagatcaggagtttgtgaccagcctggccaacatggcgaaaccccatctctactaaaaatacaaaaattagcggggcatggtggcgggtgcctgtaatcccagctactcgggtagctgaggcaggagaatcgtttgaacccaggaggcacaggtttcaatgagccaagattgcaccactgcactccagcctgggcgacaaaacaagcctatatctccagggaaaaaaaaaaaaaaaaaaaaaagattcrgacaaggctgaaaacctgtaaccgttccaaagcccgttccaaagtgaagaggtggggcctaagggtctgatagtggtggagaagggctgatttttccgctgggtatttgattggaggaagctcccggtgggggcggagccagtcccagctcctccctctctttctgcagctgggagttaacccctcaactaccgggacccaggagttgaagccggggttggagggctctctgggggtgggggacacactgtatttggtcaatggcctccacccactgaccctgcgctgggaagagacccgcacaccagaatcccagccagatactccgcctggcacccctctggtgtcccaagatgagaagagagatgctgagctgccgaagaagcrtatgcggaagtcaaaccccggctgggagaacttggagaagttgctagtgttcaccgcagctggggtgaaaccccagggcaaggtgagggccacgccgagggctgwgggagccgccacagactgggacccaatcccacgtttgttgcgtgctctcaactttttagcctctacttacttttctgagaaatgggcctaatgataaatgcagggatcgttgtaagcagttaagcagtggggagaatgatatatgtcagctcctgcgttacccacagtgaccacccagtaatcagcaatgaccatgactgtctcagtaggagctattacgatgaggattttttatgtccagagakacttgagttcaaatgctgttaccaccacattctgagtcccatgtgtctcatctctacgatgctgaatccataaaaaaagcacgtggcatagttcctgacatgcagttagcacccaaagctttgctcctgcttttattttcacggttattagcccmccgaggtggtgaaggccaggggaagaaggaggctgggtaagacattaacccccattttaaagactgtaatcctggggctggcgtcataaggagtaacaggagacagtaaggttaagatgtcgggccccactcagaggcatcacggatgcttgagatggaggtgctctgtgactcggtttccccatctgtgagatggcagtgataacaccctgcctggcagggttggtgtgagtcagcctgtgagtgaggagggtcagaggtatcacagtgctgctgtttgtctttccttggtgacaccaggtggctggctttgatctggacgggacgctcatcaccacamgctctgggaaggtctttcccactggccccagtgactggaggtgataagaggcaaaacaagggagtgagtgaggcctggagtccacctctggccccgggtcacccctgccgcttcatacctgccgtaggatcttgtacccagagattccccgtaagctccgagagctggaagccgagggctacaaggtatgtgcagccgcctgtctgcatgggcacgtgcacgtggcggtccgaccgcagtcagaccaaggccctggtgagcagagygtctggtgacaccctttgctccccagctggtgatcttcaccaaccagatgagcatcgggcgcgggaagctgccagccgaggagttcaaggccaaggtggaggctgtggtggagaagctgggggtccccttccaggtatggctggaagggaggctgggagctatgtgggggcacagagatccagagcgagrgctttagactccagggtaagcggggcggaggcctcaggcagtgtgatgctgataggaacccatcatcagctacaaattctgggctggggtggcatccagtaggtgcttgagggggagctaaagctggtggccccctcccatccacaggtgctggtggccacgcacgcaggcttgtaccggaagccggtgacgggcatgtgggaccatctgcaggagcaggtgagtcttgcagcctgccyggcccccctccttttcctcactccagcccctcactcctgggctccccggcctccggttggggcctccttactcctctgtcctctctcgctccctccttctgttttttgctgtgacatcttagatgttggtttacgagaccagtgctttcagactttctacatcagagtagtagggaagctgttcattccttcgttcattcgtttgtgtgtgcatttgttctgaagtttagcgcattcttgagctgaaggtatcagtgagcgggacggcctgctccagcagggccctcacggcgagggcggtgactctaggcggatgggcagactggcgtgtaaaacagcaggagggagggagctggagaaagcaggcatcacccgtggtgggcagggatggcctctgaggaggtgacatcagaggaaaaggcctaaggcagggaaaggagggagccaggtggacacctggggaaagcggtccccccccttgtgggagtgacagcaagtrcaaaggccctgaggcagtccctagcctgggctagttagggacagcgaggcccatgcggctggcyctaagcgagggaggggagagggcagggccacagggagggccccgcttttgccctgagggagggggaacctgggaggcgccggcacgccggaggctggagctgtagcagggtgggtgccctccggtggccgcgtggggaacgggaggaggtgaagtcgggagacctggagggagggggctgtgtggagagaccacggagkggggagggggccaggagcacggtgcaaagtggctggagagtgaggacatgaaaggtcgggggatgattcctgatgtggggcacagaccaggcgaagcagccccagggacccgctaccgctgcggggggacatttgtgggaagggcctcctcactaccgtctcccgtaggccaacgacggcacgcccatatccatcggggacagcatctttgtgggaggtaagggcctggaggctgctgagggtgggctgggacgcctccctccgagctggtgggaacggggtgtcccgtgtgttccagacgcagccggacgcccggccaactgggccccggggcggaagaagaaagacttctcctgcgccgatcgcctggtgaggcccctgccccctgccccgcgcccgagcccgaccctggcctgtgtctgatgttcgtcctcaacccctagtttgccctcaaccttggcctgcccttcgccacgcctgaggagttctttctcaagtggccagcagccggcttcgagctcccagcctttgatccggtgaggccctggggcgggggtgggggtggggatgggagggctcccggggatggggacggcatctcacgcgtgtcccccgcccctcgcagaggactgtctcccgctcagggcctctctgcctccccgagtccagggccctcctgagcgccagcccggaggtggttgtcgcagtgggattccctgggggtaagtgtcctgttcctgtgcgcgtgccctgagccccgcctgggtcctaggccacccaccgacactgccccccacacagccgggaagtccacctttctcaagaagcacctcgtgtcggccggatatgtccacgtgaacagggtatgaccaggcttttgccgccccaaatctattataaagttcccatctccacctctcaactggtttggggcggctttcctccatcattgcctccccgtccccgctcggggtcttctctccccctgggtctgccgatctgtttgtgacctctcgtgtccccaggacacgctaggctcctggcagcgctgtgtgaccacgtgtgagacagccctgaagcaagggaaacgggtcgccatcgacaacacaaacccagacgccgcgagccgcgccaggtagcgtgaccgcggggccgtaggtggcctgcggcggggtgggcggggcctgcacatccagctccttcccccacaggtacgtccagtgtgcccgagccgcgggcgtcccctgccgctgcttcctcttcaccgccactctggagcaggcgcgccacaacaaccgggtgagcccgctcagcccggacaccccccgggctgcaccccctgacccccctcctcccctgacccctgggcctgccgcccctctgatgttccccacagtttcgagagatgacggactcctctcatatccccgtgtcagacatggtcatgtatggctacaggtactgttggggatagcagggggcaggggcactggctgggccacatgatccaggctgtccctcactgttcccaccactgccaggaagcagttcgaggccccaacgctggctgaaggcttctctgccatcctggagatcccgttccggctatgggtggagccgaggctggggcggctgtactgccagttctccgagggctgagccccgcccagctcccctccacaataaacgctgtttctccttgagcttggccggcattttgctggaaggagggtggtccccacgggggaggggctccaggcctgccagtttcttacatggaggaggctttaaggacattttcaggtaacaaaaggtggggccctaccgaggggagtccagctgggacctggcatgagcactttagacattagccggggaacacacagggagggcgctgtgtggccccccgagagccagctggtgagcccacgagcctcaaccgaggggctggctcaaggccaggtgtgacccctgaggacaaaatccagctcaggttctgtgacactgaacttgaacccaaggcctgcgggtctggagattcgggggggaagagggtgtggacagccgagagccagacccagtgagttcccgggctgtccagcctgctgggccaccttagagctagggggctgcaaggcatcgggcagtgagcagagaaggcaggcaggtttttaaaaggctttattggggaaacgtaraggggtggggaccgtccttggaggcctcaggacaccatcctccatgttgctgggcagttgaagtccccaggggcccctgctcaraagcrtgtcacctgggggcaggggtgcagtgggggctgctggccacaggctcccaagcactgaccccacatccctgtgagcagaggcctggccccacccaggcctggataccacctcccatggccctgaggctgggctgcagtttcccgacagcctaggaccgctgggactgctgcctctccctctgctctgctctccccaaggccaaggtcgccctgcttctttcccaaccccaccccccccacatgccccagggtccctcctgtacatgacagggtcaccactcaccagtctctgcgggggcctcatctgtgactcctggaggggcccagcccggggtaaccactacccccccatctacggcgagaaatcagaggccagtggtgagcaggcagcgggggtggagggagactgagcagccctggaggccggccacctcacccctcgttgctgttgctcctgctccaggttccgctgcaggacctgctgctggttggcaatgacacgccggatgccgttgacaaagttgccctggtcatgggggatgaggccaatgaagattttcttctctgaagagtacaggagcataagcacgcggatctcacacgatgctttgtaggaaaagtgcacgcagccggcctggcaggcacagggcgtggtgtcaccagacagcaccacagggaccagcatccctccaaccacggcaycatgccgtgggctccatgagccaggcacagcctaactgctctgtcctcacaccccccacccaccctggaggtgggcccccttattgggatgacacggtggccaagagcaatgggtgggccaaaggccaacaggctctgtcgggaagggcccaagaacctgcatttcagagctcctgggcaggccaggctgtgtctggggccacctcaccacagccacctgagccaaccggccatggcttcaactcaggagcccgagggatctgcagcggccggcccagcacaagcaagggctgaggtacatggagcctttctgggtttccttgaggaaactttttttttttttttgagactgagtttcgctcttgtcgcccaggctggagtacaatggcatgatctcagctcactgcaacctctgcctcccgggttcaagccattcttgtgactcagcctcctgagtggccatcatgcctggctaatttttgtatttttagtagagacggggtttcaccatgttggccaggctggtctcaaactcctgacctcaggtgatccacccgcctcggcctcccaaagtgctgggattgcaggcgtgagccaccgcacccggcccctgagggaatgcttgaaattgctttcatgtaaaagcacctacacccaggccccccccacccacgaacagcttcgtggacagtttactcagactgagtcgaaggtaattttaaggtagtttcgggatattacccaagtatggcccagctggaaggtggacatcggggggagggctcagaaacaccaaagtccaaccttctccacctcacagatggagaaactgagcccgagagagagaagaggagtcagctgagcctcccccagataagacaatcgccaaatattctgggaccttgctgggggcagacagccctccctgcccagcaatgggcctttgggatgtggcacaagctcccgggaaaccwggagtgacaagggcgcctgtccctgaggagtggagagcgcggagttggtgctgagtcagccctgatgtggcagaggaggagcaggcccccgcagaaccagggtcagtgccccatccagtgccgtggggacagcacagagcccccagaagtcacgcccacactagccaccctctctccccagctggtctgggacatggtgctctgttcctctcccatgtccgcccccgtgagcggtccgggctcgctctgccctggccggcccctcccctgcgtctgctggcaccactcacgaarccattgtccatgatccggcacaggctcttcagygtctccaggtccttggtraagtggaactggaccaggcgcgagttccggaacagcggcactagggtggtctgcggggaagcgaggggacccccagctctggcttctcccaccacggcctcccggctcccagcccgctgagtcccccgggcccaggaccaaactgagactcccctgtcctccctacctcaggaaacgtcatctccaccgctcaaccagcccaaccctggagtgctgtggaagccgctctcagatcccttggcagccccccaggtgcaggtcgtggctgcccctgccccgctcagtccctgcacagccaccagctggctgcctgggaccccttgaagccaagcctgaggagctacccaccacacctgcttcagcaccctcagctccgctccctcacagccagctcaggccacctggggaggcgctcttgcccccagccccgccctctggaagagctactgcgtgcaggctccagcacccggccccagcccctcaccagcagctgctgcgggatragctgcatgtacagcttccttggccamtgctcggtcctcctgtggggcacaaagggacgagggtcaggaagccccagctcccctggatgctgcctccaccccccagcccagcactcacaggatctccccctggttcacgtagacgtgggatggcagccacctcttggaccgactgttgggctcaggcctgggcttttgggggagaggcaaagaggagccctcagggctggagacccccaatgccagtgtcccctcccagccacagtccgtgaggatctgggggtcccaagtccctgggctgccgagtgctcacctcctgccactccatgacaccactccatgccagaaacttgttgttgacgayctggactgggcctgagttgacaccaccaggtcccactgcctgttggaagggaacggggtgggaagaggggcccaggctcctgggaaacctgtctgtctgtcctggggcctgccatccctccctccgagccttggcctgttagccccagctgggtccattctctagycccaggggaacaggccctgcccctcatctgctcacagccccccatggctccccagtggcctgagacaggtcccggccctcacctggtgcacaggacctgcagagtctgcctcaactggcaaggcatgaccaggacacgtggttaccaggcagggccttccagccgcaggacgatcccaacccctgcccagctccccgctccgctggcttccctgccgccgcgccaagacccaccctccagccctgcagagccgcccagtggccgcttttccatggagccctggtgggaaccmgcccggcatcctccgggctcccctgcagctccttgctccagccatcgcatcacactccgcccacaccaagtctggctgcccaaccagggcagtggggtctaatccccctctgtccccagaggggctgtgcttggctggcacacctgcttgcgggtggtgatgacctgccggatggcactgacgaagccgctctggtcgtaggggatgaggcccatgaagatcttcttcttggacgagtacaggagcatgagcacgcgcacctcacagggggagatgtgggggaacagcatgcagcccgcctgygggggccgcgggtcaggaccctgtggtcactgcccggggccactgtgcccccaccaccctggaccgccccacctgtaggggatgaagggagatcatcggtggacagaggcccccacagtcaaggccatggccataggtgaggggcctctgagagcccgtgcagcgcccatcggcatcccccgaccctgccatggctgaggtcagagtggcacccggcacccaggctgcggtgagaatgccaagaaggcactacctcccacccacatcaccccctgccgccagccctcctgactgcctgatggggtgacttggcctgggggttaagagcacaggcagcgccccaccgttctgctgcctcctagctgtgtgacctaacaccagccacctcctgcttctgggcctccatcatctgtaaaaccgggtaatagtgcacacagttggtgccacataaaggctcaacagataaagtgctggtgcctcttgaggatggcgcatgggagaactaagcctgacagatgtgcctggctgtggtgtctagatgaagtggtgtgaccgtcccaaaaccccatgtcccctccccacaccgggccacccccacagtgctgtcccctccacgctgccggcctaacttctcaaccttggtgtccagcccagggatcacccgctcagggccctgtccctggcctccctggagccatgcacagtcagcctcccagggccatgcctggggggtgagtatggatgtccactttccctacagactgggtactcggggcccagatatggcaggccctcaacaaacggtgctgggtgaagggggaacrggtcacttaagagacctcatgccaggcacaagccctggtctgcccctggtctcctgagggagaagggaggccctagcggaacccagggcgctcaacggcagctgggacgggtagaggcagactgtcccaacagggaacagggactgggaatgtcccagagccaggtcctctgggcagacaactcgctcccaccccacccctgcctcctctccagcacctgccatctttcacagcccaagccccctttctgacctgccctgcgccagaatctcagtcacctgaacagcctcaccagctgggttcacccagcactcactaggtactaaagtcaccatctcaagcgctttacacaaattccctccctccagcctcccggtggccctaggaagcacggctcccctgtcctccctacctcagaaaatgtcatctctacccctcaaccagcccaaccctggagtgctgcggaagccgctctcagatcccttggcagccccccgggtccaggtcatggccgcgcctgccccactcagtccctgcacagccactggctggatacctgggtccccttggagccaggcctgaggacctactcaccgcgcctgcttcagcaccctcagctctgctccctcacggccagctcaggccactcggggaggttagcccattttacagaccagaataccaagccccaacgtgccactccctcctggctggctcttgtgcctagcacacccatttaccaggtccctgccatacgctatgtgtccccgacaggctcctgggccccaacagggctggccccagtccctccctgcactcacgcccccagggccacctcgaagctgggcacagatgcagaaactggaggcctctcaggctgagttccttcaccctgtgctctacggagggtgcctggagtcagtcatttccagatggggtccgag

SEQ ID NO: 94929 - DNA, 23606 bp, Homo sapiens
atcgcttgaacctgggaggcagagattgcagtgagctgagatcatgccactgcactccagcctgggcgacagagtgagactgtgtctcaacaaaataatataataaaaacctggtgcggtggctcacacctgtaatcccagcactttgggagactgaggtgggtggatcacttgaggtcaggagtttgagaccagcctgaccatggtgacattcagtctctactaaaaatacaaaattagcccggcatgcctgtaatcccagctagggaggctgaggcaagagaattgcttgaacctgggaggcagaggttgtagtgagccgagattgcaccactgcactccagcctgggcaacaagagcggggctctgtctcaaaaaataaataaataaaaatttttaaaattaataataattagcaaagcatggtagctcacacgtttactcccagctactcaggaggcagaggagccgggaggatcacttgagcccaggagttcaaggctgtggtgagctatgattgcgccactgtactccagtgtgggtgacagagtgggaccctgtctcaaaaaataaaatagtgagagtagtagtgctacctcaaagggtcgctctgagggttaaaatggggtcaatgtggtaagccctctgtgcactgcctggcatgcaggcattttgttggtgaggttatatggctacctgctgcctttccaacagtgcctgccaggatgccctcccggggaaccccctgcctccgtcctgctccttctggtgggctctggtttcacccccaacgaggccttcccaggtccccattgacaatcacagccacctgcacaccctcccaccgccctccttcccccttcctgctttacttttccttccatagcactttgggccttccaacagatggtggaattgacttgttttacttgtcttctggtttatttttctttgttggtgtctcccacctctaacacatcagcttcaggagacccagaagtcttcccctctccttttcttactttatctccagtgccggtttcagagttggattgggctccagcgtgctggccctgtggcttggcgactgtcgcagtctccctgagcggcactctccccactggtccagtgagcaccgtctcatttacctgccttggggggtcgctgtgggtattcactgagagagggacacaagccaggctctggatggaaccggtttccctggcaggagctggtcaagtgtgtttgaggagcagggaggaggaggccagtagggctacagtagggtgagcgggcgacagatgagaggaggagaggcgccgggccagccaggaccctgtggtcacggtgagtgacaactcggactttgactctgggtaagccaaggtctctgagcagcggagggacaggcgctgatttaggcgctaatgggcgccctctggcggctgcctggggacagactgctgggggcgagggcagaagtaggggcacagggaggaggtgagtggatctcacccaagtcgggggcggtggagaatgctggatttaacttagcggtgaagctgacagatttggctaatgggccagatgtggggacagactaaaggatgctggcccgagcagctgcagggcgacatcttaagttccccgagatggggaaggtgtggggatgggggcgatgggggtggggagcaggactggaggtggtccggtctacagtaagatcagaactcatagcacatgttgaggggaatggatataagtgttgggctcagcaaagaagctcgtttattttattttattttaatttttcagatggagtctcactctattgcccagactggagtgcagtggcacgaccttggctcactgcaacctccacctcctgggttcaagcgattccctgcctcagcctcctgagtagctggggttacaggcgcacaccaccatgtccggctaattttgtagttttagcagagacggggttttgccctgttggccaggctggtctcgaactcttggcctcaagtgatccacccacctcggcctcccaaagtgctggaattacaggctgagctaccacgcctggacaatttcttaaaaaatttttttaaagtaggattgatagcagatgagttttctcggtgggccaggtcctctgctagggatttcaatggaatgatcccatttaaacccactacaacctcatggggctcttattgtcctcgtcttgtgggggcagagaggaaaagtccccagcatgcagagtgttggaatctggatttgtacacaaagccacgactctgaattgttcaaatcccaagactctcttccccatctctgactctgtcccccaactcttcactctctctggatctctgtctaatcccactccagtgtcctgaccctcctcgagctcaacctttcctcctcctgctaggaccctgccccctcatccctgtgcccttctgtctgggtctctgtccccttgtctgggtgtctgtcaccctccgctctctggttcctcgccttcccgtctctaatctcacagggctgatgtggacgctgctgtatggggggaacacctgccctgctcacagggctctgccacttttcccttccaggagggcatcctggctgtttcacccgtggacttgaacttgccattggactgagctctttctcagaagctgctacaagatgacacctcatgtccctgccctcttcgtgtgcttttccaagtcttcctattccactcagggctgtggggtggtggttgccctacctgtttttgccaaaaataaattgtttaaaacttttcttattaaaaacgttacaaagtattcaattgtctgttcttacacttgggaactaaagttttaaggagaggagatttggttcagagatttctgtggcttacgcaaattgaggaaagaaccagttcattcattctagaaatatttatttgcagcacctacaagagcctgtctcctggacatgtaacatatttgagagaatacctgtaaatattccagcaacttgcatttttttttcctattgcacgatctggttattctagctaatgctgtatgatggtcatggagtctttccagtgaattccacagaaaggtacagtctaacttcacctgtgtctaggacaccaccctcttcttgtttttctcctcccattgctcctttcaagtctctcttgctggtttctcatctacctacagaccagtggtttgtctcacacacaccccccactctccctttttttttggagatagggtcttgctctgttgcctatacttgcactgttatatagatacagtggcactatcatggctcactgcagcctcaacctcctgggctcaagtgatcctcccacttcagcctctctagtagctggaactaaaggcatgcgacacgacgcctagctaatttttaaaaaagaatttttatgggaggccaaggcaggtggatcacttgaggtcaggagttcaagaccagccaggccaacatggtgaaaccccatctctactaaaaatacaaaaattagccgggcatggtggtgggtgcctgtaatcccagctacttgggtggctgaggcacgagactcgcttgaacccgggaggcaagaggttgcagtgagttgagatcacgccactgcactccagcctgggcaacagagcgagactccgtctcaaaaaaaaaaaaattgtagaaatggggtctcccttatgttgcccaggctggtctccacctcctgggctcaagtgatcctcctaccttggcatcccaaagtcctgggatcacaggcatgagtcactgtgcctgggcggtttgtctcctttatagggccatatcccccttcacagagtaatgtttgtaaattaataagtgaaatgtacaggattacaaaccgaaccaattacagttgatcctcagtatttgtagattatttgcaaatttgcatccttgctacaatgtattcataccccaaaaattaaggcagtgcttttgtggtgttttggagggcaatgcttatgcacagagctgcaacaagctaaagacctgatgtgcatatttgcagctgggctcctcttgcttcagctcaaacactggaaacaaatgtccttttcttggtttgtttagtgccatgcttttcaatttttttttttttttttaaagttagagtctcggtctgtcgctcgagctggagtgcaatggcttcatcctggctcactgcaacctccacctcctgagctcaagcgattctcctgcctcagcctcccaagtagctgggattacaggcgtgtgccaccagtcctggctaatttttttatttttatttttatttattttattattttttgagatggagtctcgctgtgtcgcctaggctggagtgcagtggcaccatctcagctcactgcaacctctgcctcccgggttcacgtgattctcctgcctcagcctctggagcagctgggactacaggcgcccaccaccacacccggctaatttttgtttttttagtagagacgggggtttcaccatattggctaggctggtctcgaactcctgagcttgtgatccgcccacctcagccttccaaaatgctgggattacaggcgtgagtcaccgcgcccggccaaattttttttttttttttttttgagacaagagtctcgctctgtcacccaggctggagtgcagtggcgcgatctcagctcactgcaagctccgcctcccgggttcacgccatcctcctgcctaagcctccacgcccggctaattttttgtatttttagtagagacgggggtttcaccatgttagccaggatggtctcgacctcctgaccttgtgatccgcccgcctcggtctcccaaaatgctgggattacaggcgtgagccaccgcgcccggccgcctggcgtaatttttgtatttttaatagaaatgggggtttcaccatgttgcccagactggtctcgaactcctgatgtcaagtgatccgcctgcctccgcctcctaaagtgctggaattacacccgtgagccatcgcgcccgaaccctattgtaaattttaagtctcaggcgtttgccagcggcacgccagagagtatagcctgcgcggaggcccagaaaccaaagagcgagctcattccgggattggagagaagtgtgagcagagggaagtagagggatcggggagaggaggggcaggacccacgcattcggccctttgcattcagcttcattcaactaggaactttttctgcaaatcaaggaaagcttcccggaggaagtggtgcctaagctgtgctctgattcacgtttagaagctgaccagacaaagagaggtgggcgttcctggcagggggagggacttggcaaaaaccaagtggcttgagaggggttgatggttttaaaaaacttggaatgattatgtcaagggctagggatttaatgtgttgacgacggactcctattcctcacttgcttcgggaccccagctatgcccttcctctctctgggcctctcaccgattccgtttttcccccaggtaatgagcacaagctccctttttcctccagactccccccgggttgggaggatccaccgagtggacgaggagtgataattcctttgagccaatcgttggtgcctgaagccccgccttcttccctacccgtgggccaattgccgtgttctccttgaggccggccgcttggcgagggtgggccaaaggctgcgtgacgtcgcttccggataaaccaatggcagcgattaggaggcgggtcgttttggtgatggacaggtgtttcaagacgcccctttagcgcggggctccccgggaagctttgaggcggtgctgggtgtaaaggggagggcattcctggtggattttgcccaatcaccagtcgcgcttcttgcaatagacgggcagttttccccatcccgggtcgacttgagggggcgggattctggacgccagagttggcaaacccctgacctatgatggacgtattctctagccaattactagacggtattctcagacgggccgcctccattgccaatgaaatcttccagcggggtcgcggtaggcgggccgtggaccctctggtataaggcggtcccgggggagtgaggagaaagggggggtcttggcggccggaggaggagtaggtgcgggtgaagatggcggcagccgaggccgcgaactgcatcatggaggtgagcgcttggagcgccgccgtgggcgggaggcggctttgggtcggtgtttcacgcctctgtggtggggaaagggctctaagttggcgatatggggttggaggtcccccgccgcacacgggggcgccgcacgttccacatccggggatatcgtttgaggtgacggctccctagcttccaagggccttcggcatccggcctagcggagggtcttatcccccctcccacgtggaggagggctgggggcgcttccggccaggcccccacgtggccgctgcgcggtgggtggggagggggtgtgccgagtccagtggcccggcggctccacgtgcgggacaaaggccccgcccccggccgggrakgggcgcccaggggggcggkgagggggtccgaccctcctgacgcccccagccctcctccccggggacctgggcacacgccgtggggtgtgatcgacctggggccctccacgatgtggggagtctcttgggaggagcagtgcttctcagccctttaccaacctccttccgagctccgggggcatctgttgggatatcggacccggttttgtgcgttctgggttagggactggaggaaaaccaagaatggggtcccccgccgaccccgtttcccctcccagaattctccccctcgcccagggctttaggagttgggggatggggcatgcccctgtgacctccctctgggtggtggtggggcatctagatagagattttcccattaataggcgccgtgcacccccttgtggccatttctgggtgtgtgggagggacatctttttcatggggcgtgtcctgaagcccacctcccctcggatttcttcctggcgggcggagggaggagggtatgtccgctgggaaggagttgtgggaaatatgtaggctgagagctttaccctactggagccgtttatctcccccgggtctttgtgagggtgcgagatgacctccttcttcctgaagccctgtgcagggtcctgagccctggggtcctgagagtgggtgcctgaaatggtttcgagtgaggtttggttctcgtgcagccatgtgggggaggtttcagtcttgcgtttcaagccctctggggctggggttgtctggcggtagttttcagtggtattgagaaataggcccgagtgggaaaccccctcagcacctttcttcttataggcatccccgctagcttgggagagctggagggagggtgcttggagcctagtaggtcatggcctgtgacgtggcccttcttggagacttggatagtggtcacatctggaagagatgtaatctgatggggcctctgtccttccaccccttacctatggcattggctggaggggcaggtcagctctcagctgtcaggatgcagctcccaggggtcactgtaatgacttcccaccctcttggctgtctcctgcacctggggctctatggatggaggaaataactttcccagaggtggcctcaggcttggccgcacctggaagtcttcagggcctgggatgggtgtctgaatgggggcgatggcctgactccccaagccactttttttttttttttttttgagacggagtcttactctgtcacccaggctggagtgcaatggcttgatctcggctcattgcaacctccgcctcccgggttcaagcgattctcctgcttcagcctcctgagtagctgggattacaggcacccgccaccaggcccagctaatttttgtatttttagtagagatagggtttcaccatgttggtcaggctggtctcaaactcctgacctcaggtgacccacctgcctcggcctcccaaagtgccgggattgcaggtgtgagccaccgtgcccccaagccactttctggagtcctctcattcttagagggtccaggagctgcccatcttccctgggaccctaccttcgtgggcagagggtcataagggagggggttggttccagctggttttgtttggggctcctgagtccaaggcaggagctggggtctggggtactagctctggggaagtacccgtgtgccacacctctattctggaatcctctcagacatgagactggtttgcagaggtggcagatgccctgtgggcatatcctgccagccccgctcccttctgctattcatggcaccctaggataggggtgtgtgtgtcaggaagtgtcacctaatctggaggagattaggtgatgagagggagcgacagctggcggtggtgggtgccaattcccctggcctggatgggggaggtgtgtggtcagctgcctggccagagaggggcagcgtgggggtgggccaccatctctccagccacagctgggataggagacccccctttcttctcccctcacttttcccaccctttcttaaacaccccacctcattacttgcccccttcgccaccactccccaccaagaaggagaattgctggaaacccaccccccggccagagcccaggttccgccacccagccctcccacagccactcccagtagctaatcctttttccctgttactctctcctagaattttgtagccaccttggctaatgggatgagcctccagccgcctcttgaagaagtaaatatccttttgtgagacccctccccaccctgacctccacatcaatatatcttgccacacatctggccctttcttgaggtctaaccatacccctcttgcttcaaaccagtttaccccaggcccccagacacttagtagcaacccctccaggttcacagcccccgctggcctcccccagtatcgccgctacttccttaactccacctccaacccccctttgcccttccctgtgtctgcccccattttccttcccctcccctcccyagctgtgggctgagctagagacggggtcagagagactggagagatggtaggcgtggctgaggtatcggggtgctcccctggatggtgctctgggggggtcctggaagtggaaaatggggttgttaggttttggggttcctgggggggcaagatggcaggcgggggctgtagggttgtcatggtatgattttgggggttctatactactcttcagggaaaagtagggcgctggaggtttaagaggctgtggggagcccccagatctgacccatgatcccatcggccccctcccaggtgtcctgtggccaggcggaaagcagtgagaagcccaacgctgaggacatgacatccaaagattactactttgactcctacgcacactttggcatccacgaggtcagtggggacagtccccaaggccccaatcttaggggggcttaaatgttggggaaggggtggaacctgttttcccacgcatgcgcactgcttcccctggccgcaggccgcccccctgcccctctgctgcgcacyycctagggtcgcctcgccaagccgttgccttggagaccgaggttagcctgaatctctgcaggggcctcgcgccgaaggctggggtgggagagcgcatgcgtgcctggggccttagccagaggtcgggcagggcccactggtctctgccgccctctagtgaccggcggtgggactgcgccccggctgctcccgccctaacagcttctgcacacttcagatctgactgaagacactgaaatcccagaacraagctggggtggcattctaaggaattttcttttccccctgaggcctttttcataaaattgtggcaaaatatgcataaaattgccattttttatttttagagacggtctcgctctgtcgcccaggctagagtgcattggtgcaatcatggctcactgcagcctcgacctccccggctcaggtgatccccccacttccactttcggagtagctgggaccacaggcgcgcgccaccacgcccagctgatgttcttatttttctgtagagataatcttgccttgttgcccaggctggtctcaaactcttgggatcaagtgatcctccgctttggcctcctgaggtgctgggattacaggcgtgagccaccgctcccagcctgaggacttttaaaagccagggttcactggttcttaggtagcagtggtgaagtccggccaagattggagtttagaccatctaatctgattttttaaaaagggaaactggctgggcgcagtggttcacgcctgtaatcccagcactttagggggctgaggtgggtggatcacctgaggtcaggagttgaagaccaacctgggcaatatggtgaaaccccatctgtatgaaaaatacaaaaattagccgggcatggtggtgtgcacctataatctcagctacttgggaggctgaggcaggagaatcacttgaacccaggaggcggaggttgcagtgagctgagattgcaccattgcactccagcctgggcaacagagtgagattccatctcaaaaaataaaataaaataaaaataaataaatgaataaatataaaagggaaactgaggtgcatggaagaaagcgagagggccgagctctggccctccgagctctcaggacacgctgttctccagctggggatatggggcccctcacggcgtctctgtgccattcttgccctaggagatgctgaaggacgaggtgcgcaccctcacttaccgcaactccatgtttcataaccggcacctcttcawggacaaggtggtgctggacgtcggctcgggcaccggcatcctctgcatgtttgctgccaaggccggggcccrcaaggtcatcggggtgagtctccagggtggccaggcggggccgggcctgagggatggaggggagcccatcagggctcagggattggatggaggtgatgggggcaggggatgggtctcaccctcccttcttcctgggccctcagatcgwgtgttccagtatctctgattatgcggtgaagatcgtcaaagccaacaagttagaccacggtgagcccagaaagaggatgggtttgtgggagtggagggggtgatgccctgcttccccagggccctctgaagagcagtggggtctacagatgaccacagattcagcagctcccaacccatggtcttttgggctgccggccgcctgagaatctgagtgtcaaaatcacaggcttagcaccgcagtcttaaaattagggcaagaagcactctctagtttcttgaatgagtaatagagtcacgtggttggccacggaaggcccacagtgagaagccttccctgtttcccagctgccctcctctgagtttaaccaacactaacttccagagaagtctggacctacaaacacatacatacgtaaatgcatttacattctcgtgcataattttcacgccagtagcatttcataccagcctcttgcccttggcttcttacacctgcttgtcatgtcgtttaacactttccaggatgttgcggcatccgctcttttgcatgaccaccatcataggtacatccccagcatttttttttttttttttttttttttgagatggagtctcactcttttgccaggctggagggcagtggcacgatctcagctcactgcaagctccgcctcctgggttcaagtgattctcctgcctcagcctcccaattagctgggattacaggcgccagccaccacgcccggctaatttttttgtttttttagtagagacggggtttcaccgtgttagccaggatggtctcgatctcctgacctcgtgatctgcctgcttgccttggcctcccaaagtgctgggattacaggtgtgaactttttttttttttgtatttttttagttgagacatggtttcaccatgttggccaggctggtcttgaactcctgacctcaggtgatccatccactttggcctcccaaagtgctgagattacaggcgtgagccaccgtgccatcctgaagtgatttttaaaaagagattattataatgaacgcacgagtccatttgaagcaaattcccactgtgatgtaattttcccggtaaatgcgtctgcttgtgtcttatctaatagataaaggctgttttgagaatgtgatcatgctgttacttattatatcaaaaccacccagttaaaaacaaaatcgcggccgggcacagtggctcacgcctgtaatcccaacattttgggaggccgaggcgggcggatcgtgaggtcaggagatcaagaccatcctggccaacacggtgacaccctgtctctactaaaaatacaaaaaattagccggacttggtggctggcacctgtagtcccagctactcgggaggctgaagcaggagaatggcgtgaacccgggaggcggaggttgcagtgagctgagatcacgccactgcactccagcctgggtgacagagcaagactccgtctcmaaaaaaaaaaaaaaaaaaaagtaacatcacctgatacccagtccacataaaatttctgctcctgcctcaaaaatgtccagaacgatgtatgaattttaaaactgttagaagggttcatggcttctgctcacgcrgttctctgaactgaagtggggtccccaggctstagcccccgggggaggtgaggtgaggggcaggcctcccgggggctgacgtggccacccttgtccgcccgcagtggtgaccatcatcaaggggaaggtggaggaggtggagctcccagtggagaaggtggacatcatcatcagcgagtggatgggctactgcctcttctacgagtccatgctcaacaccgtgctctatgcccgggacaagtggctggtgaggccccagcgggacgggtgcagctcgcgtgggctggggtccaggtagaagacgaaaaccacgctcaatttttcccacagacgggacttactgtgggggcttagctgcaaggtgttagaaagccacagcccaagccaggtgtgacagaccctggagggagatggtgcgatgtgggggaggtcgtaggaacaggaaatccgtagcggcgcaatagcccaggtccttaggccccagcaggcctccccgggagaggtgaggtgacggagaggtggatgaagcatacggaggggcagccagggcaggtgtgcccttgctgcgtgtggaacagcagggaggcccgtgtggaaggagggtctagaacggcagcaggaggaggagtggaggtgaggggtgacagggcgtgtgcagattttgtggaggcttatgggaccccgtgcttttcctctcagagcagctagggagggtctgaggatccccagaacctccaagggccgggagctgactggggtgcccctgggtgccctctggcggccgtgtgggaaatagaccagggggcgaggggtgagtgccgctgcgacatgagggtggcccagaccagggcaggaggccacatcttggaggcaagactcagggtagtgttgccaggccccacccttcatgcctcgccctgcccctctgtaggcgcccgatggcctcatcttcccagaccgggccacgctgtatgtgacggccatcgaggaccggcagtacaaagactacaagatccactgtgagcgcggcccgggagctggcgggcggggcctcgggtgggctgctgcgggctcaccccctccctgcctgcctccccagggtgggagaacgtgtatggcttcgacatgtcttgcatcaaagatgtggccattaaggagcccctagtggatgtcgtggaccccaaacagctggtcaccaacgcctgcctcataaaggtgagggggtgggcatggccaggtgccccctgggttgaaaccaaagagaggccatcacctggccctggcatgggactttggggcccagaatgttggcctgaggtctcagagcctgatctgccagccagaggtggtgctagaggcccasgaaagacacttcgtcctttaaatatctttgtgagcgctgctgtgtgagaaccatgcttggcacttggcttctggcggaggaaacacccaaagctggcagctaaagcccacagcccatgcacggaaaggcaggaccccagggcgatgagcggatgcacatgcacgcgggccactgcagaagagcacggggccaggctgggctccgagatgtgcctgaggtcccagctactcgggaggatcacttgggcctgggagttcaaggctgcagtgagytgtgatcacatcactgcactccagctttggtgacaatgttttgttttgttttttccttttgtttttttttacttctgagaccctgtttaaaaaaaaaaaatacggcgatgagtatttgttgagctgggatgtgtgagccgggtgaagctgggtggctgaccgggggatcctgtcggggaggagtaagttgttgagtgggggaggagaggagactacaggggcagggaccccactcgggccaccctcctgagagccaggggaactggcgcagggtttaggttggcatttgtgttgccgtttgaagccatcatgttgttggacttgtcaaggggttggggagacagtggagtggggcgcctgcattctaggaggtctggacagagttagggtggcactgccaggtttgggtgttggagaggagggagcaaggaatctgggctcraacccacatggtttattgggagccggataggcaggatgcagagtgaaggaggagccgaggctgggtgccagtgagggagggctagcaggaaggggacagcgaggtcacaggccctctgggagcttaagggagggaggaggggatgaagcgaggtggggacgcatcccggagctcgccctctcatgtcctgcaggaggtggacatctataccgtcaaggtggaagacctgaccttcacctccccgttctgcctgcaagtgaagcggaatgactacgtgcacgccctggtggcctacttcaacatcgagttcacacgctgccacaagaggaccggcttctccaccagtgaggcggggcccacagggctgggggccgttccygagccagggcggaggcgcacccacgtagtggagggggtgacagaaacgggcagaaggaaccatggggacacgcgtgttccagtgtgagctctgccatgtagcagtcacgtggccttgggcaagtgacctgagtgtgcagtgcctcagtttcctcatccacaaaaggctgacacggtccctgtctccaaagctcaatgacagggaggtgactcgcggatagcagtcccatcagctgtcatgggggtgggcattccgacagagggaacgcaagggtggggttggggggggcagcaggccgaggccggctgacccgcccgcgcccccaggccccgagtccccgtacacgcactggaagcagacggtgttctacatggaggactacctgaccgtgaagacgggcgaggagatcttcggcaccatcggcatgcggcccaacgccaagaacaacgtgaggctccgggcagctgggtgggagggtggcagctagggcggggagtgtagattggggggggagtggtgggggaggaatggtggcagcgggggtaggggatgggggcagccggggtgggggatgggggcagctggcgggggcgagcacctctgcctattcccgggtccccaagcccctcagccccatgcctgtctacacagcaggattgcttgagcattcaccggaagttatgggcctggggacccaggctgaaaccctgccctcctggtgcttccactctagacaagggggtcagtgacatggtgatgccagttggaggtgacctctgtcaggctgggagcagggcagacaggtgttggtgtaggtgggctccagggcaagaggcagcccccagtagagtgcacggggttttctagcccagctgggaggcatgagaggagaaaggcagctttttgttttctgctcccctttctttttcctcctgagcacttggcaggagctgccatcacctgagatcagggggcttccgggggagctgggggrgcttctcggagacagggtctgggcagagatccagtgtggtgggtctgagcaggcaggaggatggaaggcttggagcctggagtcgccgggagtggtctgggttggaaaagtgggtcccggccgatgggtgcgagggtgggtggcactcagggtagtcatggaatgtggaccctgggacacccacgagcctgtgacagcagcagttgtcaactgggcagttttactgccccctccgctccccgcccccccccaggacgtttgccaccgtctgtggaaacatttgtggttgtcactccggagaaggggtggtcctggcatctggtaggtaggggccagggggctggtaaatgtcctgcagccacaggaccaccccctacaaagactcatgcagcccccgggaccacggcactagctgggaaacggatactggagagggaggaggagtcctcgggcgttggtgactttgtctcatcttcatgtgctggagggtatggggggaggagaggaagtggagacagcaggctggaccattgtgtttcactggaacgtttgcctgaggaggaagtgggcttgggagaggttttcttttttatgaaagaagcaatcactgcattgctgatgggaatcatcctgatggagaaatccaagggcaagggacagcagctgggctctactcctgagtgagtctagtgggcttgggggtgtccatgtggtgctgtcccttggcagggtcagggcagctgctagggtgggaccagcagttggggtctgcagcgtggagatgggcaggaagctggagcccggctcatcgtcgcatagcctgcctgcacccgccccccgccaccacctcctggtgggttccgccctcatgccccacctctccctgcagcgggacctggacttcaccatcgacctggacttcaagggccagctgtgcgagctgtcctgctccaccgactaccggatgcgctgaggcccggctctcccgccctgcacgagcccaggggctgagcgttcctaggcggtttcggggctcccccttcctctccctccctcccgcagaagggggttttaggggcctgggctggggggatggggagggcacatcgtgactgtgtttttcataacttatgtttttatatggttgcatttacgccaataaatcctcagctggggtctggctttgtttcctgggggcaaaggaggtttggggttcctttcgcaggtactgcagtgccagcctcagcagtggggggaccggccttggcacctgctggtggctgccattctgtggatctgcgtctcccgtcccccgtctctaggcctcttgctccccttccttggttccttctcggggtccctgtcctccacagctgtctctcagggtctttgtccaactcttttcatccctctcctgggtctgcgcccctcccctctgcggtacccgtgtcctgcctagtaggggatgggggtggctttccagcacagccagccctcaagtttcccagaacagtctccccacctccccccaacactcgacattgttcctctctggctgttttttcctgttcgggtcccttcaaggcccaactgtgcccagccctctgcagctggggacactgagtgggttgggggtgtatgtttgcaaggatagaatttctcatgggggagtggccctgcttcctcccctagaatggcttggggcttagggctggggacttgccctccatggaggtcagtgggagttgcagctgtaaggtggcagggcctacccatcttacagaggtgaagacgaggtccctctgcctctgctgcagacatggcgtctgcacccacccttccaccctcagggcctggccacggggtcctgggtcccccacaatactgtgcactcgacctggttgacccaggacaccctcctcgttgaacagccctggctacacctgcttcagtgcaactggagccctcaccggcgagtgcctgacacctcggccttttctcttccggaggggcgctcctcagtgtgtttggggtctccctcgctccacgccctccagggggccgcatgtgcacttgccctgcattgcctggcccccgaggttccagggtctcaactgtctactaaccggcttcccgacagggtgagggtgaggtcgcatctacaaccagagccagcgcttccccgccgccaccccttttcttggaatcccgctgcttagctacctgcgggtgtcattggccccgccccatttccccacgctttgaagggggcgagtctccacagacctcctagggggatagacagcagctggtgtgaccccacacacccagtgaggtctctggagccgcggtgcgggaagcggggacccgggtttgaatcctgcccctctggtgtggtgcggcctcttcccacagacttttggcctcagtgttccccgcctgggaagtggggactggccctggtacctggctccagagctgcacccagaggcgatcagcccggtgcgggaacggggcggggtggccgcaactacgggccacggatcctgacccgccctgcccacgatgactatccacatcctcatcctgctgttgctcctcgccttctccgcccaaggggacctggacactgcagccaggtgagaaacccgggtggcagcagggacagggcgggagggagaccgtaaagggcgagcgccctctcccggccgcggaacgggcaggtgatctgtaagcctccccgctggtcttggagtgcttgggtgcccacctccatcacgctccatctctcaattcggtttgaacccggttttctcccacgctccctctccaggcgaggccagcaccaggtcccccagcaccgcgggcacgtctgctacctgggcgtatgccggacccaccgcctggcggagatcatatactggattcgctgtctccaccaaggagccctcggggaaggccagccacgagccccaggacccctacagctatgggcgccgccggtggcgcgaggcggaagcccggctcggttcccaggattccggcctgcagcgagggggctagcgcagtgcccagctcgctgggtgacctcgggcacggctcgtcccctcctcggcttcagtttgcctatctgtatgttggagcttctactccacatttcttctcccctaactccagcccctgaaaccgtcttccccagtccctccccgggctgcgactaggttggacctagaagcacacgggaccaggctgggcgaagaacactgacgcccagagccgaataaacaagagttccgtgtttcagtctctgcttctctgtacctatttcgacctctcagtcgaggctgggtctctaatatacctttctctattagccatgctgcttctccctcacggaagtcccactgtctaccttgaatccaacccgctgtggcgcctttcttgccaactcaatccatgcaccttccgtgggtggttttggcgggccgtcctgacccccaaacatccctcctccctccctggcgtgaaagggctgagatttgctccggcaccctacgcgcctgacgttataatgcacctggggtgggctgcgacctcccagctgagccttgttcctcgaagagacaggagactaagagacaatgagctgagtgaggagcccaggaacccgggttccgaacagctgcgtagaatgcgagcggccaaatggtggagaatctggccgggtaaaaggagacggaggactggggatcgaacggatgtaggggattggacgccgtggctcgaagggggcggggatagaacgcggggattggaaggaggcggggataaaacccgggacctgaatacccggctagggacacgagagagaggaatcggggtttctgggtgacggtgatctcggggtgggcaggactccaaaggcccgtcgacccggtggtggactccttgcactgggattggacatatgcaagcgggagatttggggccggcgctcaaaatcggggggcgggggtggactcgggtttggaccccaggatccgatcagcggacccttgattcaacgtggtaagtactggaccccaggggctcgggctccggcggggcctggagtcctgtgtctagggttgggcgtgcaagcctctccatcacttgtcctcgacgctcgcctccgctcacagcctcagcatcccaggctgcgaggcatgcgcagtgggtgcttccttccccattccctccagcacgggcsgggggaggggacgctgagcggatgaatttatagacaccatccccctcgccttggcatgaaaagcggcaatggggtggacagcgtcaatgtctaacaggtgtttgtttcatatgggtctaaaactaatgcttttctcaagaccccgcaactcagcctggaccagtttccctcctccacccacccccgaatcttgagaatcctgtactggggggagggcactgcccccgcaccatgttcttgggagagcaggtaaaggggttaacgcgagctatccctctggcctctctatgcgttcccagaggtcccgaattgacgtccttccctcaaaacctccgggtctacaaaccaggaccctcaagacccttcaggtgcttagagaaggatgagctaggttatgtagtcctgggtcggcgcaaaaaggcagctgaaagcgtgagatcccgggtctgagggaggaggggctggggcctgggcttctgggtctgagggaggaggggctgggggcctggactcctggatctgagagaggaggggctggggcctgggcttctgggtctgagggaggaggggctgggggcctggactcctggatctgagagaggagggactggggcctggactcctgggtatgaaggaggaggaggggctgggggcctggactcctgagtctgagggcggaggggctggggtcctgaagtatgactctgcccgactcagggctccagcgtgacatggctgaagcgcaccaggccgtgggcttccgaccctcgctgacctcggacggggctgaagtggaactcagtgcccctgtgctgcaggagatctacctctctggcctgcgctcctggaaaaggcatctctcacgtttctgggtgaggagcggtgctggtcggtttccttccggggatccaggtttctgcttccgggatgtctgaggctcacttccggcatttcagctggttcatttctgggagactatcacccctttttccgagaattttgatgtctgctcccaggacccctttagcaatttctccgtggctcacttctgggatccacagccccacctgctgagaacctctgctcacttctttcacccaagaggggaactgggccccccaaaaactacccacttccagtttctagaactccatatccttcccttatggtgaaattatcatttcttcctttcatctccagcttcttttgtagttgttgtttctgagacacagtctcactctgtcgcccaggctggagtgcagtggcgggatctcagctcactgcaacctccgcctcctgggttcaagcaattccctgcctcagcctcccaggtagccgggattattggcgcacgccaccatgcctggcttatttatttatttatttatgagacagagtctcactctgttgcccagactggaatgcagtggggtgatcttggctcactgcaaccacctcccaggttcaagcgattctcctgcctcagcctcccgagtagctgggattacaggcatggattatacgcccagctaatttttgtatttttagtagagacggggtttcaacatgttggccaggctaatctcgatctcctgacctcaagtgatctgcctcccaaagcgcttgggttacaggaatgagccaccgcgcccggcccaaactcctgctctgtccctgttctggaatgcgcatgcccaatgtgtaaccagcacccatgtctgtcccagggtttctggttctagaactcttgcactgtctccatacagggactccctgcttgtcacatcctctgtgtgtgaactggggtctggaacacctgtggggtcatgattgagtttgaatcctgactccaccgcttagtagctgtgtcatcttgggcaagcacctctcttggagtcgcagtttcccctcgtggaaaacatgggtgttgacagcacctccctcacaggatagccttgaagactaaattaattcttctatgtcctggcccatggcgaggtctgagtgttagcttctgatattgttcttcattcattcaccatatatttatggggcatccggtaagggcctggccctctttagcatggagaacacagcagatatcaacagacagaatcacgcctgggcactgcgggctcacggctttaatcccagcactttgggaggctgaggcaggaggatcacttgagcccaggacttggacaccagcctgggcaacatagggagaccccatctctattaaaaaaataaagacaggtcgggcacggtggctcatgcctgtaatcccaacactttgggaggctgagacggacggatcatgaggtcaggagatcgagacccttctggctaacacggtgaaaccccgtttctactaaaaatacacacacacacaaattagcctggtgtggtagtgggtgcctgtagttccaattactcaggaggctgaggcaggagaatggcgtgaatccgggaggcggagcttgcagtgagccaagatggcgccactgcactccagcctgggcgacagagcgagactccgtctcaaaaaaaaataaaataaaataaataaataaataaataaataaataaataaataaataataaagacagaatcctgcttttatggagttctcattcgagttgggggagaaggcaataaaacagatgagcaaaacagaaggcaataaaacagatgagcaaaatatagggtatggtgacattctatagtgtcatctgatattgatggtgacacatgctatggtgaatgataaatcgggtagagaagagtgatgtgggggtgttgcagttaaataagggggtggcaggccaggtgcggtggctcacgcctgtaatcccagcactttgggaagccaaggcagacagatcacgaagtcaggagttcaagaccagcctggccaatatagtgaaaccccatctctactaaaaatacaaaaattagccgggtgtggtggcaggcacctgtaatcacagctacctgggaggctgaggcagaagaatcacttgaatccaggaggcagagattgcagtgagccaagattgcgccactgcactccagcctgggtgacagagcaagactccgtttcaaaaaaaaaaaaaaaaaagggggtgggagccggcggccaggaggatctcctgaagc

SEQ ID NO: 94930 - DNA, 19226 bp, Homo sapiens
cacctgtctcggcctcccagagtgctgggattacaggcatgagccaccacacctggccttttttttttgagatgcagtcccgctctgtcgcctaggctggagtggcatgatctcaactcatagcgacctctgcctcccaggttcaagtgattctcctgcctcagcctcctgagtagctgggattacagaggtgcccgccaccacgcctggctaatttttgtatttttagtagagatggggtttcaccatgttgcccaggctggtcttgagctcctgacctcaggtgatccgctcacctcggcctcccaaagtactgtgattgcaggtgtcagccaccatgcccggcctaaactgtttttttgttttgttttgttttgtttttcagtgatgagctattccaggaaacgtgaacattgatttaatgatattaagaaatggctgccatccggagcttgcagtgagccgagatcgtgccactgcactccagcctgggcaactgagcgagactccatctcaaaaaaaaaaaaaaaaaagaaatggctgccatcttaaaatatgataatgatattgtagtttttaaaaagcaaaacatggtcaggtgcagtggctcagccttgtaatcccagcactttgggaggccaagatgggagggatcacccgaagtcaggagttcgagaccagcccagccaacatggtgaaaccctgtctctactaaaaatacgaaaattagctgggcatggtggcctgtacctgtaatcgcagctcctcgggaggctgaggcaggagaaccacttgaacccaggaggtggaggttgcagtgagctgagattgtgccactgcactccggcctgggtgacagaacgagactcagtcccaaaaaatcagaagacaatatggtgcctgggacttgctctaaaataaatccagtgagrgggcggggagggtgagtgagacaagggctgtgtgaagccatgaattcacctgggtttatcccctgctcactctggttttagatgtttgaaagtttccataataaaacacttctgagaaagggggacctgcctttcacagcctcccagctgctctgaccccaatatcaggaacttggcatctctgatctaacaagggcaccactaacaaggacaaagccaccatcattcaccttgattccgcacatgcccaacgatgacttctgtcctgggctaaccatmaaggccatgggtgctgagagagccccccagaggcagccatgcagtgagtgcccccacccggggccctgggatgttctggaaacaggaaggagggttccatgggaagggggaccctgtcctggggtcaggccaaagattgggggactcactaattctgtcctccgatccctgagtcccttccccaatctgggcctggaccccctgactcccacccaggtcccaggtcatcccctgggcaggccctgcccacccaagccttggtgaaagttttgtgtttgttttgttttgttttgtttttgagacagagtctcgctctgtagcccaggctggagtggaatggcgcggtctcggctcaccgcaacctctgcctcccaggctcgagcgattctcccgcctcaggatcctgagtagctgggattacagatgcccgccaccacgcccggctaatttttttgtatttttagtagagacagggtttcaccatgttggccaggctggtctcgaactcctgatctcgtgatctgcccgcccacctcggcctcccaaagtgctgtgatgacaggagtgagccaccgcgtctggccaatgaaacttttaatactgaccacttagggtctttggacagactcagagaagagaatgcgtatatacgtaaggcaggggcccggtccccagcacatctgtgcagccctcatcagcatcagctgccctgatgggccacgaggcccccagtggggccagggccaggtgtctggctgctgtatagacatgacctaaacctcatcgaaaccatcattgtggttctagaagtcaaccaaataaggtaggatttgccccaccaaagaccattatctgggaggattaaccttattttccagaaactccatcaaaaaaccagaatacccccaaaccagctgaagtcaacagatacttgactgggcctttcctcccctccgctccctccacctgcccctcccctccctcctgtctcccactcacctatccaaactgcttttccctaattccaccctcatccctaaacctaatttaacctgaacaccaatctccttagtattatcagaaatgattctggaggctgggcatggtggctcacacttgtaatcccagcactttgggaggcccaggtgggtggatcacctgaggtcaggacttcaagaccagcctgtccaacatggagaaaccccgtctctactaaaaatataaaaattagctgagcgtggtggtgcgcgcacctgtaatcccagctactggggaggctgaggcaggagaatcacttgaacccaggaggcagaggccacagtgaactgagatcacaccactgtactccagcctgggcgacagagcattctggaaaggcatcaatcctgaaccagctgacttgcgccctctgctcttcactgggggcacctggcctgtctgatgtattgcttcaaactaacattaattgggatttttttttctttaattacaaaagtaatacatgctgaatgaagatgatgtgaaatgcacaaaaaagctcaaaggggccgggcatagtggctcatgcttgtaatcccagcactctgggaggccaaggcaggtagatcacctgagcccaggagtttgagaccaggctgggcaacatagcaaggccccgtcgctatgaaaaagtacaaaaatttagctgtgcatggtggtgtgcacctgtggtcccagctactcgagagactgaggctggaggatcgcttaagcccaggagttcaagaccagcctgggcagcataacaaaatcccatctctacaaacagcacagaaattagccaggtgtggccgggcgaggtggctcacgcctgtaatcccaggactttgggaggccgaggcgggcagatcacaaagtcaggagattgagaccatcctggctaacacggtgaaatctcatctctactaaaaatacaaaaattagccggacgtggtggcaggtgcctgtagtcccagctactctggaggctgaggcaggagaatggcgtgaacccaggaggtggagcttgcagtgagccaagatagcgccactacactccagcctgggtgacagagtgagactccgtctcaattaaaaaaaaaaaaaaaaacaaaaaacaggtgtggtagtgcactcctgtagtcccagctactagggaggctgaggtgggaggattgcttgagcccgggaggttgaggctgcagtgagccgagattgtgccactgtgctctagcctgagtgacacagcaagaccccatctctcaaaacaacaacaacaaccacccagaagtcccccaaggtgagctgcacatatgcctggggccagaggagttttgtgcaacaaccctctgtgataaggacaaggggattggtgcagggccccacccactctggggacccaaaaactcctgggacatgccctgggagccagttggctgtgggcctccacacctttccatggttgtttccactgttatgcggctgtaggactgaacaagctattgggcaggggccggggacctggggcccacccgacctggtgaggaatgccagcactgccattccccactgtgggacccaggtcgaggcacaggcgaataaggccccaatcccgccgcgttcatacttgacatgtcgctgtgaatgaaactctgagacctaggccaagccttttcccctctctgtgccccagggtcctcctgtcccaccctctcgccatctccaagcctcagtttcctcaactatcaaatgcaggcattgttgttggttttttgtttgtttgtttgtttgtttttgagacggagtctcactctgtcccccaggctggagtgcagcggtgcaatctcggctcactgcaacctctgcctcccgggttcaagcgattctcctgcctcagtgtcccgagtagttgggattacaggtgtgcaccaccacgcctggctaattttttatatttttggtagagacagggtttcatcattttggccaggttggtcttgaactcctgacctcaagtgatccgcccacctcagcctcccaaagtgctgggattacaggcgtaagccactgtgcctggcctcaaatgcaggcattgtgaggcttacgatgggtgcaaagccctgagcaccaggcggcctccaaggcaggtgatcgccatgggaacatttttgtcactatttttttcttttttagagaaagggtttcgccatcttggccaggctggtctcgagcccctgggctcaagcaatcctcccacctcggcctcccaaagtgctaggattacagcagtgagcctccgcacccggccctcattactattttttatttttattttttattttttgagatggagtctggctctgtcacccaggctagagtgcagtggcacgatctcagctcactgcaacctccacctcttgggttcaagcaattctcctgtcccagcctcctgagtagttgggactacaggcgtatgccaccatgcccggctaatttttatatttttagtagagacgaggttttgccatgttggccaggctggtcttgaactcctgacatcaggtgatccgcctgcctcgacctcccaaagtgctgggattayaggcgtgagccacccctggccctcgtcactatttttgctgacccaagctctttcggtccctgaactctccagctctttgatcatttccctttgccacggcctcccgcccctgcgtcacatgccttgttactcacattcaccccccagcccctcccggccataaccgcatccctctttgatttactgcgggagtttcccatcttccttcttgttaatgccctccaacccccacccaacccttgctgcagagaatctgcctccctctggttttcctcctcacggagcccctggctccctctcccccaccccaaggaaagtccctgctattgtttctccacccccacccactccaaggtgccgccccactccctgccctgagcactgaggtggttcttaaagcagggatgggtgaagcctgggcgcttccctctgccgggtggtcactcatagaacccctgagtgcccctgcggccacagcagctggcatttccaaaggagcagcttccagtactaccccaggttccggccacagaacttaacctggattcactcacttgatcctaaaacactgtgacgtccycatttgacagctgtagacgagagccacagaggggagggcgggctcagagcccacgtcctgaccccgggaccacggctgccagccccactgctacacccatgtaacggagggggagactgaggctctgggtggcaagtggagagggaagtggaaccatggggggccctgcaggacatggcgacacctgacggagagggacttggaggggaaagttggcctggcccagggacctgtagcccctctgtccccgtgggaatcaaggaggcagagagagtgcaggggaggatagaaacaagtggcctggtgatcagggacgggggcaaaccgaaggggattccccgttgttggcacggttacctgagcatctatttctggcctccaaaccaccccagaactatctggggcaaaaggaagtgaatagactgattaacttcctccaaccccctttctccaacctcaactagactctgagcattggaccagagcagctccaggaaaccagtttcatttccctcggccagtttcccaaaaggaggggtgggcggggctctgccagtttaaggggagagaaagggccacagcagagacagtggagggcagtggagaggaccgcgctgtcctgctgtcaccaagagctggaggtagtgacacggccagtggtggggggacagagagacaggacccacagaaatagggactgagaagcagtcaggagctggggagatgaggaagagggaaaagaggccgggcgcgrgggctcatgcctggaatcccagcactttgggaggccgaggtgggtggatcacctaaggtcaggagttcgagaccagcctggccaacatggcgaaaccccgtctctactaaaaatacaaaaattagccaggtttggttatgggtgtctgtaatcccagttacttgggaggctgaagtgggaggattcttgaacctgggaggcggaggttgcagtgagccaagatcttaccactgcactccagcctggatggcagagaaagactgttaaaaaaaaaagaaagaaaggaaagaaagagggaaaagaagagaaagagacaggaacccgagagagctgtggcagaggtggagaccggtgaggagggaggcagggamggtccaggggactctgaaggaatggggttaggggacacaggtccagagagcaggacagtgactgggggagggccggctctagcagctgggcagcccatgggagacagagtcaggctacagtggtcacaggcctcagtcacaacagccctcccttctcctccaccccagacaccatctcccaccgagagtcatggccccattgggtgagtaagcaggggaggggctctggaacaagtgagtagaacccctctccscygacctgccacaaccccgttgaccctgtcctcctcctcccagccctgcacctcctcgtcctcgtccccatcctcctcagcctggtggcctcccaggactggaaggctgaacgcagccaagaccccttcgagaaatgcatgcaggatcctgactatgagcagctgctcaaggtggtgacctgggggctcaatcggaccctgaagccccagagggtgattgtggttggcgctggtgtggccgggctggtggccgccaaggtgctcagcgatgctggacacaaggtgggaagcactgcttgcagtctacctggagtccctcctgctgcaggctggagtccctgggcacagggacacggccgcgttcctccttgagggggtggaggtggggatgtggggggagaggctatctttcccygtagtctgggggtgaggcccaagccccctgctgtcacatgtctccactgagaggccccagactttcctgtcccacgtttttcatcccagagggaagtctcactggctcaaagctcctctgtcctggggtggggcgcctgttggtggagagggaaactctaccaaggggatgtgtgccctgaggtctaaccactgacctactcactgcaatccgagaatgagaatgggccagcccaggggcttctacgcatatgggtcatctccgaactccccgagctgggaagtccctttgcagtctagctggcagccttcctcctgcagtctggaactgctcactcagttctgttcccccacctcccatacagaaggggaccctctcctagtctgggtctgggccactgtggggatggaagaaggcagggggctggcacggggtggtagagggcaggggatggtcagtgggtggagctgaagggccctcctcrccccacggactccctcaggtcaccatcctggaggcagataacaggatcgggggccgcatcttcacctaccgggaccagaacacgggctggattggggagctgggagccatgcgcatgcccagctctcacaggtgacctagcaacccacccacctgtgtgcctagactcaactagccccccagctccatgcccacaccagagtgggcccgaacttccactctgactcccaaacccagcctccaaccccatccttcgcctaatcctcacctcagtcttgcctccagcgccagccctgggcctctggcaacactcgggccacctggtccaaccagacctccagctggccctgcctggtgcaaaagccagctcctgtgctggcccctccaggcctgcagctccaccatccccacaccctcaggcaccccagccccaggccccttcttcatctcaaacccccgtccaacccaaactctgtcccccttcccaattctaatctgggctctatcccactcttaacccaatcctaatcctggtactgccctgaggcctccagccttgtccccatttcattcccatcccccagcattgattaccccaaatctagccccacccccagcctcatgctggtccccagctactctcccctcccacccctcttctccaagtcccactagggaccaggccacccccactggagcccggccctcactcacccactcccctgatcaggatcctccacaagctctgccagggcctggggctcaacctgaccaagttcacccagtacgacaagaacacgtggacggaggtgcacgaagtgaagctgcgcaactatgtggtggagaaggtgcccgagaagctgggctacgccttgcgtccccaggaaaagggccactcgcccgaagacatctaccagatggctctcaaccaggtgggtaccgcctgcaccctcctcccgccctgacttctctgtcctcctcctaagctcgccccggcccggcttttcttctctctggcatcccttcagtcccctccatggggtggggcgcctgttggtggagatggaaattctaccaaggggatrtgtgccatgaggtctaaccactgacctactcactgaaatccgagaatgagaatgggccagcccaggggcttctacacatatgggtcatctctcaactcccttcttttttttttttttttttttttttttgagatggagtcttactctgtcacccaggctggagtgcaatggcgccatttcagctcactgcaacctccgcctcccaggttcaagcaattctctgcctcagcctcccgagtagctgggattacaggcgcccgccaccacgcccagctaatttttgtatttttaatagagacggggtttcaccatcttggccaggctgatcttgaactcctgacctcgtgatccacctgcctcagcctcccaaagtgctgggattacaggcgtgagccactgcccccggccccaactcccttctttagcttccccgtaaacactgctgaccccaaagctgcatcagcttttggcctcttcccctttcacccacacactgtcctggataacctccccagtctccacctctggcttaaacatagatccatgggctgatggagacatctgcctcccgagaccctgatctgtgtccctccccaggacactgggctcagaagcttcccctaaacctgttcctcctcccggtgcccccatctcacgatggccccaccatcccgcagtcacgggcagacccctaggagccatcctcctcctgacctcctcctcgcccacctcccccaccatcagtgcccacccctgccgcctgacgcttgtgccctgctcccctctgcctgccccagctcaggcctcctcctctgccctggaccctcccccagcctcctctcaagctgcccaggctctagtctccccagcctggtaccagaaacgtcttcccacacacccagagtgatgctgctcacagcccccagtggctccccgctgcctccaggacaaagtctgatcttttcaggctcagctttgagccctgactggccttcccttctgcacccctccagcctcatgctcttttctcctctaagaaatttttgtcctcatggtggtccacatgcccccagctctgtgttcctcacacccactatacctgtgtatcrccctccctttccagaatgcctttcccttccccacacaggaactcctgctcagccctcaagaactagctccaatgtcccctcctccaggaagccttccctgatacctttagggaggaactggccacacccaacatcccctccccacccaggtcagagcccacttgcccatctccccttctagaccaggatgggggccatgtccaggtcatttctatgccttgacactgactggtttgggagtctgagagatgcgagatgcatgagtgagtgaaggggcactgccttccctctgaggtcctggccagaagggggaagccaggtggaccaagaagaaggctgaaattagatgggggcagcaaggcttctgggagggggtgagattcgaacaaagtgctgaagaacacgcactcatgtgccacgcaaagacaggcagggaaacaataggtgccagatgtgtaggtgggagagccctgagggcaggtggtctgggcactgtacactgttcacagaaccagagctgccataaaagacatggactgaggtaagtggggatcttggttctgctgagattcagggcaaagagagtgaccatgaggccttccccagagagtcagaaggcgggtacctggcacgcagtggctcacgcctgtaatcccagcactttgggaggccgaggcaggcagatcacttgaggtcaggagttcgagaccagcctgaccaacatgatgaaaccctgtctctactaaaaatgcaaaaatgagccargtgtggtggcaggcgcctgtaatcccagctacttgggagggtgaggtgggagaatcacttgaacctgggaggcagaggtttcagtgagctgagatggcgccactgcactccagcctgggcaacagagcgacactccatctcaaaaaaaaaaaaaaaaaaaaaagacattgaggggctagcaggggccttgaacatgaggctgaggggcaagaattctgtggctccaggcactggggagctacaggagggctgtgggcaggggacggacggtagataaacttctcagccatcatgccctgtcagcactgaccagtggcacaggggaccagcttctgtccgtggccacagtgattcaggcaacaaataatcactgagcccccgggaggacacagcacgcctgggaccctctcccagtctcctctccagctgcccacatccctgcctccatggagctcacagtctggctggctggctgaaaaataggcaaaataacacgcaaccgggatgagctgtgaccagccgggccagccgaatgaggggggatgggcggcgttaacagttcggtaatatcggaggagcagtggcatctgagttgccgtggagggcaaggcrgagggcatggtgtgggcaaaagcccaggggcttgagagtggtgaatggccagccgtgggcagaaccacgaggagaagccgagtgtgggctccaggcccggcctccaccctggctgcccgggcagctcagcaccatgtctgcttcttccacaacaggccctcaaagacctcaaggcactgggctgcagaaaggygatgaagaagtttgaaaggcacacgctcttggtaagtggggatcttggttctgctgagatgcagrgcaaagagagtgaccatgaggccttccccagagagtcagaaggcgggtacctggcaccctagtcctgccaccgccttcctgcctgacccgggggctggacacgccccctgtctggacctccgtttccctcatctgtcagagagtggggacaggatcctacggtccaaggacatgtcatgggaccaggaggcccagctgcggaggggctctctcaggggtgcagcctgcctgggccctaacctcggcctgtgcccaacctgcaggaatatcttctcggggaggggaacctgagccggccggccgtgcagcttctgggagacgtgatgtccgaggatggcttcttctatctcagcttcgccgaggccctccgggcccacagctgcctcagcgacagactccagtaaggggcggggctggcgggcagggggggggggcggggggcaatcagggaaagtagcagggagtgggaggagcctctgggtctgggggcggggctgttgtgaagggcgtggcctaattgatggtcgcggggctaagggttcccagataaaggacacggcctaggggagaagtggtggggtccctggtgacacaatccactactcctgcggcctttgggatgtcagggacgggcggggtcgggagaggtggatgacgggggagcgggccggtgccataagggccagctgccggggtgggtggggcaaggcagaggggcagggccgcagagcccaggtcacgcccccaccccgccccgccccgcctgcaggtacagccgcatcgtgggtggctgggacctgctgccgcgcgcgctgctgagctcgctgtccgggcttgtgctgttgaacgcgcccgtggtggcgatgacccagggaccgcacgaygtgcacgtgcagatcgagacctctcccccggcgcggaatctgaaggtgctgaaggccgacgtggtgctgctgacggcgagcggaccggcggtgaagcgcatcaccttctcgccgccgctgccccgccacatgcaggaggcgctgcggaggctgcactacgtgccggccaccaaggtgttcctaagcttccgcaggcccttctggcgcgaggagcacattgaaggcggccactcaaacaccgatcgcccgtcgcgcatgattttctacccgccgccgcgcgagggcgcgctgctgctggcctcgtacacgtggtcggacgcggcggcagcgttcgccggcttgagccgggaagaggcgttgcgcttggcgctcgacgacgtggcggcattgcacgggcctgtcgtgcgccagctctgggacggcaccggcgtcgtcaagcgttgggcggaggaccagcacagccagggtggctttgtggtacagccgccggcgctctggcaaaccgaaaaggatgactggacggtcccttatggccgcatctactttgccggcgagcacaccgcctacccgcacggctgggtggagacggcggtcaagtcggcgctgcgcgcckccatcaagatcaacagccggaaggggcctgcatcggacacggccagccccgaggggcacgcatctgacatggaggggcaggggcatgtgcatggggtggccagcagcccctcgcatgacctggcaaaggaagaaggcagccaccctccagtccaaggccagttatctctccaaaacacgacccacacgaggacctcgcattaaagtattttcggaaaaagccgtgtggtccagcctcccccgtggctcagttacttccccagtttgcctgcatcggaaccactagccctgcagttagcaggcgccacgcccatcctggagcccccccaaaaatctgcccctcacttcttcctggacagtggggctccagaggagggtggggggtggtgcgcacagagggaaccggaaggacgccctgcaccaccgggaaatggcaatcacagcgaccacctctgtcacgaggctgaagtccagatgggccctaatgcaagtaacagaaagcccagctgacagtggctgaacaggaggtgatttttctcacaagcagcagctgggagggcaggctccccagagtgcatctctgcaggcccttccaccttggttatgtccgggaagtgttcccacacagctaccaggtcgccgccacagcccagagcaccctatcctcttccaaaaaccccaaatcaggccgggcgcggtggctcacgcctgtaataccagcactttgggaggccaaggcaggcagatcacctgaggtcgggagttcaagaccagcctgggcaacatggtggaaccccatctctaccaaaattacaaaaatcagccgggtgtggtggcacacgcctgtagtcccagctactcaggaggctgaggcagggtaattgcttgaacccgggaggcggaggctgcagttagccgagatctgccactgcactccagcctgggcgacagagcaagactccatctcataaaacaaacaaacaaaaaaacaaatcaggcaactcaggaagccctgcctccacaaaccccaatcattcaccctaggctctgcccagccaccatcccctcctcaaccaggtcagagcccacttggcagccttccccccaccaacaagaagccaactgcacatgagaagtgtcagtttaatgaagccagcttatcagcagggcggcggagcacacctgccccctcgcaggtgtgcctggctcgggctaaagtgcctgtgcagaacgaggctgcctggcggggttaggagtcggcgccctcgtcctcctcctcgggcaggatctccaggctgctgtcgggctgcggggctgtgtccgtggagggcggcggggtgggcggggcccgggtgggcgacagaggcagcggggaggcggtgggcgaggggctgtggggctctgcgggcggggccagccccaggatctcctgcacgttgtggggcagctcctggaggcacgggatgagagaagcgaaaagcggaaggtgaaggtgagaagggggcgggggtcggtcggggttcgggcggggcgctgcggggcggacggggactcacggggcaggcggttagctggcggtgcagggcctcggcgcgggtcagcacgtcctccacgctcagcttcatagtcagctcgttgatgtgctgcgggagggggtgggtcaggcgccagtcggcactcaaccacctccgcccgagcgcccactctgtgcttcgtgctgggaaacaatgaagacacaccgggctggccctctgggggctcagaagtgcgctgggcgagacatgcttctcaggcctccgggagcattctgagcacgtactcggggagggmargtccccacccacctgcccggaggaccttgctgggagcaggcatggcatggggcagaagggaaacctacgcggccccacccccactgcgctcccaactaaccaggctttcaataatcccacactaaacacctgctccccggaggtactgcggccctgggcagcgcccagctcaggggggacagggcgggggcggggccggagcctcaccttgaggatctcattggagccgaagccggacagcatgagggtgtccctctccatgtccaggatggcgcaggccaccagcaggtgcagattggggccagggagccctgtccacagcacctgagggtgcgggacagagggagggagggaggtcatagcccagcctgggcctgaggtcccaccagggtctgtccctctccgcccaacctcccagggcaggtgagcccaccccttcaggcctctcgcccaaactggctggcccacctcccacagccgaaggacatccgggaaggggaattccctcttgaaccagatgagcagccaccggaaacagaagcagagagagccggagtcctgggaatctgggggatgacatggagcccactcagccttgcccagcgctgggactgagagtttgagaagtcatcctgactggaagaccttccccaagtctaggcaagtgacttatgcctggctggggaacctcggaggtgaggcaggagcagccctgaacgcgggccctgcccctccttcctcccactctccagaggaagtgtgctattatacttccacatctgccatggacatggaagggaggcaggacgcccagcacgcccgacgaaacagacctctgcccgctgctggtgagcgctaagggaactgacactcctagatacgctgttagcaaaaatttaagctgaaggccgggtgcgatggcgcacgcctgtaaccccagcactttgggagggtgaggcgggtggatcacctgaggtcaggagttcgagaccagccaggccaacatggtaaaaccccatctctactaaaaatacagcctggccaacgtggtgaaaccccatctctactaaaaatacaaaaattagctgggatggtgccacacccctgtaattccagctccttgggaggctgaggcaggagaatcgcttgaacccgggaggtggaggttgtagtgagccgagatcacaccactgcactccagcctgggtaacagagcgagactccatctcaaaaagaaaaaaaaaattaagctggtgttgaacctttttttccccccaagttaactcaaatgaaagtgagagtctgagcattctaacctttgaggaaagtaacaacggaggacaaactctccaaagctgtgtgaaaacaagcactgtcctgaacaaaattccacttcttggaagtgaacctaaagaagaaattacccagactatgcaccgtgatgaaaaactgcaaaggacccgaatctcyagcaggtcaagttacatcaaatctaccacatcttgcaggtggacacaatgccgcgcagtcaagaaaagtgatgtttcagaagactttgaatgacccagaggcagcctctgtccttgtgccctaggaggtgatgcttttctatggcttagtttcctcatcagtaaggtgaggacagagtatctcagctccctcccccgggggtcctaaagcatcgaggaaatgttcatgaataagtttaacttattatcatcaccatctgcactcaagaaaaacaatgatatcaaacagcaactttaactttcttttttctttttttttgagacaaagtctcgctctgtcgcccaggctggaatgcagtggtgcaaccttggctcaagtgattctcctgtctcagcctcctgagtagctgggattacaggtgctcgccaccacccccggctaatttttgtatttttagtagagacggggtttcaccatgttggccaggctggtctcgaactcctgacctcaggtgatctgcctatcttggcctcccaaagtgctggattacaggcgtgagccaccacacccgaccttttttttttttttttttttttttgaggcaaggtctcactctgttgcccaggctggagtgcaatggcacaatctctgctcactgctacctcccccactccagttcgagtgattcttgtgcctcagccgatcccaacagctgggattacaggtgggcgccaccacggctggctaatttttttgtatttttagtagaaacagagttttgctatgttgcccagcctggtctggaactcctggcctcaagtgatccacctgcctggcctcccaaagtgctgggattacaggcgtgatcccaggatgacattgcgcccaggctaatttttaaatctttttgtagtctcccaattttttttggtctcccagtgttgcccaggctggtctcaaactccttggctcacgtgatcctcccaccttggcctcccaaagcactgggattacaaccatgaaccaccacacccagccttactttttcttcttcatcttaatttcctgcagtttttacattgaccaagtaataaagaatatatttttttttttttttttttgagatggagtttcgctcttgttgcccaggctgaagtgccatggtgtgatcttggctcactgcagcctccacctcccaggttcaagcgattctcctgcctcagcctcctgagtagctgggatcacaggcgtgtgccaccaggcccagctaattttgtatttttagtagagacagtttctccatgttggtcaggctggtcttgaactcctgacctcaagtgatccgcccgccttggcctcccaaagtgctgggattacaggtgtgagccactgtgcctggtcgaagaataaaaatgttaaagctgggatgcagcacccccagccccagggcccagagaaccagtctctgattcctggttcaaggtgagccacagccaggtggggataagaagtggcaggaatgcctaggtccttatttctgaaaaataccctgcaggttaagccaaaggcaaagcccaaacaggatctaggtgagcatgaggacggggtgagtcagcattcctgcgtgtctgcatttggtgaagttttgcttcaaacagcaattctgcctctacattctaggttgtgtggggatgtttctcttgtttggatcaggacccaatgtccaggatgccactgtggctgctaccagagaatctggcaaggtctatggccccattgtctcctgcccaccctcccgagagacatacccaggaagtcgcagagcagggggtccagcaccctcaggagcagcagcagtcgcccgagttgccgcttcatggtctcctggctctcttcaaagttcccttgctgtgggacggaaggaggggggaaagagcagaccccgtgaggtaccaggacacctgatcgctcgataggcctgtgtcccacccctgacccaagcctcaccacgagctccatgaagccacagaaacaccagaaagcatccacctcgttctgaatgacgtagaggatsggggagagaagatcactcatrccctggacgtagcctggggggacatggggtcaggctgcagccaagcccgcagcgctcccctggacagccccggccacgcccgtccccaggcctggcacccaccgaggtcgaagtgatacatgcagtaggtgaggaggatatcgttcagcaggcccagccccgggttctcgggaccctcgtagaacttgttggtcctgtcagtgcggctcacatccctttctgcggggaccgggcacagggtgcaaaggtgagaaaggtaggggggcccatccctgctggccaccagtgccagcccccactgctcctcctgctggcagcccccagcctcggggtttgctctgggggagaagcagagctggttctagaaactatcactgatgctcctgctgtgaggcgccaggcctcccactcaccagctggctatatcctcccacagtaggggaaactgaggcccagggaggcaaaatcacttgccaagatcaccaggcattgacagaactgagactgggcctgaagggagctgggctccccttctttcccatcctgtccctggccttgctcccccagggccattccccaacagcccatgcagctttcccccaagatgccctctcactggtcttggggaggcagggggctccctctatctcccactcgcacttatgcctgaggccctcctgtggttccctgctcccatccaccctaagtgccacccctgacactgaccgatgaggctgcggtatccatgcagaagtgagtttctccgctcctgctcagggctcacagatttccactgcagcttcatgcggaaatactc

SEQ ID NO: 94931 - DNA, 29508 bp, Homo sapiens
acaccagcttcccagaggttatcaatggtatcttcagtaaccttcaaaaatattttatatccatacaagcatctatgtacatattcttatttctccctctcttttgacacaaatgatggcatactgtaccctgttccacatatttcttttttcatttatcagtatgtcttatattggtacataaagagctccctaggaaataaatttaaatttttttaaaaaaagagcttcctcattatttgttatagctgcaccacattctcttatatagatgaacaataatttaaccaattccctacacatggatctttaggctgtcttcttttttccttttctttgtttcttttgcaattataagcactataataaataattttgtaaagaattatttctgtaaatatatgggcaagacaaatatgtagaactagttactgctgagtcaaaagatacatgcatttgtaatctttttttttttttttgagacggagtttcactcctgtcatcctgactggagtgcagtggtgcgatcttagctcactgcaacctctgcctcccgagttcaagcgattctcctgcctgaacctcttgagtagctaggattacaagcacccaccaccacgcccagctaatttttgtatttttagtagagacggggttttgccatgttggccaaggtggtctcgaactcctgacctcaggtgatctgcccacctcagcctcccaaagtgctgggattacaggtgtgagccaccatgccctgccagcatttgtaatcttgattaatatttccaaactgccctccatggatggttaagcaatttacactgccaccagcaatgcatgaaaacacctatttgaccacaatcttcctcatctagtgtgttatccatttttcttttagttttcctaatttcctaggttaaaaaaaatactatcttgtagtttcaattcatctttcttgcattttgagtaaaactcactaattcattacaatgaatgtttgctgaatacctattatgtaccagacatcattctaggtataggggatatgcaaaagtatatcttaggggctccttgcatatcccctgtacctagaatggtccctgctctcatggagattatgttttaggaaggacactgaaacagtaaacaaccaaggaaatgtagtttgtcaggtggtgattaagtgcttggaggtgaagcagggataagttctgctcagcaagcagacgaaggggcagagagaagcgtaaggagaagaaatattttcatatgtttaagagacctttatatttcctttcctacaaaatgtcttttcattatttctcaaaagaagatatacaagtggccaacacacacatgaaaaaatgctcatcatcactaatcatcaaagagatgcaaatcaaaaccacagtgagacaccatctcacaccagtcagaatggcctttgttaaaaagtcaaaaactaacagatgttgcagagaaaagggacacttatacactattggcagggatgtaagttaattcagccactgtggaaagcagcttggaaatttctcaaagaaataagagttgaggccgggcgcggtggttcacatctgtaatcccagcactttgggaggcccaggcaggcagattaaaaatacaaaaattagctgggcatggtggcacacaactgtaatcccagctactccgaagactgaggcatgaaaatcacctgaacccaggaggcggaggttgcagtgacccaagattgcatcactgcactccagcctgggtgacaaagtaagactcggtcttaaaaaaaaaaaaaaaaaaaagaaagaaataagagttgaaataccattcaagctagcaatcccattactgggtatgtacccaaaggaaaataaattgttctaccaaaaggacacatgtacccatatgttccttacagcactattcataatagcaaagacatgaaaccaacctaggtgcccaccaatggtgaaatggacaaagaaaatgtggtacatacacaccatggaatactatgcagtgataaaaaagaatgaaatcatgtcctctgcagcaaatggatatagttggaggtcataatcctaagcgaattaacacaggaacagaaaacgaaataccacgtgttctcacttataaatgggagctaaacattaggtacaaatggacataaagatgggaacaatagacactggggactaccagagggtggggagggctgaaaacctacagcaatgcttgctacctgggttatggcctcaatcataccccaaacctcagcaccacacaatatacccaggtaggaaacctgcacatgtacccccaagcctaaaataaaagttgtaaaagaaaaaacaaaaaaaggtcttttcatatcctttgcccatttttcttctgggttactgttctttttgttactgaattgtgaaaactatttatttatttgatatttacatattagggaattttgataccctaccattcatatcatcttttgtcaatagtcacccaacttctcctaagaattatgggcacatacattaaaatgtttaatttggtttgacagtttaaaaaattgtatcagcttttaagctaaaggagaacacagataataatacatatgcttagttagaactcttggtctaagcagcacaggggtcataacataaatgcagatagtttgtacacatttcagttattaaaatatataattggttaaaaaaaaggcaaaaattggaatttcaaagtcttttttacacatctatttgttcatatgttttacctgtgaaactttccttccttatgttaattatatatgtgtatgtatatatatgtgtatgtgtagatatacacacatatttaagattttgaagaatacgtattagcaggatatacattcactgctttatttcttttttctttttcttttttttttttgagatggagtcttgctctgtctcccaggctggagtacagtggcgccatctcggctcactgcaacctccgcctcctggcttcaagcaattctcctgcctcagcctcccgagtagctgggattacaggcattggccaccatgcctggctaatcttgtatttttagtagagacaggaggctggtctcaagctcctgacctcaggtgatccacctgcctcagcctcccaaagtgctgggattacaggcgtgagccaccaggcctggccctcactgctttatttctgtagttagagttgagatttattttcacattactatatgccaaaccctgtgcacctcatacatacacgaacctatttatcctcacaatggctctaagaagtagatattattattcctgtcttacagtgaggtaacagactcaaaaaggctaagtaatgtacccaaggtcactagaagttgtcaaggcagggattaagtctccaacctgtctgactggaaagcctgtatcagtaggtcaaatttattatactagctaaataatgagcatattggaaaagtttggggagcaccgggacttttttttttttttttttttttttttgagacggagtcttgctctgttgcctaggctggagtgcactggcgcgatctcggctcactgcaacctccatcacccaggttcaagcaattctcctgcctcaacctcctgagttgctaggattacaggtgcccaccaccatgtctggctaatttttgtatttttagtaagacagagttttgccatgttggccaggctggtcttgaactcctgacctcaagtgatccacctgcctcggcctgccaaagttctgggattactggtgtgaaccaccgcacccggccagcaccgggacatcttaccttggctaaggtaagtcaagacattgctgaaactatacaaatgaaaggttggtcaaagctaaccattttaatctaaatgtataccactctataaaccatcaatgtacagcactgtttcaaattttagaagttttacaaatttcccaaaaagctgagcaaagagtgagaaagcaggcaaagagataaaccagcaaccagataacacaagaaatatgacaatgttattttaaacaatttcaaacatatgtgattcttacctgatttcatttccaaaagcgtattgttatcaatttcatggttagcttttccaggctgaggcactcgtartggtatgatctgagggacacacactgaaccagcagtcattttctctctctctctctctctctatatatatatacatataaattccaatgtgcacttatagctgtacacaaaagctgaagagcagcacttaatttaaatgcagcaaaactagttaaaacgagagaatactgttaacatggcactacaaatattattccctttttaattgaaataataattacatttcatctgtatttgctgttgaggtcttgtgtggggttttgattatctaaatacctcacttctgcgaaaggagcatgaatgaatgagatggggaaaagaaagaagttactttaaaaggacaaattaaatgagtaaggcaaaacagagactatcactaacgctctgacttgagttccctgtaaatcattatcgccttttcctgcctctggtgtgtgtcagctctcttggcttcagggcaagtcatcatacaaggggaacagaagtaattctgtgtgtaccacaaaatgttagttagagctaacttttttgggaaagctccgggttcacagccttgccattatcaccagagcagttctagtatttgaaagctgcaaagacactttagaaggactgcagagtactacttctcagtggaaaggaagtttgcaagaatataaacagtgaccaataaacacaagcctcccgtttcatctactgtatttataaatcctggtattaataattaactaccagtatgaaagccttactggtctttttggaggtgagggtggggaggaaggttgtcataattaatgcacagaaggtttcagggggaaaaaacgctcaccttaacacaacaaccatttacatctctgtattgccttttcaaatttcattaataatccatagattttgcccaattataatctacatattcattccatttttatagtctacttcttgcattctcactgtattatttagttttccctgtacttatttatccatttgtggctgggcatttaggctatttctagtttctttttagttttgcctgttgcagttctaataatgctgatctgaacatgtctgcagtttgagctttgtcacagactgtattctcaaaaatggggtacctaaatttaaggggtgaacttaatgccttgttggatagttccggatctagggccaagaatataaactacagatactgacagcacaacaatagctcctacgggagtgtggctggacttgagacttgcccatagtcgcatttccatttaagtgaaaggcagataaaataaaagtagttgaaaaattctaaataaaaaatatgtaggagaggaagtaattcgcgagcgtcaactagcagctgcccttaggaagctggggtggccagtgggccccacgcaaagggaatcaagaaaaaaggcggatccgccaggcccaaatggcaacgtgcagtcaacaggatccccagacccctcaactctcccaacgtggaccgccccctcgcagcccggatccggaatcccgtttggttgttcccgcccatcaggggctgccaaggacacctgcatcctttcggctggagtaagggaagctcttcccctcctctagccgccctcctcttcctctaaccgcggggcccgggatcgggacccctaatgcatctctgccgcgcccaacccagtcgccagcctctcaccgcctcttgcctcctccttcgccgccgcccgggttaccacagacgcggcgagccgcgccccgcccactgggtgctgggcagatgattggtggagactcagcttcttagcaactagaccggcccctgccgctccgcagggagcctggtacccgcctggagttcctttcccagtgctttcccataggcatctaagaatattccttcacagagttgccaagtgctaaaagttggtttcccaactcagaatgaaggaaccaggcttgtgcgtccgatgggcattgacattctggaaaacaagaataagaagctgtagcggcgcctgtaagtgggccggagcaggcgcagcttggccacctcccgccgaaaggcaaggaaggaccggctgcgacacgaggaagaaggcccctcggcctcagcagagcgctatcctccmctggttmcccgggttccccggcttgstaccgggctgctccgtgcatctttcmccccaggcgtcaggaactgcgccctcatggcggaggtgaaggtgaaggtgcagccgcctgacgcggatccggtcgaaatagaaaacaggtaaaccagtgaggctccggcttggcactccatcaggcgcccagtcatttgggcagctggaccccttctccgggatcccttgggagtggccggagcgggttaggtgagcacgcgggaaaaacgattgcggggttctggacccacttgttccttcccatcctgggagagcagaactcaagaagttcaaaatgggtttgacagcttgcaactttgtgtagctggctggctttgccctgatacttttggggaagttgtgatgacgtgctgccttcctactttgacgcgatcagtgctttgagaggagccctcggctttctttccctgtagaacacttgtgaatacatgttctgatccaggatcgctcttgtcactaagggaacgtctatgacaaaacgtttaggcggagttagggcgcagttggtgattacgaagtaacattaagccaggtggtttcagtgcagtattgaactcaagacttttaggacacccaaagcctctgccacttttatttttatttgtttgtttgtgagacagagtctcgctctgtcgccaggctggagtgcagtggcgcgatctcggttcactgcaatctccgcctcccgggttcaagcgattcccctgccttagcctcccgagtagctgggactacaggctcgcgccaccacgcccagctaattttttatgttttagtagagacggggtttcaccatgttgtctgggatggtctcgatctcctgacctcgtgatccgcccgcctcggcctcccaaagtgctgggattacaggcgtgagccaccgcgcccggcccagttttatattttaccgaggcactgccactcttagattttcacgtagttttaaaagactcaactttctcagactgttaggaataatacatttgttgatgtcgactaggtgaagattttgactttttttgtttggtaggtataattccaaaaacaggccccattatggtgaattgtcataacaaattttggcttcctaccagaaacatctgcatttgcctcctgcttgcagatttatggcttaactttgtcatgcttattacacccgagaaaactgaagtctcagctttaatattttttctgtgatttcattagacttttgctctaatttaaagttcttattagtgaggaaaagaaatattcttaaataacaataatactgtaaacatgtatttagaaatcatcttcttcaatttctaacatgctttgatccaaaaccatcacagaaacccagattgtctgccaaatgtgaaaaaggcacagtttcaaactattctacttgtatttttacccccactgtctcttgaaacaggtaaccatgaaggataacattaatacctttgtttctaggattatagaattatgtcaccagttccctcatggaatcacagaccaagtaattcagaatgaaatgcctcatatagaagcccagcagcgggcagtagccatcaataggttgttgtctatggtaaggtgaatctaactattttgcataattactgatatgctgattatcactggtttttattatgtagttgtgatggttaatttcatgtcaacttgactaagatacaggattcctacatatctagttaaatattttattggagtgtctgtgtgggtgtttctgaaagaggttagcattttgaattggtgaacggagtaaagtagatatgggtccagttgggtgagcatcatccaatccattcagggcctaaatagaacaaagtggcagaggaagattgaattcactctttgaattcaatcttgagctgggctatgaatcttgtgccctcagcactcctggttctcagaccttcagacttggactggtatctacaccatcagctctctgctctcagccctttgatctgcaacaccagctttcctgggtctccagcttgcagagggcagatgatgggactcctcagcctccataatcacagagcaaatagcttctgatgaatctttcaagagggaggtgtatcctattggttctttttctctggagaaccctaatacagcagtcataaaacgagaaagtgtgttaggtttgactgataagactctaaaccaggaaacagctcaaactacctgaattgaaaaaagaagaaataattatgcgttataagacaaatgaaataaatgtattatggtataactgttgtatttattaattgccactgccatacataggtctagtctgttctcaccttctgtttgcttcctactgctggtgttgggccatttcccataaaatattccaccccccgattttcctatgagttgtcacagagcccagtcatcagggtttcattctccacattgtcactctgagcatttcaggaagcaagaatgagtccagttgaatgaagaatgttgggctttggggaggaagtgcagccttagcccccagtgacattgcaatggaatttatcagtgaagccattctccatctgtccagaaacaaacaagcaagactgtctaaaaacccaccaagtggtgccgatgctctaaatctcccttactttccctcatcaccaaaacatccttttcctaagagcatttcagtttggctttagtagcagttaggttaaagagttctacgccaaggcctcatctgaatgactgatttgttttttaagtctactagccttgttggatttccaagggctctggatgtggagatttggggtccgatgaatcttttcttaaacctttcccatcaattttctagctcaggagttggcaaactttttctataaagtgccagacagtatatgttttaggctttgtgagccatatgatttctgtcacaactacactgtcattttagcaagaagcagccatggatgatgatacataaacaaatggctacagccatgttccaacaaaactttggttataaaaacaagctgtggagcagattgctcacccctgttctagcccaaggacaaaggaatgttgctgatttctagttatttcactgtggtgaaggtcttcagctctaggaaagacagaggaagggattctgggaggttgtagcagtggaaaaagttcttttcttcctctgatcgccctctcagctctttccttctgactgaaaatcatcttcagcacctctcttttaccacctctgccaccacccacccactgcgagtcctattggctataggttgtatgcaggcagtagtagagctatcaaaggatattaagaaagggagtgattattaataaatcatgtaatgtttctgattttagctcttaaaaacagttcttaaatttgctgtccacaccccctccatttctatccctggtactgcatcatgttcaggctcatggcttttacctggacagctgcagtagcatcttaactggtttccatgactccatctgtctcagagaagccagcctgatttgggattacagtcatgagccaccgagcctggcccctgatctgtcttaaatgcaggtctgaccaaggcactctaccacctacaatttgtttatactggagattcaagttcaaactcctgggtttcccacactgagtccctgcattgttcaccagcctcatctccaccactctacttcaaaagttaggtttcaggaggagcagattgtttttggtttctggccacatcatgctgtttcgtgccacaggactcatgttgttcccctgcttagaaggttcttcttattctttacagatgactaacgcattaggactcaactctgccattgtctccaggaagtcactgaacccccccaggttgggccgcagcctgttctccgagtacccaatctgggagttcagggtggctttacttacctctatcttaatgccaaccagatgggtattgaagtcacctgtgtgtttcccttttagaattaatgttgttcccccaaacacctatcataacacctggcacagtacaagtattcagtaaatattcataagctggataaatgaccagagcctctggattgggccttgtagtcctactttgccacttcgtggggtcagggaacaggagtgtgtcactgttcattcagtatgtaaatccatttccaagtcatgagtgtctgttttaaaacaagggaatgggctgggcacagtggctcctgccagtaatcccagcactttgggaggccgaggtaggcggatcactagaggccaggagttcaagatcagcctggccaacatggcmtaaccctatctctactaaaatacaaatatcagcgtggcatggtggcatacacctgtaatgctagctacttgggaggctgaggcacgagaatcgcatgaacccgggaggcagaggttgcagtgagccgagattgtgccacggcacaccagcctgggtgacagagtgagactctgtctctaaataaatacataaataaacaagggaatagcgtccctctcaactgtggctttctagtacttccagagcctagtggtataattatctgggttctcttaagttcggacccaaggaaattcaggagcatgacagacatactttattttacttttgatttgctatataaaaacaatactactctagtccttttattcattggctgacttcagtaaatgtcactgttaactttttttgttttttgttttgtttgttttttgcttttcaagatggagtcttgctctgttgcccargctggagtgcagtggtgcgatctcagctcagccttccatgtagccgggactacaggcgcatgccactgcacctggctaatttttgtatttttagtagagacaggttttcgccatgttagccaggctggtctcaaactcttgacctcaaatggaccacctgccttgacctcccaaagtgctgagattacaggtgtgagccaccacgcccagccattaactttataaattttatttttcactgtgcaacagaatatgcctatttagtctttatttcaactttttatttatataaattatatttttattttatatatgtaatttggatttatattgatttttaatatagattgttattctcaagctgctttttaaaaattctttatgcattgatcatataaccaagccaagatctagcctacaggaaattgttagtgatattttgaaaaattttgagattaaagagcaggttttgaaaaattaagaatgttaaagaatgcatcaacatttgtcatttgatttaacatatctccaaaataactgactcctgttttctactgtcttaaaaactagggtcagttggatctcttaaggagcaatacgggccttttatatagaataaaggactctcagaatgctgggtaagtacttgtttttttaattttaagaaaatgtttattatttgcaaacgtatgtgttgggaataaagctaatacaaaattacataaacctgtcctgtgtatcatccctgcctcctatgatatattccatttcccagaggtaactgctcttaataatttagtgtatatcctttcttctagctatatataaatacacatagatgattatatatttatatataatctttctcttttttttttaacaaaaatggaatcatgctatccattctgttttgcaatttgtttttttcacttactgtatcttggacatcttttcatgttggtacacacagctctgtctcattctatttaaggtaagcctttcttttggtaaatatgtcactgtggtgaccttgtctrctaattttgtttaagtagtgatgtagattattagattatcctatagtccttaccttactaattttactttattccactacagtaaaatgaagggatcygataaccaagaaaaactagtatatcaaatcatagaggatgcaggaaataaaggtaagcatgtgaaagatgaagcagaaaaaaacattgtctttggaactagatatagggacccagatctcagcttcccagggtagaactcagtggacagagtatactgaggaaggtaatagaacatacaaatataacatgcatgtgcttgaaggacacccaagagtaaggccgttgttgccttgaaagagacaagaactaaagggctgtgtccagggatggaaaaagacrtctgaattctgagtcacatgaatgtattatctattcaaaataaataaaatttaagttttttttttaaatctgtaccttctagctatatgaccatggacaagttacttaaactttgtgagcttcagtttctttatcttatctataaattgtggatgctgacacctctcgtttttgcaaggaccaaaaggaaagctggtgtggtgtagcagtgtcttaacagatgtccctccgcagctatagttyctcttctacccgcttgaagaactgtatctaaattgcaatcctaagttacaataatttgggatctatttgagtcattgatattagctggaaaaattgagatgtaatctgaaattacataactaattcttatatttattaaaattaacatttttaaaaatagtcctatgagaaagccattctgcatatttttttaatcttcctatctcatatgccattacattgggaagaaaataaagcaaaatatttacatacattccctttccatatataacacttatttccttctttgaaaaagaaatcattgcttctcacacagggcttttagcagccataagaaccctaggcttccttttccatctcacaaatacaatgttgtataaataatggattacatgcatgcagacactcatctaaagagtgtttttgtcccacttgaggatggcagttgaccttgacccaaatttaagtttgtatttcacatttacaatctaaaatgaaagtatcagaaaacagagataagggtacagatgataaaattccattgcatccatgatttttccttccattataaaaacgtcgttttcataatttttttttcttttttttgagatggartcttgctctgttgcccaggctggagtgcaatggtgtgatctcggctcagtgcaacctccgcctcccgggttcaaacgagtctcatgcctcagcctcccgagtagctaggactacaggtgcatgccatcaggcccggctaattatttttgtatttttagtagggacagagtttcaccatgttggccaggctggtctcaaactcctgagctcaggtgacccacctgcctcggcctccctaagtgctgggattacaggcatgagccaccatgcccagccctttccataagttttttaaaagtttgccacactgggattccaagaaatttctagttagaaattataaatcattataataagtcttacaaagcattatacttatttattgtttagcatacttttgctactttagccagcattctttactgttagctttatactgctagctttggaatgagacacaagttagaggaataacattaaaaatccatgaaaaccagagttcaacttattttactttactttcttataggaatatggagcagagatatccgctataaaagtaatttgccattaacagaaatcaacaaaattctgaagaatctggaaagtaaaaagcttatcaaagctgttaagtctgtagcagtgagtagtcctttcctcagatacccacttacatatgttgcttcaagtttttattcttgaagttatgtcatgatttagaacagctggtcaaaaaagacttaaaaatttagctcatgttggattggtttggagatgctgcttagacttgtccctacacagttagctcttggtgtctcactcacccactcaaaaatctaaaactactttactgtcttcagtgaagaatctttggaactgtgaacatttttcctagattttgtggtgtgtaagataatttactttatcccgacatattagctttctcattcaacaaagagtgtttgctgtgtgccagacactgttttgagtgcttgggatacattaatgaacaagtcgtagaaagatccctgccttggtggagcttctcttctagtacacgtgtgtttttcctgctcctcatcctgccccacccctgctccagagctggctccctcggggacatctgcccctgacctcactgatttagacatcagaggaactgagattcccctagaataaagtttgcttcaatacacatttcataagaattacagctataattcaaattttataatttcagagctgttaggtctgtggcagtgagtagacctttcctcaaatatccrcttacatatgttgcttcaagtttttatttttgaataaaacaagaattataagaattataacatcacttataagaatttgatgcttattagtgattttatttatcagaatagcatttcccttccacattgtttaatggataatttcaaatatatacaaagrtagaaaaaatcatataataaaaccctatcatgtagcctcattttgtcagtcctccttctacatctttatgtttaataacagctctgctgaaatataattcatcattcatactacagaattcattcaaccttttaaagtgtaaaatctttggatttacagtcactggtttttactataagctaagagttgtgcaaccatcaccgctgttctaattttagaacattttcatcacccccaaatgtggccactagtatttgtttcccagcctctctttccataggccctaaaaacgaataatttattttctgcctttattatagatttgcctattctggacagttcctataaatggaataatagaatatgtagtcttttatgtatgaytactttgacttagcatgatgttttcaagatttatccatattgtgctttattccttcttattgccaattaaaattccattgtatagatgtatatcaccttttgttcattcatccgttggtgaacttctgtgtccttttaagggttaaaataatcttagatctcagtgtaaagtgcaaaactataamactttttgaagaaaacatagaaaatctacatgaccttggctttgttaatgaattcttggactataactccaatagtagtctatgaaagaaaatgttaataagttggagtttatcaaaattttttgaaaacctctgctttgcaagacacattaagagaatgaaaagacaagttacatactaaaagatatttgcaaatcacatatttgataaaggacttgtctccaaaatatacaaagaactcctaaaattcagcaataagaaaacaacactttgggaggccaaggcgggtggatcacctgaggtcaggagttcaagtctagcctcaccaacatggtgaaaccctgtctctactaaaaatacaaaattatccaggcgtggtggcacatgtctgtaatcccagctacttgggaggctgaggcaggagaattgcttgaacccaggaggcagaggttgcagtgagcaagattgcaccattgtactccagcctgggcaacaaaagcgaaactccatctcaaaaaaagaaaaaaaaaaaaaaacacacaatgaaaacaaataatccaactaaaaatgagcaaaagatctgaacctcaccaaagaagacatacagatggcagataagcatatgaaaagatgctctacattatttttcattagagaactgcaaattaaaataaaatttagtatagtgagataccactacacacctattagaatagctaaaatctaaaaattggtaataccatatgctgacaagatacagaccaagatgaacactcatacattgctaagaatgcaaaattttcagtccttttgttaaaaaactgggcagtttttacaaaactaaacagagtcttaccacattgtccaaaggtcaagctcttaagtatttacccaactgatttgaaaactcatgtccacataactacatgaatatttatagcagctttattcgtaatcagcagctttattcataatcaaaaactggaagcaaccaaggtatccttcaataggtgaatggatagacaaaccagaatagtattcagttataaaaagaaataagctatcatgaaaagatatgagtaaatcttaaatgcatattgctaagtaaaagaagccagtccgaaaaggctacatactgtatgattacaactatatgacatactggaaaaggcaaaactagacagactaaaaagatcggggtgagggcagggatggtagggaaagttgaataggtgaagcatgagaaatatttctagggtggtgaaattattttgtatgacagaagcattaaccaaatttggaagcccacccaagctttgctgtccaaagtttttattagggtttcattatacaggcatgattgattgaatccttggtcatgtgagtgaattcaatctccagctcctctcttctcccaagagattggactgatgtcatgtggcccaaagccccaaccctctaatcatgcggttggtctttccagcatggacaactcctatcctgaaactatttagagtcctatcaggagtcaccttgttagcataaacccaggtgtgatctaagggattcaccatgaataacaaggcctattgggaaattccaaagatgtagaagttatttcctaggaaaaagggacaaagtctagccaaatttttttctttttttttttttttgagacatggtctggctctgtcacccagactggagtgcagtggcacaatcacagctcactgcagcatcaacctcctgggctcaagccatcctcccaccacagccttccaagtagctgggactataggcacgtgccaccatgctcagctaatttttgtatttttgtagagacagggttttactatgttacccaggcctgtcttgaactcctagacttaaagatctgcccacctcagcctcccaaagtgctgggattacaggcataagccaccatgcctggcccaaattcttcatgtttacaacccagtgaaatttgggttcctcagtgttggrgtgagtagttacagacaaacaaggaaagttagaatgatccatgtagtaatggattagacttgaaaacatcagtatggactcttgtgtaatttaatataaataatatagatggttatatttagaaatattgagtatagctatgtatatatacaagggttaatatgcgcacataaatctggtgctgccaactgagaaggcctagaagtgatgacatcccgatggcaatgaacacatctagtgcccaagtcgtggtttctatcatgcaataaaatgaacatgtagaaaatgctcctgacggctgggcagggtggttcatgcctgtaatcccagcactttgggaggccaaggagggtggatcacctgaggtcaggaattagagaccagcttggccaacatggtgaaaccccatctctactgaaaatacaaaaaaattagctgggcatagtgacgggcgcctgtaatcccagctactcgggaggctgagacaggagaatcgcttgaacctgggaggtggaggttgcagtaagctgagatcgtgtgccattgcactccagcctggcaacaagagcgaaactccgtttcaaaaaaaaaaagaaaagaaaatgctcttgacatcttgtagtgctagaaagtaagaaagtgctacaatagctggacacgggggctcatgcctgtaatcccagcactttgggaggctgaggcgggaggatcacgaggtcaagagatcgagaccatcctggccaacatggtgacacccccgtctctgctaaaaatacaaaaattagctgggcatggtggcacatgcctgtagccccagctactcgggaggctgaggcaggagaatcacttgaacccaagaggcagaggttgcrgtgaaccaagattgcaccagtgcacgccagcctgggcgacagtgcaagaccctgtctccaaaagaaaaaaaaaagtgctaaaatacacacacacacgatgggagcatagcaaagggatacaggaaccaagtgaaaagcttccaatgcccaaagcattccaaagcttccagtgtgggaataacaatgaagtatctgaatgtaaatcaaagtataaaataaatactcatgagtccatagtgatagaaatacggtgtttgagaaactgtcacaactaaaagaagcctgagagagatgactaaatgtagtatgatgtcctggatggaatcctggagcagaaaaggaacattaggactaatgaaatctgaataaagtatggcatttagttagtaatgatttatcaatattagttcattaattgtgacaagtgtaccacactaatccaagatgttaaaaataggggaaacagcatgatgtatataggagctctgtgtactatctttgcaataattttgtacatcttaaactgttccaaaatataggtgtttttgtttttggaaattgttatcttataaacacatgaactgtgcatgttctttcctaggcctcaaaaaagaaggtgtatatgctctataacctgcagccagaccggtctgtgactggtggagcctggtacagtgaccaggattttgaatctgaatttgtagaggtgcttaaccaacagtgttttaaattcctacagtccaaggtgaggtatgattgaggaaacatcactgcaaaccctcttgtaaaaagtttttcacaaaggattttaatctatttatcatattttataggaattaaaaacctgaaattgggaatttttacttaactaaatatgttctgttgttggtttgactcagtataaagtgtattcagaaaacacaccaatattcttatttacatttcttatgtttcaatccttataggcagaaacagcacgagaaagcaaacaraacccaatgatacaaagaaatagttcatttgcctcatcacatgaagtgtggaaatatatctgcgaattgggaatcagtaaggtcagaactgaatttcatcttattttttaaaacttattctttgtcacatacaatgtattccaaacatgtatttgacccacattgtttttttttttgagatgatagctacgaacattctgcagaatccactttgggaaaatactgtcctgtatcttaggcaaaggcagtcactgccattgggcattgtctgaactgatactcagcttgggacactgatgctttttttatttttttggaggtagggtctcattttgttgcccaggctggttttgaacttctggactcaagtgatcctcctgcgttggcctcccaaagtgccactgtaccctagccttttgaaattctttttttaaggacactgatgcttttcacagtgaagaaatcaaagtggccattttggacatgtcactttaatttcctgggcctcagatttctcataaaaactaggaacttggactatttgatgtctaaagtgcctttctgctcaagcattttataaatctccaataaattcctgctaaagaaatgttattttttataagatttctcgattttacttaggaagtaaagataccagaaagtgtcaaactcagcatgagcttagagttctgtccctggcacctcagtggtttgtgctaacttggcctattgttcctcctctttgtgctttaaattactccaccccagcataatgtttctcccatttcacagcagaattatgaccctttactgttttatttatttatttgagatggagtttggctcttgttgcccaggctggagtacagtagtgcgatctcagctcactgcaacttccgtctcccgggttcaagccattctcctgcctcagcctcccgagtaggtgggattacaagtgcctgccaccatacccagctaattcttgtatttttagtagagacagggttttgccatgttggccaggctggtctcgaackcctgacctcaagtgatccacctgcctcggcttcccaaagtgctgggattacaggcgtgagccactgcgcccagcaaccctttactgtttttaacaccctccaagtggatgtctccctatcctacttgtgtcctttctgatgtatcccttttttaggtagagttatccatggaagacattgaaaccatcctgaatacactcatttatgatggaaaagtggagatgacgattattgctgcaaaagaaggcacagttggcagtgtagatggacacatgaaactgtacagggcagtcaatccaatcatcyctcccacrggtttggtccgggcaccctgtggactctgcccggtgagttaaagtggcttcactttacacttgactgcccacgggtgcaagtgccacattaagaaasagagcaagcacagcccagttttctcagactcttagggttgaccaagagctattcaaacctccatgaaaccttgatgaacagacctttaatgaacacatcattcctttacttttttttttttttttttttgagacggagtctcactctatcaccgaggctggagtgcagtggcacaatcttgactcattgcaacctccagctcccgggttcaagcagctctcctgcctcagccacctgagtacctgagattataggcgcccaccaccatgcccagctaattttttttatttttagtggagacggggtttcaccakgttgtccaggctggtctcgaactcctgacctcaggtgatcccctcagcctcccaaagtgctgagattacaggcatgtgcccctgtacctggccccctgctttacattctttcttggaacaaccacattaaggatatttacgttttctgctcttggccttgaaatggacactttttgatgagggctaatcatttcacctaaatagggcagaaaatgagatttgttgagaacctaccttgggccagatatgtccttgatgatttccataggcggtctcatttaatcctccttacattcttgaagctagtggtgttatttccccttaaaagtgagggagcttaggcttaggaagacataggggcatacagcttagaagtaaccgggattcaaacccagagatcatgtctttcccctgcagcatgccccagcactcctccttcattcattcccaaatattgtaagtgccaactctatgctctaggcactaaggatacaagagaaagcaagagacactgtcccagtcctcatggcatttatagatgagcctgtgtgtgttttatttcattataccaacctttgtctatatgcctaagctctctatgccttggtttcagtccctagacaaaaggctaacatattaggaattctgttttgcacccttcacaaaaaggtagctaaacatgaaacatttggttaatcaaaattaagtcattcatatgtataggtctccctgcccatattcctgtgttacctggtgatagccttttgcccagcagacaggtgagcatggtcatcttaatgccacagtaaaaaaagcctctctactactcctaacttgatgatcacaaagcaggccctattatagtatgttcttcccgctcccccctcgccccccgagatggagtcttgctgtcgcccaggctggagtgcagtggcacgatcttggctcactacaacctctgcctcccaggttcaagcaattctcctgcctcagcctcccgagtagctgggattacaggtgcctgccaccacgctcagctaatttttgtattcttagtagagayggggtttcaccatgttagccagsatggtcttgaccacccacctcggcctcccaaagtgctgggattacaggtgtgagccactgcgtccggctataatatgttcttaagtacagtcctagtccctttcagtttgaaagttttgtttttaatcttgctttaaataagtggttgggtcttagatattttaaaactttaatttgaatrtaatttttytttcttttttaaaggtttttgatgactgccacgaaggtggtgagatttcaccatctaactgtatttacatgacagagtggctcgaattttaatagagagctatgaactttattgacattttgcaaatgaagttacttagggagcagataatttaattcatgatggaacacgaaatctccttgaaagcaaacttcacaataatggacgtagacttgctgctatgaaaacatattttttttatttatgaagactaaatttatattggtaaaatagccagtagaatatgaaagaaataaggttagtagtgaaattcattaataawaaaacactttgaaactccggaggaccacatctttcaagacttctgatgggtcaaggmaaaagatgccaacatacccgtatttaccaagtactatgataatggctagagtataaaaatgttctttttaaagttatttattaagttcttcattggaagtttttttttatatctggttcactaccaccattttctgtttcctactttctcagtggtttcattgaaaagaaattagaagkggttaaaggcaggaatagcaaagagtgcaaacttggggtatgactgggggagagtggaacatgccttttccgcacaatattaattcctttttgtatcagaaatgttcttttaggagattatgctaccatacttacttcaaacccaatgactactgtcaaggwcatattttcagtacataaatactatcattttcattctaaagaatattttcactgttccttctttcttaaagtcttatgtttcactctttaactcaaatgtattctttgttagaatttaccctagattcttatttaatgtctgcagtagactgaatgtttgtgtgcmccsagaattctaatgttgaaatctcatttccaatgtgatggtatttggaggtggggcttttggtaagtgataggtcaggagagtaacagcgctcatgaatgkgattagtgcccttatataaagagacccagagagctccatcaccccttctgccatgtgaaagggagaagacaaacatccacgaaccaggaagtgggtcctcaccagaaaacaaatctgtaagcaccttgatcttggacttcycagcctccagaattgtgagaaataaatttctgttgttgataaaccaccagtctatggtattctgttatagcattaactgaaactaaatatactccatgccctccattcacactttattttgagagaggggataacattctttttctcttactctgttttagatttatttcccttccttattctgttctaaatcatggtgtgatgtgtctaagcagaaagccattataattgtcctcagttctaataacactttcagttcctatggtcagccacatagaaaacactaggttatttgatgtattgttgcacagaagttgactgtgcggctttttagaattgcagcttcatattttcactttgtagctccacttagaagtttctgtatccaagccaaaaacatgggacccatggaaaggaattcaagctccactagtactgagggttgggttctaataccagtttggagatgctctaagtggatatcagaagagttattttaagataaatggtatcagtaaaataaaattcaggccacattctgtgaattagcatttgatgacactagctctttgtaacaaaaattatttcaagtattgaatatacatacatatataagatacacagccttttggccagaacccccatcttccagtaatttgccaaaatgatgaacacaaacggaaagaggagaggcacccgatatatgttctctaggacttttagaaaacatggagttgttcctttggtcacgtatatgcgaatctataagaaaggtgatattgtagacatcaagggaatgggtactgttcaaaaaggaatgccccacaagtgttaccatggcaaaactggaagagtctacagtgttacccagcatgctgttggcattgttgtaaataaacaagggcaatattcttgccaagagcattaatgtgcatactgagcacatgaagcactctaagagccgagatagcttcctgaaatgcatgaggaaaatgatcagaaaaaaaaaagaagccaaagagaaaggtacctgggtttgccagggatggtggctcacgcctgtaatcccagcactttgggaggctcaggcgggcagatcacgaggtgaagagatcgagaccatcctggccaatatggtaaaaccctgtctctactaaaaatacaaaaattatctgggcatggtagcgcacacctgtagtcccaactattcaggaggctgaagcaggagaatcgcttgaacctgggaggcggaggttgcagtgagctgagatcgcgccactgcactccagcctggtgacagcgagattccgtctccaaaaaaaaaaaagagagaaagttacctgggttcaactgaagtgccagcctgctccacccagagaagcacactttgtgagaaccaatgggaaggagcctgagctgctggaacttattccgtatgaattcatggcataataagtgttaataaaagatctctggactgtaaaaaattatatatataaatatatataaatataaatatatatataaatatatataaatataaatatatatataaatatatatatatatatataaatatatatatatatataatatatatatatatgaaggatctgggaacctgaaactacagacagagggtttctcttccaccctcagtgagagttggaatggtaagaacaatgtctgtccttcctgggacttggcctatcaaaaaggcactagttttatgtagtaagaaaaatgaacttggaagagagctagaaatgagaagaaaccagcttgtatgttttaaatatagactttgtcttatgtctttatagctaaagattggtttttagagcttaacattcaatggctaaaacaaaagtattccttacctcaccaataaagagaaacttcaagcttttttcccatggtatgtttttaattctgaaaattaactgaaggagacaagagacaatttaaaattacagcacctctgatgaatagttaaatggatcatttatcctacagggataaactgtaaccaaaacagattgtggggctctagactccggacagcaccaaaaattcaagttgcatatgaagtcctaatacttacagttgatttccattcagtattcggtattttgctcacctgagaatagatactccccagagtgtatagaggcccctgtatattcaatgatgaccacaaagaatcaaacagaaatcagaaatgacagtccatggctctatggtttttaatgaatagtttgtgtagattttcccatgaaacacccctgatcttagttgggtgatttatagacctatgatgttggtggtgatcagctaagcaaactagccaaacagaagtaatttcaaattaagtcacttttactttgtgctattactcattattggatggtgggtgaggggaaaatacaaaatatatgtcctagaccaatgttgtccaatagagctttctataatgacggaaatagcctatattggctggtcagtaaggtaaccaatagccaccagtggctgttgagcacttgaaatatggctagtttgactgaactgaattttcaattttacagctagctgtggttactggttactatatttggcagcaaagttcaacaatcctataggtctatcttaattacttttataggaatgaagagtatcagaattatttctcaattatatatatttagttttcatttctacagagaaagaggtcaacaaagttttgtgaactaaattgtataagtttcttttttaggaaaggacttcacagagaacaaggcaaagaataagtaatacaacagcaaatttccaaaaaattcaagtagaatcaaactttgactatagatttggtcaaattagtgctaaacagcctctttaacaacattattattcaactgatttatataatttgctttttagtagtcaaatacattgttttaaatcttaattatttttgattataaaatacatgcttagtgtaacaaattcaaataatcaggaggataaagtaaaataaggggccgggcatggtggctcatgcctgtaatcccaacactttgggcggctgaggtgggtggatcacttgaggccaggagttcgagaccagcctggccaacatggtgaaaccctgtctctactaaaaatacaaaaattagccaggcgtggtggcacatgcctttagttcacactacttgggaggctgagatgagaatcacttgaacccgggaggtgcaggttagagtgagctgagatttgtgccactgacctccagcctgggagacagagcaagacactgtctcaaaaataataataaggacgtccaccacactttacctaccaaaatgcccattccccaaagatgattgctgttgaacgattagggtacctttcctgattttttttgtctaagcacatttaaaaaccaagacttttggttttgagcgatagctctgaatctcctttaggtatgaagtgtaggaaattgtatttctgcagcaaacttaggctttgcaacatcaagtgtggattcactggaaattatttgaaggaacacatagcgatcataatagccaaaaaatgttgggaaatgaaaaagggtgggtttttttaattaaaaaaaaatttttttttttaagagacaggttcttcgctccatcacccaggatggagtacagtggcgcgatcatagctcactgaaggctcaaactcctgggctcaagcaatcctgcctcagcctcccaagaagctaggactacaggtgtgcaccaccatgcctagctaatgttttaatattttgtagagatggggtcttgctgtgttgccctggctggcctcaaacacctggcctcaagcaatacaaccacctcagcctcccacagtgctgggattacaggcatgagccaccacacccagccaaaaaaaggttttctgaggaagtatgatcagaagaaaatggaatgtgcttgaaagagatctaaagggccatggaagttaaaaggtttaactctatagaacagaacacgaagtatggaaaggttctttttaaaaacacttgtcttttggaacaaaatccaaattgtccccatgatttcgtcctttgacattatgttcatcttggttatcttagtcttttctcagacttcacagacaattatctaaaagcccctggctaagtgaatgcttatgactgtggtcacaaatggatggcttggattttatttgtcttgcagtgtttgtaaattttttgatgtatactgttattgccaacttacatactccatatgtatatggattgtatgtgtatgtgtgtgtgtgtgtgtgtgtatatatatatatatatttgcattccccaaatttaaaaactacaatttggagatttttttccacacaaaaaatcagaaaattggcaacactctgccccatttccacatggcaacaatttagacaggccatgagctctccacatggctctgatcccaccactcttgtctcaaacaaatctagtcagttgtacgtatattatgaatgtatattgctgtgcttctccttcctgcctgactccggaagactcctgtctcagtctctctcaacatgtctgaaggacttaggggcaagtgtcagaggtgaaggccctagtctgagtttaatgtctggggccagcttgaaacagcagctagtattttgagctctaagctaacactctggactttcagtcatgttttctttccccagtgaaatagaaaagtttgatttcaaagaggaaaagtgtgcaatacctgcaacatacataaaacctatttaattttactcaggagtgggaatcaagaaacctgggttctgtttctgactcacttcggatagagaagggtagttaagctgtccttatgtttcttatcaaatgaggaaaatactgtggtagttcatagcaatttggggagttttagagtctatggaaaatggaagtgctatttgtaacttagattgaatgttgaaacttgtgtttgtttttcaggcacttacggaacttaactggatgttctatgtgtctagtaatcagctgatagtagatattattctactcctatattgggatgcaaaatagcagaaatcatacagtctatgctggtactttcagcaaagactttacaacagtaatcagttcatgaaactctgtgttctgaaagtggccacagtcagtgaatttgtgcaatttggtttccaacctatcggccacttcttgttgttccttccagggaaggaacgggtcgtcagtagagccaaactgcacaatgtaagggcagttggccttgatcttctcccactgccaggggcgggtgaagtatcctatggggaaaaaaaaatgatctttcagtgcccatggataatctcccttctagatattctaaaatacctactggcgacccacatagagacgcaaaggagcagagcctccgtgtgagttagaagcacttcttttgttttcaaatctgtagggcttgataccacagttactcgtgaagaggtggtatatggttcaactaaaaccaggcctctagggttcagttctagacttacagcttgggaagaaatcaaagtgcaaacttatatccaaagataggtggtatatctttctcatatgctattagaattttttagcctatctgaaagacagcactgtttttacaacctgaacagacagccccatgtctagagaagggctttgctcagatttctacctttggacttaccacttgcacgctcattttcatcccccaagtctgatgtgtacgcagacactaatacaatagcatatactcgatgtgtttctgcatacctggagaaacaaaaatgatgtcagctaatatataatgttacctctgatcaccaaaaagtcaataaactacttaaaaactcatttgaggtagcctacagaaagcacgtgctacctgctgttgaggttgatgtgaaaaatggcaaggaaactgcagaactataagcccaaccctggctactggatgagct

SEQ ID NO: 94932 - DNA, 45434 bp, Homo sapiens
tagtgattgcctagggcctagtgggtggggggaaaatggggagtgactgctaatgggtacagggtttcctgtcggggtgaaaaatattgtaaacttgattgtggtgatggttgcaaaactccgtgaatatactaaaaaccactgaattgcacactttcaatgagtaggttgcatagtaggtgagttttctctcaatacagctatgatgaaaaattgtgggcccagcgcagtggctcatgcctataatcccagcactttgggaggccgaggcgggcagatcacctgaggtcaggagttcgagaccagcctggccaacacggtgaaaccccgtctctactaaaaaatacaaaaatgggccaggcgtggtggcaggcgcctgtaatcccagatactcgggaggctgaggcaggaaaatcacttgaacccaggaggcagagattgcagtgaggattgtgccactgcactccagcttgggccacagagcgagagtctgtctcaagaaaaacataaaaattgtgataaaaatcctggatcatcaagagggtttgagaatttgcaaatttataatttgtggtaggcagaacaatgactaaagatgtcccgctggaaccaggctcagtggctcgtgtctgtaatcctagcactttgggaagctgaggtgggtggatcacttgaggtcaagagtttaaaaccagcctggccaacatggtgaaaccccgtctctactaaaaatacaaaaaaatttgtcgggcatggtggcgggtgcctgtaatcccagctacttgggaggctgaggtaggagaacaccttgaacccaggaggtggaggttgcagtgagccgagattgcaccagtgcactccagcctgggtgacagcaagagactccaccacaaaaaaaaaaaaaaaaagcccagcttggtgcagtgactcacacctgtaatcactttgggaggctgagacaggaggattgcttgagcccaggagctcaagaccagcctgggcaacagagtaaggctttgtcactacaaaaagcaaatcaggtgtgtgtctgtagtctcggctactggagaggctaaggcaggagggctgtttgagcacgaggtcacggatgcataattgtgccactgcactccagcctgggtgaccaagtgagactctgtttcaaaaaaacaaaacaaaacaacaacaaaaaaacgggccccgatacctgaactagtgtctgttaccttgtggcaaaagagactttgcaagatgtgattaagtgtgtgcaccctgatataaagagattatcctggattatataaatgcgcccaatctaatcatgaggattttttatttttgagacgaagtctcactccgtcacccaggctggagtgcagtggtgtcatctcagctcactgcaacctctgcctcccaggttcaagctattctgccgtgtcagcctcccaagtagctagagtgcagtggcacaatcttggctcactgcaacctctgcctcctgggtttaagcaattctcctgcctcagcctcccgagtagctgggattataggtgcccaccaccacgcccggcttatttttgtttttttagtacagacggggtttcaccatgttggtcaggctggtctcaaactcctaacctcaggtgatctgcccgctttggtctcccaaagtgctgggattataggtgtgagccaccaaacctggctcacatgagtttttaaaagcagagacccggccaggcgtggtggctcacgcctgtaatcccagcactttgggaggccaatgtgggtggatcacgaggtcaggaaatcgagaccagcctggctaacacggtgaaaccccatctctactaaaaatacaaaaaattagccaggcgtggtggcgggcgcctgtagtcccagctactcgggaggctgaggcagaagaatggcatgaactcgggaggcggaggttgcagtgagccgagatcacgccactgcactctagcccgggcgacagagcgagactctgtctcaaaaaaaaaaaaaaagcaaaaaaaaaaaacgcagagagccttccccagctgggtcagcgagatgaccctgaaaagggcacaggggagagagaaatcactggatctcccattgctggctttgaaggtggaagaaaggggccacaagccaaggagtgtgataccctctagaagctgagaatgcccttcagctgaagccagcaaggaaacggggatttccgtcctaaaaccacaaggtactgaattatgccttgaccagaaatggctcctccagataggaatttatgctgacccattattttagcctggtaagaactaagttctgacctccagaactgtaagataataaatttgggttgtttaagccactaaatggtggtatattgttatggcaacaatggaaaccattacataactactttatgtggactttaggaagctaatcttaaaaaataaaaaaggtctgttacaatggctcatgcctgtgatccttgcactttgggaggccgaggtgggaggataccttgagcctaggagttagaggccagtctgggcaacatagtgagggcttagctctacaaaaaaagaaagaaagaaagaaaaaaattagccaggcatagtggcgtacacctgtagtttcaggtactcaggaggctaaggcggggggatcacttgagccaggaggttgaagctgcagtgagctatgatcgtgccactgcactccagcctgggtgacagagtgagattccgtctcaaaaaataaaataaaaatttttaaaaagaggctccttatgtctgaggatgaaaagatctactcgtggctgaaaaatctctacctgtttccctccctccccacctcctgcgagaagcaagacgaagccagcagagctgccttagggagtgacacctgaaaatagaaactgcaatgggattttatttctaactccacaggcatctctgtgagtcattcatctctctgggtctcactttccttgtctgtaaagcaggctgaattcaccctgacttctgcctacaccacagttaaagggctaggaagaaaaatccccaaaaatccacttcataaatagagccccagggcgctccttataaagcacgagataaaccacagacagaattctggtcacaggacaccccctggaccacccatggggcatcattcctttctcccggcttccttcattctcccggcttccttcacggggttctgggcacacctggtcccttgtagctgcggtcagcacggaaacaagaaaagcttcagacaggcaaaggtgcagaaaccaatgccagggcccacagggacaaagttttcgatttttgtgttttgggtggcagtactctcacaccaggatgactgggtcttagcacgacctaatcgtcttcatgatggaaagaaagcaaagcaactgattgcccagagaaaactggaaggtacagaggcaggatgagactgaggtgaaggtaaggtgaggaaagacaggcggagaaatgaaacatctcagggtggtgtgggagtggacatagggttgggagggcattgtgaccccctaggctaattcccccctcagaccccaccccaacgttacctaatcaggtggacgttttcttagtaagcaggttacaactgacttggtttggggctttgtttttttttctttttttttttttttgagaccgagtttcactcttgttgcccaggctggaatgcaatggcgcgatctcagctccccgcaacctccacctcccaggttcaagctattctcctgcctcagcctcccgagtagctgggattacaggcatgcgccaccacacccagctaattttgtagttttagtagagacatggtttcaccatattggtcaggctggtctcgaactcccgacctcaggtgatccacccgcctcggcctctcaaagtgctgggattacaggcgtgagccaccgtgcctggctttttttttttttttttttgacacagtttcaccctgttgccctggctggagtgcaatggcgcgatcttggctcactgcaacctctgcatcctggattcaagcgattctcgtgcctcagccatctgagtagctaggactacaggcacgccaccacgcttggcttttttttttttttttgtattattagtagagatgggatttcatcatgttggccaggctggtctcgaactactgacctcaggggatccacctgcctcggcctcccaaagtgctgtgattacaggcatgagccactacgcctgacctggggctatttataagaagccctcaaggtagcagatcaccctctgatggccacatggagatctgggaaacgaacccccggtcatgcctctggacacctgcccacttctatctgtgccttcctgggccctggttttcagagctatgtgggtgcctgacacactcagggccacagaacatgggaagggctctaggccaagagtcccggcatcattcgagtctgctctggcccgctcctgccctaagccctcctgctcacttccagctgtggaggtagcccagagagtgcctggctccctggctcccccctctgccaggcccactcagtgtgacctaaatccttgccgaggcttggcagccctctgcgggcgcccggatggcctctggccttggtgacggtgaggcccagctcccctcagttcccagccttcccggaaccccttgcctaacatcctgtgtggtaatcatgcctgttggccccattcagtcctgccggccactgccaagttgccactgctagttccagacgctcccacctctaatggaaccatcgggaaataaaaagctgcagcacagtttctctctcaggtcagaatctcctcccagcactttgggaggccaacgtgggagaatcacttgggcccaggagttcgagaccagcctgggcaacaaagtgagaccccgtctctacaaaaagttgaaaaattagtcaggagtggtggcgaacatctgtgatcccagttacttgggaggctgaggcgggaggatcacttgagcctgggaggcggaggctgcagtgagctgtgatagcgccactgcactccagcatgggtgacagagcgagaccctgtctcaaaaaaaaaaaaaaaaaaaaaaaagaaaaaaagaaaagaaaagaaagaaaaaagaaaaagtggggagcaggttggggagcatggtgagggccacctactgcctgataatggtgggggacaggaaggggactgagtgctctgagaggcagctgatcccgttttctcacttaaatacctctcaccctacagagaagccctgattccatttgctgtctttcttagcaatgtcttagcaaaagtcttctatttgccacacgggtccaagcttccgcttactaagcacccaagtgccagacaaccccggaggcaggtactcccattgtccccactgtacagatgaagaaactgaactcagggtcacacaagtgataaggggtggcagagatctgaagctgtgcgcggaggcgtggccagcgtgtgcgctccgacttctaaatccctactctggatattgaagacgggaaagaccgagccgctcattctacagatggggaaaagcgaggcctgaggagtcccagagcgggtgccagatcgtagggagcagccagcaccccgggtcccctccacgacacaaccacgtccctcggccacttctgggtcccgcgcgcgtctcggacgcggcaggacagctctaggacgcacggccaccagggggccgaagggaagggcgggggcggaggctcggagctgacccaccgcctcgccccggaagctccgaggccccgccccggcggccgccagcggagggcgtggcctcgccggcgcccccgccccgcccccgcccccgccgcgcgcgcccccgccgcgcgcgcccccggcccgggccccagtcttgctgagcgcaaggcggtggaggcctgaggcctgaggcctggggcggggtggcggccgggctggcsttggcctcgcgccttcccctgcggccgccgcgggctccgcgggcggtatcggagtgtcgtgcggcgcgtggccgcgtgacacgcgcacttgtcggagtgacgggccctgcggaagaggaggtgcggcccagggcgcaggggagccctcgggagcgggcccggccctcagcgccgccccggccgtgtcccggaggagcggcctgcgccgccgcgcgagaggaagtaagcgccccccgccggccccgccgccgccccggccccggcgcctccaacccgcgctgccgccgggcccgaggccgcgccgagccccggagcctgcgctgccagccccacggagcctggggctggcggctttggaactgctcaggaggcggccaggctccctccagggtcgccccgagcggccgagctgtcctttccctgggcttcccggaactgagttccaggagagggggaactccgagatttcccccgggacctgcttaatctttggcattgattggccctcgggtttcacatagcgtttcccgtacccggatctagtgaacggttttccaggggcaaacctctctggatctctgaaaatcagctcacccaaccttgaatgcttagccagaagtgagaacttctggaaagaagtgtccttgcccactccccctgcacccacaacaggcccatggctcatgaaaggcagcagatgagggaaaactggtgtcaaatgggcatattttttattttatctttttacttttttatataaaagtaaaaaatcttttacttataaaagatggggtcttgcttggttgcccaggctggagtacagtggcacaaacacggttccctgcagcctccacctcttgggctcaggccatcgtcctgcctcagcctccggggtagctgggaccacaggcgcacaccaccacgcctggctaatttttaaaccttttgtagagacagtggtctcactatgttgccctggctggtctcgaactcctgggctcaagcgatcctcctgcttaagccttacgaagtgttgggattacaggtgtgaagcaccacgcccagacagcgtattttaaattatgcatcatatccctttaatttttcatcattatgattggaagatcatgaaaagctgtctgagtttttccttggcatttttctgtggttgatggttagttgttgcccaagctggagtgcaatggcgcgatctcggcccactgcaaccttctcctcctggttcaagcgattcttccacctcagcctcctgagtggctgggattacaggcgcgtgccaccacacccggctaattttatgtattttttagtagaaacagggtttcactatgttatccaggcttgtcttgaactgctgacctcaggtgatccaccacctcggcctcccaaagtgctgggattacaggcatgaaccaccgcgcccagctggttagttggttttaacagcagttcaagaagctagcaagaaggacttcattcgtgaagctaatggtttaatgatagaaactaacatttctggccgggcccagtggctcacgcctgtaatcccaacactttcggaggccagggcgggcaggtcacttgaagagttcaagaccagccttgccaacatggtgaaaccccgtctctactaaaaatacaaaaatttgctgggcatgggggcagcggatgcctgtaatcccagctgctggggaggctaaggcaggaaaatcgcttgaaccgccctgcctccggtgacggaggttgcagtgaaccaagatcgtgccactgcactccagcctgggtgacaaagctagacttctccttaaaaaaaaaaaaaaaaaaagcagctaggatttcttgggtgcttactgtatgccaggcattgtgctaagtaccttacatgcttcccatcgatttgttttcccattctgtggttgaggtacagagaggttaaataacttgtctgagggtacatagttactgagtggcagggatttgaatccagaatattcttatgtaaccagttctccaaaaactagcccttgaaggtcttccacgtttcaacaaagcaactgaggcttatacatgatgtcttcatgatgtcagaaggaagaactgtgaaaggcaaagcggacccgggaggcagaggctggttaccgcagttagtgttcggaacagcttgacttcatggagcagagaaacagcctgtctggtttaaaccactgttcagtatctacactgatacagtgtaaatgtaatacagtgttttacattttgccattcagggatgtagtcacattttacgggaaggttagctctgggaccagactgcctgtattcaaatcctatcacctctagctgcttgacctttggtaagttatttgacttctcttttttttttttttttttttgagatggagtcttgctctgttgcccaggggcgcaatctcagctcactgcaacgttcgcctcctaggttcaagtgattctgctccctcagcctcccaagtagctgggattacaggcacctgccaccacgcctggctaatttttgtattgttagtagagacggggtttcaccgtgttggccaggctggttttaaactcccgacctccaatgatcctcctgcctcagcctcccaaagtgctgggattataggcgtaagccactgcgcctggccatgttatttgacttctctttgccttagtttcctctctactccctgctaagatggggataatcatgttacctacctcatatggttgtggcaagatttaaatggtgtgatgcatgtcacaccgatagcctagcatttggcatatagttaaatactccataaatagctcttttattattaaaagtgttgttccaagtagtaagctgctgctgtgtgctgtgtcacagtgcttgaagtcaccattagaggtatattcctttgtgccgtatttcaaatgcagaartgacagtggtcctgtgcaaatgggatttatttgttcatttagcagatatttatagagcgccttctgtatgccaggccttgttttggatactggaggtactgcggagaacaaaacaaacaaaagtccctgtcctcattggcacgcacactcttgggaaaaggaatggcagacaataggcaaaatgaatgtaattatcatacagtatattagaaagcgatgtactgtggggagaaataaagcaggagaggaggatgggggtgggcggtttacaattttagagtggtctgagtaagcctcactgagaagatgacattttagcaaagaaaaattagtgagggagtaaaccacgtggacctggtgggggacatgggggagttggccaggcggagagaacaagtgcaaaggccctgaggcaggaggctgggcggccagagcctagacaggcaggatggtaagagaagagatcaaagaggtaatgggtgggaggccagaatgtgtagactctgcagacatctgcacagaggaatggcatgatccagctggagctataaaaaggtcactctgactgccgtgttgaggctcagccatagagggtccaggtagacagaggaggccaattaggaagttcctgtagtaatccagacggagatgacggtggctggcactggagtggagtggtggaaggtggtgagaagcagttgtattctagataaattttgaagatagaaactacaggatttgctgacagatacgatgacctcaaggtttctgggtctgaacacctggaaagatagagttgtcatttactgataatggggaaagctacattggaagcagattgggagagaaatcagttcagttttgtacatattaagtctggcaaacatcccactcatgctctcagaatagcaattgactgcatgagtctggagtttaggggaagttcgggctgtaaataaagacttggacggataggcagttgtgtgctggtaatgtttaccaactgactctgtgaggggtggggttggtagtggggaacctgatttatagcctttgcctatatctgtggtgtaaatattctgacgttggccaacttcaaatacactataatagaatatcttcacctcatagatgcagtggatataaataatatcaagagcatagatattagtgaaatgtagtcagatgattaggaagtaatgagttttgagtatttattacctttctttttaatttaatggtttttttttttgagacagagtctcactctgtcacccaggctggagtgcagtggtgcaatctctgctcactgcagcctccgcctcctgggttcaagcaattattctgcctcagcctcccaagtagctgggattacaggcacccgccaccacacccagctaacttttgtatttttagtagaaacgggtttttgccatgttgcccaggctggtctcaatctcctgggctcaagtagtcctcccgtctcagtctcccaaagtgctgggattacaggacaggtgcctaaagatgggatgaggattctctgagatgagagaggaacaaggaccccagagcccgatctggaagcttttgtccccattctggcccttagggcagtgaatgcagatcagaggtcattgatagcaggcttgatttttatctgcattgatgggttcagcataaatggaccagaacaggaagattgcaaaaaacagacaaaaaacaacaaaaacaaaaaccttgggttggctattgtaaaaagactaggcacatcaccttgtgctttagtttcaaatgatctttagtttgaacttttgttttactcccacatgttctttttaaaaaattccaaactcatgggtcatgatttgaagaaaatttcccttcctcctgcctggcgcacagaaggtaacgtcaaaagctgggaaagggaacagggcagcagcagacattgacctttacctcccgctcctctctcccaccccttgtctgctgggcatagaggattagaactgcttcctcctgtggtttaccagaaaacgctctgcggctagagcttcagcacaggctgggtckgctgtgccgggtctgtatggggacagctgcacgcctcttccgcttgtgtgagaacaaaggccggaacctggattctgatccaaaccccctggcccccaccttctgggatgttagcagagccttttaactggtaagtctctcccaggatgactcgtaggagcctctcaggattagagttggagacagtgaagggtgcccaggactgggttcacgtgcctgcagtccgccctggctctaagatgagccatcagaagaaggccttttccacctccctacaggatgcccccacagcattttgtttcgtagtgagtgtatttctggcaagtatcttaaataagaattgtaaatgaaattgcatcctccacacacgtaagtcatagcttcaagagtttttgtcttaactgctgaatgacgcacagttctcagctcttggcttcatattttagttctctgtttccctgcctggctgcagaggtcaaggctcgaagcactcatttgccttatagaaaagtggagggcagttcccggataatagggtgcggatcacctttcctcggaaaacaggacttagggacactaaaagatcacacagatcctttatctcaccctcccatttcctckatgaggaaactgaggcccagccaggctaaatgacttgttyaaggttatgtggttgtttagaggcagggcgcaggcaagagccaccacacattcgggttcmcagtgtaaygccccctccccttacagctgctcaaacttttcactaaagattttctcattgatttgttaattttttgagmagaagtgattcgtagttggataagcttttggaaggctacttccatgctctttggctaacttcaagtatgtaatttcggaaggtttatttcacagcccattcctctcagagcaggcaaggaggcagaggggagaagtgcttcagaagaaaaccttctgaagcagagccgtgcagcatgaggaggaggcttggagcccaggagatgtgttggagccgtgggtgcctctgctccagaggctggggtccccctgtccctgactttgacttaactgggcttctctgggcctgcttctttccctgtcagggcagcagggaggatgaccaagccagccttcctcctgctgcttccagactagtcgggagtgttgagttaggaaccagggttggttctccagtgctgtctgcagggcctggctctgtagccccaggagaggagggaggttcacaatgtttttcctgagagcaatggtatactacccttgggggccaggaggaactttgcatttaattaattaattaacatttgtatagcatttttgtcaaatgtatcatctcagtcttcactgcccctccccccacccccaccttgggttgatggtatttgccctgttttgtagatgaagaaatgtggatgctaaggctctaatcacctacccacccttatggaaaggtggagggcatctccctgatttaattagctgatttatttatttattttatttatttactttttttgagacaggatcttgctctgtcaccaggctggagtgcagtggtgcgatcatggctcactgcagcctggacctctcgggctcaagcagtcctcagcctcctgagtagctgagactacagacatgtgccaccacgcccagctagtttttaaatattttttgtagagatgggggtctcgctgtgttgcccaggctggtctggaagtcctgggctcaagtgatcctcctgccttggcctcccagagtgccgggattataggcatgagccactgtgcctggcctaattagctgacttaattagatcacgaagttaggcagtggtcttgagcccaggtccttggaccccaatgcttccttcttctgcttracaaaggaagctgtttagcatcgtgactgagggtccaggctttgtggcttgacagtttccttcacctcccagtttcctcgtctgtagaatgagactcctcacagaacctcctccacaagactgttgtgaggaatgattggaaaggtgcgtttaagtcatctggcacacgccgactacttggttaacataggtattattattggattcaggaacaaccagtttttacaaggggatgggcgcatgaaaccatttgagactgtttcgaaacacctgtgttaggacccaccctacacctactggatcagaatgtctctgtcttgagaaagggagcaggaggcgaggaccgcgtgtttgttctgatgccctcctttgatgagaactgctgctctggtgctcgctgctcagtattccggagtctcactactcaaagtgtgctcttggaccagctgtcagcacttcaggtcctcttcyttctgcatcagaatgtccttttaaaaagatccccaggaaattcaaatgctcattaaagtttgagaaacactgtaaaggttaaaaaaacataaaaaaaaaaatacccacacatactacccccacccatttaggaaagagttgttttttagttgttttgcaaccacagagtaagcaatcatgttgtaatacccaatatcttggatttgtttaaaggagtgctggcaacataacagataagggaggccaacctcagaaccggggacccacaacaggactggtcagggaggactgtggcaaacctcagagtcagaacaggattaaagagagggccaggagtcagttcaggccaggtggccatccgtcacagctgtctgcagtcttctggggtgggggcagaggtgctggcccttggggctcccccacctgcccatgccaggactctggaggcttagctcctccctttgtaccaggcacgtccagagccctggctaccaggatccgatcagcagctctgaagcgcagcctgccagctggcggctcctccttctccaggctgttctctgggcttcagatttcttgctgcctctctcctgcactgaccttgcagcttctccttctctccagacgagcgattgccggttgaggaaaaaacgcttgaagggccaaggacagggactggaaagcaggaggaaaaagcagaatggtcctgtggtccgtgtgtgtatttaggggtgagggcagatacagggagagtgggagaggaaggctggggagccacccgtgtggccctgatcctctagttaaagctccagtgatggacgcgtcgtgtgtcctgtagacactggctcagacactgtggttgggtcctcaccttgggttggtccctcactaggaccctcttggagatggatcttgagagagatgaggaagaggcagagggggtggtgggaggagggggtctgacgtcagggtcaagaggcagattggtgccctctgtatagggatggtggagaggtcattgggctggttctgtggggacttttgtaagttatctctttaaacctcaacttctccatttgtattaccagattatggcttcctaaagttgttaaagattttgttaatcctttacctggtaaatgcctgacatataataggcgctaaatcagccattcagttccttcgtcactgctcccacctgcaggctgagccccatttccaccgtggatttctgactagttcccatgggcatgccggccgtgatgactttccccctcacttccttcttcctttccctccaacactggccttggttggaagctagagagccagagagctgtggaggaagaattcagtgcaggaagccctacaaccttggttagaacagaagggcagaacaaacaaatacttggtgtgtttgtgacccaccttaggcctctacttctcatgcatgtgagtgcctcagtttaggctgaacactagcccaggtggtttgcttacctgggagaggttgtagccactggcccagacactgttgttggtcctcaccttgggttggtcactcactaggaccctcttggacatgaattttgagagagatgaggaagaggckggggcggtgggasggggggtctgacgtcagggtcaagaggcagatttggtcccctctatagcggtgctggagaggtcattgggcatgtcatgcagtggctgcacagtcagtcccagctcccctgctttcttaccctgggaccttcattgacctgagcctcagcttttccatttgcagaatgggaggactgtcacagaaccccatgtggttctttcaggattcttgtctggattcattgagctctaatacacataagtacttagtgccagcactaatcrtttgctggtatcactcttccaggatgacacctaccactcggtgcttaataggtgataggtacaggcctcagctcattataagcatgaactccttttatccttataacaactctgtgctgtaggtaccgctattacccccatttcaggtgagaaaactgaggtacagccaggttaaataattgtgcacttactaaggggttgagctgggattcaaactcaggcagttagtctggagtccatgttttctgtcactatgctgtagcagttattagtcatcacttggtagttggagcccagtggacatggagaagaggcaagtgagaggaggtggtcctgccctctcactgttccaactgtcgcctgaggacctgccactatacctaggctggggctgccctgcttgtccgggtgacctgtgctcctagaagagactggccttggtcataaaatggacagctccactcccaggcctgcggccctccctggtggcctttgccgctttcctatgctcctggcagcaaagtgrttcatctctagcaagtggtctctaactttcccaggcagagtccctgtctacagggcaggctccctacccactgacttcctggaacagaagccaagctgtcaggagggagggacaagctgtgggcttataacattttcttaagaaacacgtggtggtttcttgccaggcaggaagtgtttgtttccacatcgtagccacctgaaccatgtctgatccttccttgttcctcgtctgtctctctttgcaccccaggcacccaggcatgtggaatatgctcatagtggcgatgtgcttggcccttctgggctgcctgcaagcccaggagctccagggacatgtctccataatcctgctgggagcaactggggacctggctaagaagtacttatggcagggactgttccagctgtacctggatgaagcggggaggggtcacagttttagcttccatggagctgctctgacagcccccaagcagggtcaagagctcatggccaaggccctggaatccctctcctgccccaaggacatggcacccagtcactgtgcagagcacaaggatcagttcctgcagctgagccagtaccgccaactgaagacggccgaggactatcaggccctgaacaaggacatcgaggcacagctccagcacgcaggcctccgggaggctggcaggatcttctacttctcagtgccacccttcgcctatgaagmcattgcccgcaacatcaacagtagctgccggccaggcccgggcgcctggctgygggttgtccttgagaaaccctttggccatgaccacttctcagcccagcagctggccacagaactcgggacctttttccaggaggaggagatgtaccgggtggaccattacttaggcaagcaggtgagcatcagcatggagcctgccagggctagggtgagctgggcgctggtagaccccagcaacaaagccgctcgctcattgtggagctaggccccaaggcattgtgaactcagagctcccatggtctccttgaaggtgggcaggaggcgagcgggtaaaggaaagacagcagcagggcaggactgttgggtccttgtccatgtgtctggcctcttttgtcctttgcaaagcccccgttctcgttgtttcccagtctgggctctggcttctcacggttgccctgcatcccctgtagcggtggctcagcaactctggtgtctggatctggcttcctgttgggtgtgctgtgggaatcagaatgagctctcttctcctgcacccatccaccttttttttttttttagacagagtctgctctgtcaccaggctggrgtgcagtggcatgatctcggctcactgcaacctccgcctcctgggttccagcaattctcccgcctcagcctcccaagtagctcggagtacaggcgcgcatcaccatgcccggctaattttttgcatttttagtagaaatgggttttcaccatgttggccaggctggtctcaaaatcctgacttcaagtgatccgctcacttcggcctcccaaagtgctgggattacaggcgtgagccaccgcaccctgccccatctaccttttttcaaaatgtttttcttcctgagttctgttttgagccagaaggttggcaacaagagcttaaaccagggagcagtaggaccttaagtcctgggcaggagcatgggttaacctcctgggtgacacatgtccgttgaccagttcactcaaaatgccttggaggcccttgggggcatcctgccccaggaaccctggcagagagtgcagcagccctgtgttctggtacgtggtgcgggtgggcataggcagttgttgaggacagagacatggccttccatcccaccctgcctggagttgcccatagtaggattcctaaataggggtcctcagaactgggccagtcctggggaggttttcacttgtttatggcaagatgagaagaaatacagaatgtgctcaattcagagcttttctttgctacatttttggtgttaaacctatctttattttattaaaaattgattgtaatagaagataggtaattctaactttttttcttggcaaaatacaaatctggtaaccctttggaggtcactygcaagtttttggaacctttactggcctgtgagatcgtgaagtccagaactactgctcagagggcatcttctgctctgagcagggaatagaaaggtcagagcccttcccgggagtcagggttcctccttcatcgtgagagtatcctgcagcacgcccagtcttcccccyccgacaggctgtggcrcagatcctgcctttccragaccagaaccgcaaggctttggayggcctctggaaccrgcaccatgtggagcgggtggagatcatcatgaaagagaccgtggatgcygaaggtgtgtgagtggccctgcgcactcggtcccccagcctctgcctgcccgctgtctgcggtgaggcatggggcgcttctcagagggaggwtttctgtgggtgtgtggtctcccttcgagcctgccgtgtgcctagctctgaaccgggctaaaccccagggtgccggctggcaaagcccaagtagccattgctgcccatgaggagcgtatggtccagagaagtaggcctggcacagaggcrggaaaccactggcacgcggtagaggctggagtctccctgaggtcccccaagtttttgagtgcgtggagaccatgggaactgcgtgagggcttccccgactgtggtgcttgcagccgtggcgccccctgcctggggcactccccctcgcgtccccctcaccttctgacccctctctcgcttgttagttctcagctccatggccctccaggaagactttctgagccctgcaggcccactcccctcaccctcacggcgccacacacctccctcccctgccctgcacagtgttacccttgcctcgtccttgtccaccctgtctcttctgccagcctgtaggctccaggaggacaccgcctctcccgcactgccacacacctcagacacactgagtatacacccgggaggcgggggccctgcgtcatgcccaccgctgccttcagctgggtggcctcagcatgtcactccytgcagctgtgagatgagcatgtcctgtcggtgaggacagctaaggtcccttwgvtggcattctgtgatggtagcaaagttttggagcattgaccgtgaagatgtaaagcactggctcttgcccagtaackrtaagagctgaagtttactgtgtccccagtccccagccgccaggtgaggtgggcgctgttaytagcctccttacagatgaagatggtggcgagcccacagccccacagtagaaggcggtggagcctgatcctgggggcaacagtctggccccagcactcaggcctggcgccgcygcgctgtgctgccagcgctgcgtcagtggccagctcatccccgcggccgctttctgcagctgcagcgggagcacccgaggccactgcccccccagcccccgcagtgcrtgcccgccacagggcagggcccagagccctggacccagggatgggccaggaggtttctcctctttttctctctcccttgctctttctctgggccattttctctttttctttcccccgccccttggtttctcttcagctgcttctcccttcctctctgaatgtgtatttagtgccagaagctctctgcggggccgaggtgccacagtgaggtacaaaactcagcctctcagatatggctccctaatactgcccagattcacgggtgctgtggggggtgatgatctcatcacactggctggtgggacaaactccaaaatggagctgggcgcagtggtacacccrtagtcccagctactcgggggcagaggcgggaggatcatttgagctcagtagttggacaccagcctggggagcatagtgagcctccgtctctgaaaaagaaaacaaaatgggtgatgggtgttgcaggcaggcagcgtggtggggggacaatgtggggggtgggcgggaggccaggcaggacttcccaagccaggccttgaaggacattgctgggttcgagaaggcactgggtttctctacttcagaacccacagcagaaaagaggccctaccccctgcagtgagccttcatgggtctcagggaatcgtcctccagcccttccaaatttccctcccagtcctcagccagggcgctggccgtgggttgscccccgtgccygtctgtgcctgatctcccagcaggcacgtgtgctgggcctatgcctgcttcatcttcagagaagtgagctgcacctggtgcagagagcctagagcagaattggagggggtcctgcccctgctgaagccagcgggccggcgcttgcccttctctacctggacttggccccatccccagcgaggctgggagactcctctcccctttctggcaactccttcctatctccgccctgggctggggaagagccatgatgtctggagttacctgttggtactgttgcctcttagttcttccagccctcccaccctgtttccttcttggtatgtggtgtcatttgtgggttgtttgtaggtcccatggagccagggaccaggcagattgcaggcccgattatcctagcaaaggtacttttggattttgaagaaagaaacacggaagatatgaaagamagacaggtggagctctgggcaggtctgtttgccgggacagtctgaggatgttgggtttgaacagcaacacaacagcctgggctggctgtcctcaaggtccaggagggagaggcacctggagccctgttgtcacagctgcagggactaaaggaggcccagccttgcctgccatatggggctctaggggagggtccgccgctcctaagctccagagtccaaggcctttagtacagctgggccctgtaccttcagcccaggggcaaagggagcctcagcgcaggacaggcagtgggagatmcactagtcctggaggcttgcakcctgtcgcggtgagaccagagtggggctagttcagtccacgttccttgtcagaggtggccagcaggactgcaactgtcctggggtttggccctcactggttggcttgtttacctgccatttacaaacaggtccttgatagctcgtagcagggagggacagcctgctgctgagcccagccccccagcaagtgggccttggacacagggtgctttggcaacagaatgagcttgcttgctgcctctctcaattttgtgtgcctgcgtgccaggggacacattctttctgcattccarraaggtggcctggtacagccctgctggcccaagcactgctctgtgctgtcctctctgagtcctgctttggagccagtccttcaggggcctcccacctgtggttcagactggaaagaggggacaggcaccgcagacctgcagcacaccccagcatggccaggagccctgtgcccagcacagcaaggcctaggctgccactgctgtcccgggtgagggcgggaaacaggcaggagtaaatgctgcctcctactggagcttggtggacttggcaggcgagtgctgctgcagtggggctcagcatgggcagaatgtttccaaggcaggattcggagcccgcggtctgactgctaatcagaggggtcaaagtgcacggcaggccattctcccccactccccaccccacacacaccgcaggccattctcccccactccctaccccacacacaccgcaggccattctcccccactccccaccctacacacaccgcaggccattctcccccactccccaccccacacacaccacaggccattctctcccactccccaccccacacataccacaggccattctccctcactccctaccctgtcctctgccctgccaagggttctggtggatcccagctgctctccacccctgcagtggtgcaaccctagctgactcctaggcaggagtggcacctgcgtaaccgaagccagcaccctgagtgctgggaagggaggggctgcaagccaggcctgggaaatggagcattcccggtccagagctgctgcaggccccgggaaagggacttctgagctgcaaggtcgtttggatgtcttcccccacccgcatcacacacatctaagtgggtggaagccggcttccccggctccctcccctccatcctccatgctgggtgagtgttgtttttttttcctgctgcagcctctggcccagaggagtttgctgcagagtcaaggctgctgcacaggccggagggggtggggaggaggaaaggaagacgcgatctggttcccagctccctctcagcctgacctggggtgctcctcctgtgcgtcccagtccgtgagcccctgagagtcacagcccccctgggtaccctggctggggtctcgaagcagcatgggccataaaaggagagtcactgagcctccttcatcccagagatgaccctggctggccctcatcatggcatcgggagggctctgcagacaggcgggcccatgtgattaatgggctgtgttcagctgtctgggtccggctgccttttctgtcgggagtgctggaattggaactgaggtcttggcacctcagagcctgagcctctaaccactgagctccacagcctccccagctggccaggccctcagcagttggcctccctgctggaacgcactcagggccagtctccttgctgccctagtttcccctctgtgtagaaggcctgctgttgttgttgttgttgttgttgttgttgttgttgttagaaagaaggagggagacttcctgaggacatcactgctgggagggtccctgtcctgacatgggggaaaggagcctgatgcttgcccacctctgagggctggagtgaccgttcagtgcctctcaccgagggaccagggcatccagggtccttccaggcacacaccagctgtcccgccttccagcctggtgtgccagaaggggccaggagctcactcagcagggccggttccccttcccgccccctctgcagagctgtctgcaaggtgagcccagggcagctgccggatctcctgtccagagagagcaccagcaagcacactgtgctctccttggccctcacctctttttatttttagtaatcccagaaggtgttgatggggattgcagctggctcttagttgtcttttttttttttttttaatctatttttgttgagaaaacctggatttcccacaatgtggaagcaacgaggaaggggtttctggtcccggttctgaaggctgtgaccttcagcgcacatctatacaatgctgatagccccggcacctctctctctcgggtagttctaaggattaaatcagataatgcacacggaaatacgttacaaatggaagtgttgttgttcttccaagtttgcaaggagaggcagcggcagtgttcttgcagtgtgtctgagttccacgtgacttatattggattattatataaatcctgtaattgatctgtcatacttttatgtccattctttatgtcatatttctctctcacatatacatacacagttgtatacatacttaaatctctatgtattagcagtctgcacaacatataccttttaatatttatatttctgttcagttctgttcataccacagaatatgtgttataaactcttttattaagctttttggttgtttctagttttttgctattttattattattatcttggagtcttgttatgttacccaggctggtcttgaacgcctggtctcaagtgatcctctcttgctttaacctcccaaatagctgagactacaggagtgccccacctccccggcttctatcttagatggtactttgtgagctttttttaaaattgagatacaatgcacataccacaaaatttacgcttttaaaatataaaattaagtggtttttagtatatttacaaagttatgcaactactatctaattcgagaacatttatgagcattttaaaaaacatattccctttaagtatatacttcggcagtagaatgacggggccaaaggggagaagtgctttctagctgttactctctgttatgagtctgagcagcacagctggcgggcacagccatggccmccctgctttgtcatcctctgaccttggacgagctctggatgtgcacaggtgggagccaagtttacagggggtctttcctcccagtgtccaccctggttgtgcttttctctatccttttcatatactgatgggtttcaaccctcaactttcaacccgggaaaatacactaggagccaatatagatcatttttaggagaaatcagtccacaataacgggcagtaactagaaaagatcaacatcagcaggagggccagcccctcgcctcctgtccttgcactcagctgcatggcctcttcccagggaggtgccaggccacagtcccagtcactgcattaaactctgaaaagacggagccaaccaggcaaagtccataaatctacaggccgtgttaaacacaggcgcaccccctgaagcttgaaattaaggaataaaggaagctctcttttacccagcaggtagtaaacccgtggaatgcattctttttgagaattgagagaggataaaaataggaaaggggccgcttagggattcgctacattaatgaatagtaagcagataacagggcttttagggactctgttgtgttcccttcatcaaaaattcatctgtttttaaagctttaagtatgctgttgacatataaatccactgtaattcattgattggaagacatttttttcatatttggacgtctctgaagttgggtttatccttaatagggtgacatagtggaactggaaacccttttctttcttaggggttataaaacagcgatgcttccgccactgatggcatttcaggtttgatgaaatccagtttatctccagtgtgcgttgtctccccaggccctagtttatacctccagccgccttttagatcatttcatggggtgttgcaccatcccttcagattcagcagatttagaatgaaaaccatcactgcatttttctcatgaaataccaactgtgttttctaacctctttatttcaaatgggaacagtgctctctgagtgaccaggctggtagcccttctcttacagcatctgtcataagaaaaattccaaccagtctttatcagtgtttcctgtgtgctagccactgttccaagccctgtgtggatattaactccttcaggcccacagaagccctgtaagggaggtgcggggattgttgcttgttcgtatgtgaggtgatgtcagttgctggagatcacagggctgaaagatggcagagccggtatttaaaccggggcaggctgggcacgggggcttatacctgtaatcccagcactttgggaggccgagacgggtggatcacttgaggtcaggcgttcaagaccagcctggtcaaatggtgaaaccccatctccactaaaaatacaaaaattatccaggcatggtagtttgtgcctgtaatcccagctactcgggaggctgaggcaggagaattgcttgaacccaggaggcgaaggttacagtgagccaagatcgcgccactgcactgcagcctgggtaatggggagactccatctccaataaaataaaacaaaataagataagataaaataagataaaataaactggagcagcctggctccagagaccacactccagatcacagctctgtaccaccattcaaggatccagccagtcaccaagtagtttgtattcatctgctataataacttctttgcagttcactgtgacttcgttccctcctacctttgttacttcctttgatggcagcaaaggctgcctcactgatttcactaccaccagtcccatcctgttcatcttggaggtcgcagacagcttcatcttcctgaagtacctctttcgtgcttctgcttccctgttctaaaaccttttttaaaaagttttattgagctgtaactcacaaatcctactacactttacccagttaaggtggacaggccagtgagctttcgtgtattcacagagttgtgtgtcagtaccacaatcaattttaggacatgttcatcacggcaaaggaagccctgtaccccttcgttgtcatcccacaatttccccctctccccagctcctggcaaccacagaaatgcattctctctgcggggttgcctgttctggatattttgtacatataggatcatacggtgtgtggtttccatcagttagcatcctgagttcagagttcacccatgttctagcatgtaccagcacttcatttctttttactgctgaataatatcttattgtatagatataccataatttatccagtcaccagttagtggacatttgggttgcctctactttttggctgttatatataatgctgcaatgagcattcatgtacaagcttttgtgtggacctgcatttttatttctcttgagtataaacccaggagtggggttgctggaggatcatgactctgtttaactgtttgaggccaataactcttatttatttatttattttttattttttatttttggagacagggtctttatctgtcgccctggctggagtgcagtggtgcaatcatagcccactgcagcctcgacctcctaggcttaagtgatcctcccacctcagcctcccaagtagctgggaccacaggtgtatttcaccatgcccagctaatttttgtattttttgtagagatggggttttgccatgttgcctaggctggtcttgaactcctggactcaggagatctgcccacctcagcctcccaaagtgctgggattacaagcataagccactgtgccaggccttaggtccctttcaaatgcaagatattcctgattttcctgttctattattgcaggggaagggaagaattgtctttttacattctcccgaaaaggagaattggaagatttggtcaccctgggcccacactcctgtgaggcaccacctgaatgcacctgaggtacttaactgtacctctgagggacaccagccttactccatccttttygcttttgctggccccggtaggcattggaatctctgagctttgccctagacccctccttccagaagctcagccggcttcttcattgtgctctgtttctaaaggccagtggtgcccacgccactcaacttcacaccgttctgttgtagggttgaagagtgggtaattaaaagggaaatgttttggtggtaagaattgcaggctctgggtcgaactgcctgggtttgaagctatttttacctctttaccagctgtgtgtgaccttgggtaagttatccaacctctctgaacttcaggttccttatattttaaaataggggaaatagaggggcctccttatatgttgttattctgaggataaatggactgatccacaaacattgctggcatcagtttctctttttctggatgtcttctcaacaatagcacaagaacttgaaggccacaacactacagagctgggggatctcagccattgttttcccagtggagaccactcttggcattttggttggcacagttgggctggacttcctgctcatttcaaggtttagtatccctggacagagctgcaccctctagctcctggttgttatggccggggacagagtgccttcctacgagtggctgccggcttcatttcttgccccccaacactggtgctgctgtcgggaatggcatatcgggctggattcagggcaggttgttcccccagccatgacctggacatgcttgctgtctggttggcccgagagtgcacaccaccaacctggtcagggcaggtgcccaggactggcgccatggacccagagtggctgctgggaggggagcatgctgggctcagcaggcctgaacttaggatctgctgctttttgtctgttggaattaaatgttaactagatactaggtaaatttaaagtttacagaatgcatggaagagatacagaactatggtataagaaacggggatgcacctaccacccgtttttaaaaaagaatttgattctcctgcgtgtccctccccacgttctgacctatttcctcatcttacacttccaaattgtggatagattattccctcgcttctctttctgtttccatgcacgcctggttccctaaacaacctgttgtttaattttgaacaagagtcatcctgtatgtgtccgagcatggatctttttgtctctgtgtccagcatttgggagaatcgcctcagctctgtcttctgctagctgactctttacagctgtttctcatctgtaaggcccatctactgaatttctagtttccaattatatttttcatttattgaagttctgtttattttggtcactttatatcctgttttctttttctttcttttttttttttgagacagggtctcatgcggtgttgtccagatggggtgcagtggcaggttcacagctcactgcagccttgacctcctgggctcaagcaatcctcccaccccagcctcccaaatagttgggaccacacttggctaattttttttttttaattttttgtagaaacagggtctcactttgttgcccaagatggtcttgaactcctggactctgggctcaagtgatcctcctgccttggcctcccaaagtgctgggattaccagcatgagccagtccgcctggcctatatcctattttcaagttaatttttattttatcaaagtaatcatgttgctttctcaccacattacgtcttggaggtttatccgtgacaatgtgtggatcttcattttctctgctgtccactgtctgaacgtagtgctgtgttaggggctagggatgcagcagagggcagatgccactcagatggagcctccctcgtagtggggaagaaagagaaacaggcctgaattacagtcagctgggctagaagaagccagggcccctcagaaggggtaggccaaagctcctagaagctgagcccttaaggatgactgggagtttgctgggtgaacaaacaaatcccaggttaggggtcctacgtgcagaagcctttgagaaaygatggctcctcgtgtctgaggccaggctctctctgtaggtgagggtgtgaggagacttgggcrttggaactctcctgcgaggtggtatgcgttggaaccctgatctctgggactgtcctgtatattcgagtcaccgataatcagtgctcaccggggttcagcctcagaggagggagtggagcggagctcgtggttaagcagtgtctgcttctgcccccgcgcctggtcacctgcctccttcctcactcgcggagcaggagtgatcacggtgcctgcgtgcagggtctttgtgagtatggggaggagcggcgcgggccggggctgctgtcagcgttggtgttgttatgctggtgttgttacgttgctattgttacaccggtgttgttacgccagtgttgttatgttgctgttgttacgctggtggtgttatgttggtgttgttacatcagtgttgttacgttgctgttgttacacccgtgttgttacgttgttataccgatattgttacgccagggttgttacattgtygttacaccagtgttatgttgttgttacactggtgttgtcattcttatcccagtgttgttatgttgttatgtcagtgttaatgttgctgttgttatgctgttgttacaccagtgttatgttgttgttacaccggtgttgtacaccattgttatgccggtgttgtgttgttacactggtgttatgttgctgttacaccagtgttgttacattgctgttaagctggtgttatattgttatgctggtgttgtaacattgctgttaacaccgttgttatgttgctgttatgccggtgttgtgccagtgttatgccggtgttgttttgttgttgttacgctggtgttacattgttacaccagtgttatgttgttgttacaccggtgttgttatgttgctgctgttacatcggtgttgttacattgttatgctggtgttgttatgttgttgttacaccagtgttgttacattgctgttgttactctggtgttgttatgttgttgttatgctggtgttgtgttactgttgttatgttgttgttacgctggtgttgttatgttgctgttgttacatcggtgttatgttgttatgccagtgttacattgctgttacgatgatggtgttatgttgctgttgttacactgatgttttttgtttgtttgtttttgtttttgaggcagagtctcgctctgtcgcccaggctggagtgtagtggtgcgatctcagctcactgcaagctctgcctcctgggttcacgccattctcctgcctcagcctcccaagtagctgggactacaggcgcccgccaccacgcccagctaattttttgtattttttagtagagacggggtttcaccatgttaggatggtctcgatctcctgacctcgtgatccgcctgccttggcctcccaaagtgctgggattatgggcgtgagccaccatgcctggccacaccggtgttgttatgttgctgttgttacaccagtgttgttatgttgttgttacactggtgttgtatggttacaccattgttgcgccagtgttgtgttgttgttacactggtggtggtgttacaacaacttgttgttacaccagtgttatgttgctgttaagccagtgttgttatgttgttatgctggtgttgttatattgttgttacgccagtgttgttacgttgctgttatgctggtgttatgtggttgttacactagtattatgttgctgttattccagtgttgttacattgtcacaccagtgttgttacgttgctgttacaatggtgttatattgctgttattaagctggtgttacgttgttgttatgctggtgttgttacattgctcttaacaccggtgttatgttgctgttgttacgccagtgttgttatattgttgttacaccggtgttatgttgctgttgttacactggtgttacattgttgttacaccagtgttgttatgttgctgttgttacggtggtgttatgttgttatgctggtgttgttttgttgttgttatgctggtgttacgccggtgttatgttgttgttacaccagtgttatgttgctgttgttacgccagtgttgttacgttgttgttatgctggtggtgttatgttgctgttgttactctgctgttatgttgttgttacactggtattatgttactgttgttatgttgttatgctggtgttgttgcactgctgttatgctggtgttatgttgttactccggtgttgttacgttgctgttgttacgccggtgtcgttatgttgttacgccagtgttgttacgttgctgttagctggtgttatattgctgttgttaagctggtgttatgttgttgttatgctggtgttgttacattgctgttgacactggtgttgctgttgttacgccagtgttatgtcgttacaccagtgctgttatgttgtcgttacgccagtgctgttatgttgctgttgttacgccagtgttgttatattgttgttacaccagtgttatgttgctgttgttacactggtgttgcattgttgttacaccagtgttgttatgttgctgttgttacggtggtgttatgttgttatgctggtgttgttttgttgttgttatgctggtgttatgttgttacaccagtgttatgttgctgttacgccagtgttgttacgttgctgttgttacaccagtgttgttacgttgctgctgttatgttgccgttgttactctgctgttgttatgttgttgttacactggtgttgcactgctgttattctgatgttgttatgttacgccaatgttgttatgttgctgttgttacattggtgttgttatgttgttgttacgctggtgttgctgcactgctgttatgctggtgttgtgttgttaggctggtgttgttatgttgctgttgttatgctggtcgtgctgctccatgttctccaggtgttcttcccttttatcgtcacagttaccccgtacacctgacaactggacatctgcgcctgggggtcttcagcctaaacacacctaaaccctccaccaaacccctctgcttccgcctccccgtgtctgtgagcgcctccactgcccatccctctgctcaggccccacttccagggctcatgttgggggcctccattttgctcacacccaccccatctgtcagcaggtccagtcaatcctgactctggggtgcctctccctcccctccagctcctgtactgcccattagtccaggccctgtcgtctctgctgggcagctgtgcagcctcttccttgccttccctgcatctgcacccattctccccccaagaccaggggtcgatccccaatataggtcaggtctcrtcttctcctgcctcagatcctccagtgtcccccctacaactgatcttagaaaaaagtccagcctcttcgccttatcctgcaagacccctgatctcctctccagcctcaccgctgtccccactctttgctcacctccatctggcccccagcacaccaagttccttcctgcctcggggctttggcacctgagggtccctgcagctgagatgctttctccctggctttttgcgaggctggctcttcaggtctcggaggggccttttcattaccctctgtcacaactgctctgtaattttgtttacttccttttctcttcttccsactttccctccctcccactcccctgcacattgcctggcacaggtgtgcgcccggtagtgaggtggcacttgttagtctcatccaagggcaggatgcaggaacaaaagtcaagtaacttacccaagatcacatgctagtaagtggcagtcatactctggggtgctgcagcccccgccatggtgccatagcccccacagtgccgagcctcctactggcagtggccaggcagggcggggcgaggggctggccagtatctacagaggcaatctggcctttgctgggaatagagctttcttcatgtggatttctgtagaggctcacggatttgacgccttctcttacagtagttctcattgacagaggtggcttcaagacttcctccctcccttctcgtggtgaggttggctttggtgtgcaccatttttataggccctgtggactgggggaagaggatgcaggatgaatgtgcgggctggggttttggtgcacctcggggagatctgatgttctggcctctctttagatcctccccacttctccacctccctccrccaggccgcaccagcttctatgaggagtacggtgtcattcgcgacgtcctccagaaccatctgacggaggtcctcaccctcgtggccatggagctgccccacaatgtcagcagtgcggaggctgtgctgcggcacaagcttcaggtcttccaggcgctgcggggcctgcagaggggcagtgccgtygtgggccagtaccagtcttacagtgagcaggtgcgcagagagctgcagaagccagacagcttccacagcctgacgccgaccttcgcaggtgggccctggggctgggcatggggcactgggctgcccacttcgccgggagcagctttccaaatgcagacgcccttgggtggagtggaggggacttgaggtgggatttcccccagggtgctcggaggcaaggatggcattcccctgtctccctggcctcctaccagcctaaagtggcaggccagctggtggtgccctcagggcgaaggacatcccaatggccatggcctcgtgtcagccccagttcagtcccagatgcttcccaagggtttgtcgtgcgaggctcagacagacctggttcctgcctcatagggtctccccagtgaggccgcaagccttttgcctggccacagctggagacacttccagcggccaagtgccatgccagggctgtcctctgggcagttccagagacccagggctttctgggagaggctggctcctcaccaggtagcagccaggcagtaagagccacagctgcctgttgagcacgcgccgtatgccaggtgctttatagatgcctctcatacaagcctcacgcaccaaccacgaggcaggggccattagccccgttttacaggtgaggaaacgtaaggctcggtgaagtcgtcagaatgaaccaggcttggaacttgggcatggaatactgtcagcccctggctcttgccaccaggccttgtccctccttgccaacaccccacccacgggcctctgcttggtgactctctcctcaccccgcaccyctgaccctgcgtcgggtgcatcctgaatgcttcacaagcaggagggaagcacgtttytctgtaggaccccctgacccctcaaatacctaagagtcagggtcccccaccccacttgcccccactgtggggcgtcctttagagtctccaggttggatgctctcagcccggttctcctttcctgggggaccataactctaagaggggcctcaatgaaggcaggtgtcaaagccatagagatagccccagaggccggttttcaagcatggactgggaagagaaggtcatggaagagatgccaggcgaggggtgagcatggcaaggcgagggscttccctgaggcagggggacgcccagaggagccggcaaggagaggagagggctggccggagagtcctggtctgtgccagagagtcaccctctgctgttccctcaccccagccgtcctagtgcacattgacaaccttcgctgggagggygtgcctttcatcctgatgtctggcaaagccttggacgagagagtgggctacgctcggatcttgttcaagaaccaggcctgctgtgtgcagagcgaaaagcactgggccgcggcgcagagccagtgcctgccccrgcagctcgtcttccacatcggccatggcgacctgggcagccctgccgtgctggtcagcaggaacctgttcaggccctccctgccctccagctggaaggaaatggagggaccacctgggctccgccttttcrgcagccctctgtccgattactacrcctacagccctgtgcrggagcgggacgcccactccgtcctcttatcccatatcttycatggccggaagaatttcttcatcaccacagagaacttgctggcctcctggracttctggacccctctgctggagagcctggcccataaggccccacgcctctaccctggaggagctgagaatggccgtctgttggactttgagttcagtagcggcyggttgttcttttcccagcagcagccggagcagctggtgccagggccagggccggccccaatgcccagtgacttccaggtcctcagggccaagtaccgagagagccygctggtctccgcctggtccgaggagctgatctctaagctggctaatgacatcgaggccaccgctgtgcgagccgtgcggcgctttggccagttccacctggcactgtcggggggctcgagccccgtggccctgttccagcagctggccacggcgcactatggcttcccctgggcccacacgcacctgtggctggttgacgagcgctgcgtcccactctcagacccggagtccaacttccagggcctgcaggcccacctgctgcagcacgtccggatcccctactacaacatccaccccatgcctgtgcacctgcagcagcggctctgcgccgaggaggaccagggcgcccagatctaygccagggagatctcagccctggtggccaacagcagcttcgacctggtgctgctgggcatgggtgccgacgggcacacagcctccctcttcccacagtcrcccactggcctggatggcgagcagctggtcgtgctgaccacgagcccctcccagccacaccgccgcatgagccttagcctgcctctcatcaaccgygccaagaaggtggcagtcctggtcatgggcaggatgaagcgtgagatcaccacgctggtgagccgggtgggccatgagcccaagaagtggcccatctcgggtgtcctgccgcactccggccagctggtgtggtacatggactacgacgccttcctgggatgagggcgcctgtgccccttgcccgcttcgctcctgtgctttccttcgcccgtgtcttccctcccttctcggccccgccacctgcccagcgtgccctggctctccagaaccttctatcccacagtcaggccccagagagggcaggacaagccttgtcccgatgcctttgaccggcagctctgtgtattggtggatagatgcagaaacaaggaagaaatggagtctgctcctgagaagcttcaaattcaggccaggagagaagtcttaagaaaagacctccagcagttacacattcatatcaaccagcacaacacgggatggcgcccaaactccggcgttyacaagaggagacgtgacgtggtgggctgaggttaatcagggaaggtttcctgggggaggtgatccttgaactggctcccggggaacattcagagcatgattggtagacagaagggtgcagaggcgcccaggggagtacattgccccgtgcaaagcaggggcattggggactgtcttgagaccctgagggggtcaagcccctccttccccagctgcccctccttctagaacctctgcacatctagcctctggccctcctcttcactgcctccacctgctcccgcttgccatccctgtctcctccatcctggctgtgcagtaggaattccaggctcctccctgtgtctttgctgttcttcagactccatttatagagaatgagggctgataacaggaatacagtggcaaagaytagactgtggaaagggttccagaaatcttttttcttttttaattaaaaaaaatatttgcagagatgagctcttgstatgttgcccaggctggtctcaaactcctgggctcaagcgatcctcccatctcagcctcccagagtgctgggattacaggtgtgagctactgcgcccagccccagaaatctcagtgctgtttggagctccatttctcatttgatgacttgctctgcgtggggaggtggggtctcattcccccaacttcctcagggaggacccctgccctccgctgctcctctgtcctgctagccttcctccaggaagcacactgggtgcagataatcaggacattccagagatccccaatttaagagggtcatttccatctcaggggactcccggatgggtgtttccgctctcaatagcccctcttgttttaccaggaaagatccagttaaatcacccactgaggtgacagctcattagcggggagagagatggagcatcgagtgacactgggccatccaggcggctctgctcccaccagacaggagctaggcctcactggcaggggggctgcccacagccttttcaggggctcgcttggcgggtgacggggccgcagccaggccttctctccctgccccttggtgaccccgtggcttcctgtctgctggcctctcctgctacttatcacttcaccacgaactctctgcctgagactggggaagtaagcgggtatcttctcagtgagcataggttggggactgtgatcttgagaagccatgggccagcaatacctgcttttctgaagcccccaaggagggctctgacattctttttaaaaacaccacaaagcaaaattcccaggacatgtgtagttttgtttgttcagtatcccacaacttaaggctgggagatggaactcttggttaaggtcgatttttctgtctggcttctccgcaccttccacttgctctctggatcaggcagatataaactttctagcgcattttgagagagggctttcttgggtgagggagcatggcaaagtcggtttctctctggactgtttacacttcaaggcggtggatttagaggaatcctggctttcattttcaatgccagtctgagacatgttcccaagccggggctcttgttcacaccacttactctggccaccaacaacaacccaggccagacagagcatctctttttttttttttgagacagagtctctgtcgcccaggctggagcccagtggcgagatcttggctcactacaacctccacctcccgggttcaggcaattctcgtgcctaagcctcccgagtagctgcgactacaggcgccggccagcatgcctgtctaatttttgtattttagtagagacagggtttcaccatgttgcccaggctggtctcgaactcctgagctcaggcagtctacccacctcagcctcccaaagtgctgggattacaggcgtgagccaccgcgcccagccagaacatctgtttttacacccagagagcgcccctcgttaggacagaaccacggtgcccagagccaggaagccgccctcctggcgcccagcatctgagcttctacacgtgatgggcgggctcaggagaggacagggagtcgtggtggaagttccacagctggcygcktgggggggcccttgcaccrcactgccgcctcctgactgcccckatccccgcagcccctgtgccggattkcatttccctcctctctcccmgggtacctggccccagcactctcccatctgttcttcaggaaccgactcctctccagttgcaacaccagggagaaaggggcctccacatgcccaagtacccctgcaggatgaagggcaggccggcccttgatgtgccatttctgaataatagtcactgccgccgagtctaggatgtcctgttctaactcagccctgcctcggatgcaccaccgatctgtgcagagtgggtgtgggagtgtgggtgagggtcgaaatgccaaaggtctactttccagaatcaagtgccttctgcaaatcatgttggaaaagtccaaacctggagatgtccctgtgcctccgcccctacccaccccttttccttcagctgtgttaggaaggagaagttttcagaaccctctargctggtggctttcaaacttcagaccatgatctgcagcaagaaacgtgccttccatcataaatcagtccatttgtttacaactgtgttccaagcaggtttcataaagaaattcttamccttagaacctcggatatcctctatgttttagttttcatttttttaaaatgcttcttaaaattcactaaattgggctaggtgtggctcatgcctgtaatcccagcactatgggaggctgaggtgagaggatcacttgagcccagaaggttgaraccrgcctgggcaacatrgtgagaccccatctctacaaaaagttttaaaaccaggtatggtggtgccctcctgtggtcccagctactcgggagtctgaggtgggaggaycrcctgagcccaggagactgaggctgcagtrrggtgtgattgcactattgctctctagcctggaaaacagagtgagaccctatctcaaaaaaaaaaaaaaaaaaaaaggaaagagtgatgacaacagcccagggagcagccccgctcagaacccaagtcccaagttccagcactgtgttcccaggcaggctgtttgcctcttcctggtctggaagcccttgggtcctatggtggcggcagctcccacagtccaggttccctggtggggaccaatgattccatccgcatggaagcccacgtgtgcacttaggggcccataaatggcagaagggcccctcctttgggagaccttgtcagtcagcatctctagggcaaccgtgattgccatttgtagaggggaaggaatcaagggactttaagctagatcaaaatctggggacaaattctcctgctaactgcaagttaaaataggcccttcttactgaatttccctgtttgtttctctgcagacaatgctttagccctactcttgggcccccaagttagcagagtaatcaaagcttcctaccgtttggcctactattccagactagtccctcgaggggttcccttccaaaatatgcagggctcaggctcccaattccgggcctgtctgctttgcttgtgtttctcctgtccctgttctcccggagggcccaggtggaactcacgacagggagggagacgcttcccaaaaacctgcagggctatttcccagaatttggttttcaagtacaaaactttttgtcctgtaagatatatgcagcctcacagaagcagcctctgcctccactttaccagctacgtttttatcttaagcacatggggctcccttagaacttactccactgatttaaaaaaaaaaaactgcctggcagcatctcagtgtcagagtgagcacggcacaggaaaggcccgtggtgacgagggtgaggtggccacagtgaccggacgacaaatgagactctgcaaatgagactccagagggtgaagatctgcggtctccagacatcataggccatgtgacccactaggggccgcttacccctggccgtccgctggctgaactgaacgcattccctctctccgcaactctcccgtgaggctgcacccgtgtgggtagcactggaagcggcactgtttgcattgtacataggaaggaaggaagttcttccagcctcaccagcacctggcagcgagtcagagcctgtgagggcatccgaagcagtgatgcagtgtcaacctcccagctggtgccactctgccctcgggggctccaagcattgtaactcagtcatgggagctgcctctttggaagtgcagatttattcctgtaataatcctgcctgcttttacctctcgtccactgaccagcaagtgtgagtcccggtgtcagtcggcacagtccagtgtccatctgcatttgctcatgcagagggggtgagttgggcactccctgttgttggttttccttttgcagcacactgggcagtctccctataaaacaaaaaccccaccttctgtgccttctgctttagagcagagctccccctcccatttcctcagtcttccctgcaaaatctgtccaccggggaaggcagcaggaaccctgggcagcgggtgttctgggaaggctagtgacagcagatgtcatccaggaacagccacacacggttctccaggccgccgtcagcagctcaaggtggggtatgagtgagaagctgaggatctcgcagcttgttgctgagcaaggtgcaaccgggctcatgctgtcatcagcacaagacgggatggcaagggctttcagacgcatttccaagagtccagcaagccagggggaagatgatccctttgccgaagtgtaccctctagccaacttttgggagcgcttctgtttgcaaagcgctggggatgtgcctgtctctgtgtgacccacgaacgggaagggagagcactggagtaatgacacttctgctgctgctttgattctcaaggctgatctttaaaaccctcgccttgctgacaggtgctttaaaggcagtctgcatcttttcttcccttggtgtgggagaggtaaacactttgatttgctgaaagctgtatggagtatatttgaacagctagtagttagctttgaaagtggaagtgtgaacagacactacttgtgtcgctttgggtccttcactttacccccacagaagtctagaggcgtctgttataaagcgttacggggcgcctgcatgcaggaggaaggacctgtattagctggaaatcatcaggaacccagcttgcctccatctctctgagatgtgctgggtacagcctgcccctcctagttctgtccaccgggaagagccggctggcggcagatccccaggggcagagcccctgctggatcctgggagctcatctttacctgtgccggagtgggaactgtgattccagccgggcaggtcagagtggagcagtgctaagaggctgttgcaggagaactagacgggcggggcctgctgcatctggatcatgtttctgtgctctgccccgcgctagggactcagggtctgggcttctgccaggtgaggagcagagagactgttcccttgggtggagaggtgtgggcatgagagccacccattgccaagcagcaagaatgttcgtgcttttttccagagaggggaaccccactggtttttgtggaaacaatggaaacttacagatgcctgcctgggatgatgaggcacattcagaacaaatgcttttttttttttgagacagagtctcgctctgacgcccaggctggagtgcagtggcgcgatctcggctcactgcaaactttgcctcccaggttcaagtgattctcctacctcagcctcccgagtagctgggattacaccaccatgcccagcaaatttttgtgtttttagtagagacggagtttcaccatgttggccaggctggtctcgaactcctgacctcaggtgatccatccgccttggcctcccaaagtgctgggattacaggcgggagccaccatgcctggccagaacaaatgcctttttaaaccttttaagaacatttttaaaatgtctttttctatgtcaaatgtaacgtttatttttttaaacaataaaattgatttgccaaaatccgggctttaattctttatttggggcatgaggtgtaggggtttgtgggccccagcgtcatgctgtgtgtgttcttggaggaggggagggctgccgtgagtgagggccctgaaccgaggacagccgcgtgcctgttgcgagtgtaagtgtgtctgactgagcaagccagtgcattccgtttgcaagagggtctgtgggcctcatgggagagagagcagtgggcaggatgatctcatttcatagactcccaagcagtctaggaagagtcccccaaccttcccggcagcccactggaggggaaggagctcacccctgagtgggagatcgggaggggagggtctttgaggacaccagagcctgatgccttcatttgtcttctctcctgtcccttgcctgagtcctacctccaagctgtgtcacactcccaggaatgtaagtgttttggggaagtcaaataggatttcaggaccacttgaggtacagaagttagagatttgcaggttgtcaccaacagcatgcaggacccacacaggcttggtgacatcacaaggtggcaaaaggagcagcgcacacattcgaaataggtgagctctgggcagggaccccatggcagaggggacagagacgggtgagacatgcccagagcctgcaagggaagatgtcacgaaggccagaaaccagagctgcagtgaccgtccctgcctgtccctcagatgggaggcgcgcgggggatctgctgcttcccggggggtagcccagggcgtcccctccctgcttctctgtggtgatggctgctggttccacagtcctcacagaaacatggcggggcaggactgtgggacccagccagcgtctgtgagggctgcactggagggtcacctggtgtccagcccccgtttggggaccctcccatacatgtgttctggggagttccgatggcaggcatggggcgtgtgacccagtgctagccgatcaggacatccaatgcccacagccgcagcaatgggatctgggagggctcagggcccaaactggtcaaatcagagtgaccccgaggactcaggctgaagcggcaccatttctctggactcaggccttggtgagctgcagcagccatctcagcgccacggaggcctaaggacaaggctggcatggaggagaggagagccccaggatcccacttcgggggctgtctctgggacctgattccagtctcctgaagtcagcctgcgggcctcgtttctgggtgcctaaactaccttgtagcagcagaacttaatagatactggagctagtagctttgttatgtatttccggaagcccagcagaaaccccacactgacctaagtaagaaggtgattctcatgaaccaagaggacagatccttctgtttggggtcagggtttcagcagtccagtgtggcaacaccagttgggtggcccctgctgtgcagcatcagtttcttcttgcttaattggaactgttttcctgatagaccatagttttggagatgcagggacagatggaagggcaggaggggaagagttgcgcaaatcataaaagaagccgtggtgaagacaagctcaggagctgccagcctgagtccaccttctccagggtctcttacaagctctttacagacagccagagcccgggtggggtcagccagctgcccctcgccacccagctcccagcagaaggggaggggatgcggctccacccatgccctctcttacccccatcttcccactcacctgtcgggctgaggaccacgaaggcagagactccatacattctgctccttttcgtgtttctggcactttacacgccgccctgcagtgaatgtgtgagtgaatgaatgagtgaatggcaataaggaaagagagtggtcagcaaggcggctggaggggtggaggcctgagcgggtgtggggccagcggtgagcctggcacgtgtcatcctctctaggggagggagggtctaagcacatgggtctcctgtgcccagagtgggccagggcctaggggtgcaatggatgtggtccagccatggcaggccaccacgcttgttggcaccgtgggatagggccacgcagaagcagggcaaggtctgacccccgctcctgacagctcccactggctgctgatggagagcaaagccacggtcagcgcccactgctggacgctgcagcagggatggcagccaggggggcccccaacagcttagggctgctctgtccccctggagaggtctcactacagccctttcctttcccccgtccccactcactggctgcggaaacccagcctcatgagttctgtttgtctgaagaagcatcgttgggaggaaaaattatcaaactaagctcatgctatcagtcaggccctcctcctactccgtatgtctttatttttttactgaaaaaaataaaatacagtaagcactcggatgagaatattaatccatggagattgcccccttcagcattcactgtatgaggcctttttatatttgcttttttaaaagaaaaaaatatatatattttttgatggcaaaaacctggacacacatatttttgtaaaaatcacacatgcttgttacaaatgcattgaaacagtgcagaaaagtacacaaatgtgtgtaaagaaaatcactgtcgtccagccctccagaaacgaacaacagtaacaacgggtgcacatccttcaagacacggatgcaaatagaagattcaaaatatttcgtaaaaatgggatcctcctcttgatgctaattttaatcttaatacttaataaataatagtgcattaataattttactagaaactgaaggaatttcattccattcagaaatatattttgtcacacaatcaatatcatttcccaaaaggtctctttaacattagaag

SEQ ID NO: 94933 - DNA, 25739 bp, Homo sapiens
ggataaatgtcacatcctgtgagaaggtataagcagtcagtggccctggcaggggtgaggatgatataaacaaggcccaagggtctaggtggaccacattccagctctgggtggaaggaacaggaaggcagactttgcactgtctgcttggggggtggtgagtaccccatcaaagctgagccaagcccattgttgttgccatcttgctaggatctcagaccgtggtggaggaatcgctcacaaagatctggaccgggtcatggactaccacttcactactgctgaggccagcacacaggacccccggatcagccccctctttggccatctggacatgcatagtggcgcccagtcaggacccatgcacgggtgagaccctgccaggccaggatggaggggtgggggaccccaggagactcaagcctctgaagcctcctgtcctgtccccctgcccacccccagctttggcttcgggttgcccacgtcacgggcctacgcggagtacctcggtgggtctctgcagctgcagtccctgcagggcattggcacggacgtctacctgcggctccgccacatcgatggccgggaggaaagcttccggatctgaccccacagcctttggcctgctcacccgaccagcctgggccgcattccctgcaggacctcccgggtcaggcagggcggccccctgctccacacactgctgcatcttgggtctcagggacccagacagatggacttacatggagctgggcactgccctgcctcaacagggtccattgcctcctcgcctccagaacttggagcagggaagtgggcaccctgaggcctccagcaccagttccgtcattctcgttcctggggaacccccactctgacctgttattaaagttcacattttgaatgccctctcgggccccgtgtgtggggagggcaggtgaacttttgtttctgcccccattcaggttcactgagcccttgggttgaactggttcgtgtcccagtctcttacctgccctgagagcctggcaggccaggagtagaatgggtcccaagtctgttgcatgtttgatttggtgggagtgggatgactgcagcaccttatacaaagagctttcattcatcttgttgaacaaatgtttccgggtcccagataatattgaaggcccagactgacccagcttcgggcatcagttttgactcttcctttcctggcagtcacagtttctagaggtgaaggtcaccagactgggcaaactcctgagccaactgcttcccaagcctgagtaggttaaaaatactgtgtctgctgctgccaaggaaaagaacatacaaggttgtgccttggcaggccctagcagggactgggtgccccactgcaaggaaaggtggggccctgatagaaaggaccaaggatttgggcaaaggtatcaggtaggctcaaggttagacctgaatcagaactccagatgacatcttaggtaggaacaccctacccaccttgccagggaagaaaggcctaagggcggcctggtggggctgggaggagaactggaaagttctcttgccttcacatgtgagctcccacagcaaacttcctgaggctggctctaggcctgtaccatctcctacccttcacggggatggaggggaagttgtatgtggaagccaaatggcaggggctaggaaaccacagtgacttgctagactgaaaaatcccgccagctgcaaggcagggtgctgaggctggagaggcaggcagcagtcagaggccagggccctgaaacatgggatttatcttgagccatagggatccatgggtgagtttttatttatttagaaatggggtcttgctctgttgcccaggctggaatatggtggctgcagagttcactgcagccttgaactcctgggatcaagagattctcccacctcagccttctgagtagcttggaccatcatgccaggctaaattttaaaattttttgtagaaacagggtttctacaaagccctatgttgccccgggctggacttgaacttctgggctcaaatgatccttccaccccagcctcccaaagtggtggggttacaggcatgagccactgcagctggcccatgagtgggttttgagctgggaagggatgtttctggttggagtccctgagaggattcatgtccacgtgatttcttaagaaagtgctcccagaacagagtaggggaagtaggaaggggaaggggaggaagccaagcaaggatgtgacctcaggcaaaagcccagaaccagtcaattatgcctcagggttgaaggtaagagagctaaacctcagagttactgattaatttctccacttggcagtcactggttaaagtcagttgggaaagtgaacagctctattaacctaaggatggttttttaagaagagcctcaggtgctggtgtgggtctttgaaagcacatcaaaggtaatctgggcacacagaaacagcaagaactcccagaggatctgggtggagcacctacattgtttttttgtttgttttgtttcgttttgtttttttaaacggagtctcaatctgttgctcaggctggagtgcagtggctggatcttcgctcactgcaacctccgccccacccccccccaaccccaggttcaagcgattctcctgcctcagcctcccgagtagctgggattacaggcgcgtgccaccacacccagctaatttttctatttttagtagagatggggtttcaccacgttggccaggctggtctcgaactcccaacctcgtgatccatccacctcagcctcccaaagtgccaggattacaggcatgagccaccatgcctgtcggatgtttcttgatttgtaacctctgagagacccatccgcaggccctgagcattccactcctctcagaattgtttccaagcccaataaccacattataaatcaaacaagattcagagaatagccaaagggaatgtttactgagtacctacccggtctggcactttgcaatacacttgtatattgctaagacggatagttcaaccgttacatagttatatgattgatagttatacatgcttaactgctggggattggttccaggaccgcctgtgaataccgaaatctgcaggcgctcaagtcctacagttggccctgccaaacagcagatatgaagtcagctcttcagatctgtgggttctgcatccttacaatatttcctttcctttccttttcttttcctcccttcctccctcttttttctttttcttttttgagatggagtcttgttgtgtcggccaggttggagtgcagtggcgcgatctcggctcactgcaacctccacctcctgggttcaagcagttctcctgcctcagcctcccaagtagctgggattacaggcacacgccaccacccctgactgttttgtattttcagtagagacggggtttcacaatgtgggccaagctggttttgaactcctgacctcaagtaatccacctgcttcggcctcccaaagtgctgggattacaggtgtgagccaccgcgcccagtcttttttttttttttttttgaggcagagtttcactcttgttgcccaggctggagtgcaatggcacaatctcagctcaccacaacctctgcctcccaggttcaagcggttctcctgcctcagcctcccgagtagctgggattacaggcatgcggccaccacgcctggctaattttgtatttttagtagagatggggtttctccatgttggtcaggctggtctcgaactcccgacctcaggtgatctgcctgcctcggcctcccaaagtggtgggattacaggagtgagccactgcgcccagcctccttttctttcccccctttttttttgagacagggtctctgtcacccaagctggagtgcagtggagggattatagctcactcagcctcgacctcctgggtttaagcgatccctctgcctcagcctcctgagtaggtgggactacaggtgcgggccccgaggcccagctaatttttttttcccccaaatttttagtagaaaggaggtctctatgctgcccaggctggtcttgaactcctggcctgaagcgatcctcctgcttggattcctgaagtgcgagattacaggtgtgagccaccatacctcaacactgtattttcaacccgctcttcgttcaatctccaaaggtgggacatgcggatatggagggccgattgtatatggttggaccatacacatataaatggctttaacctttactgactctcacagaaccctcagtgcagtggcgtgatctcagctcactgcaagctccacctcccgggttcacaccattctcctgcctcagcctcccgagtagctgggactacaggggcccgccaccacgcccggctaattgttttgtatttttttttagtagagacggagtttcatcgtgttagccagaatagtctcgatcttctgacctcgtgatccacccgcctaggcctcccaaagtgctgggattacaggcgtgaaccaccgcacccggcctttttattttttttgagatggagtctggctcttggtccccaggctggagtgcaatggcgggatctcggctcactgcaacctccgcctcccgggttcaagcgattctcctgcctcagcctcccgagtagctgggactacaggtgcgtgccaccacgcccggctaaattttgtatttttagtagagacggagtttcacggtgttagccaggatggtctcgatctccgcccgcctcggcctctcaaagtgctgagattacaggcgtgagccaccacgccccgcccaactcgtcctttctttagactttatcctgtgagggtgaattatggcctgtccctggacacacccgttctgctttccccgcaccaactgtatcccaaataggggaagtagtctcttcaaccttcaaaaatggggcactggctgggcacggtggctcacgcctgtaaccctagcactttgggaggccgaggcgggcggatcacctgaggtcaggagttcgagaccagcctggccaacagggtgaagccctctctctactaaaaatacaaaaaatagccgggcgtggtggcgcgcgattgtaatcccagctattcaggaggctgaggcaggagaatcgcttgaacccgggaggcggaggctgcagtgagccgagatcgcgtcactgcactccagcctgggcgacagagcgagactccatctcaaaaaaaaaaaaggggggggggcggggagcgacattaggccagcgcgagtgtgcggctccaggccaccagggcggccgctctggctctgccctgttaaagtgggggcagcgcccgctgaaaattggcacatcttggcttccgcaggtaccagggcctttaaaaaggttcagctggccgggcacggtggctcacgcctataatcccagcactttgggaggttgaggctggcagatcacgaggtcaagagatcaagactatcctggacaacatggtgaaaccccgtctctactaaaaatacaaaaattagatgggcgtggtggcgcgcgcctgcagtcccagctacccgggaggctgaggcagaggaatcgcttgaacccggaggcggaggttgcagtgagccgagatcgcgcctctgcactccagcctgggagacagagcatgattccgtctcaaaataaataaataaataaataaataaataaattaaaaaaaggttgagttgagtcatcgcatgaggtaagtctgtctcctctcctcacccataggctgcagccacaggtccgcacggaaaaccaggagctccaagactgccgcacactcaacatccaactcgcggggccgcggggacggccacagaagccaatcggctcctgctacatcacagaccccgccctcaaaccttgaggagcccgccccacgcactgctgacccggagccaaaagaactgcgtggcgtccgattctggcgtcacttcccttcccgcgatggcggcacagggagctgctgcggcggttgcggcggggacttcaggggtcgcgggggagggcgagcccgggcccggggagaatgcggccgctgaggggaccgccccatccccgggccgcgtctctccgccgaccccggcgcgcggcgagccggaagtcacggtggagatcggagaaacgtacctgtgccggcgaccggatagcacctggcgtgagggcggggcccagggctgggggcggggcggagctcagggccagggggtggggcggggcctgaggacaggctgtcagtgaggccaagatccgggggctgggagtggagaggaggaggggcggggcttgaggaaagaacgccgcgttccgggcgctgagaaaccagccgggttgtgggaggctgttgaccttgaattatgccgagcgacgcctacaaacccaccgctcaggccttcaccaggattgttcccattccacttccttgcccagtcttaggcttcattcctttttcttgctaacgctgcttcctcaccctctcttgtctctgcgtcttctttttccatttgtccctggcagccatccgcagagagaagaccttccagaaacaacaggcttccctttcctaaagttctgctgccttctctcattttcaaaattaaccccaaactccttagggtggcattcatttttgtgacctctccagtttctagccaacactaggaaagggcattgccaggccagaacacactgtgccctctgaagaccacacgccctttaccacctgtgccctttgcttggaatgctttttcttccctttctccttgtttgcctgcctagctcctactcatcctcttagcttcatatcctttgtgatgtcatccttgattccccttcaggcraagtgagtggttcccttctctatgttcctgcaacatttttttcctayctcagtcatagtttttgtaacattatgttgtaattttctctctctgtcttcctccatcatactgggaacttctggagggcagcacttcttgtgattcatcactgtgtcctctgtacccggcaacaacacagcatagggccagacacgtagtggttgccttactcatttattgaatgctctgctaattgtcaggtgcgctgctaaaaattttggaggcattaattcaccttctaaggttggtactattatcccttttgtctttttttttttttttttttttgagacaggatctcgctctgtcacccaggtgggattgccgtggcacgatgacagctcactgaagcctagaccttctaggctcaagtgatcctcccacctcaccctctcagagtgttgggattactggcatgagccactgtgcccagctgttatcccttttcacagatgaagagactgaggctcagaaagatggaataacttgctcagttacacatagctaggaagtagggagctggaattttgtgtatttttttttgtttgtttgtttgagatggaatcgctctctgttgccaggctggagtgcagtggcgccatcttggctcactgcgatctctgcctcccggattcaagcgattctcctgcctcaacctcctgagtagctgggactacagttgtgcgccaccacacccagctaatttttgtatttttagtagagacgaagtttcaccatgttggccaggatggttttgacctcttaacctcgtgattcacccacctcggcctcccaaagtgctgggattacaggcgtgagccacgatgcccagccctggaattatacattaatgtaggttatcttaatccagagccagcactcatgatccctgaacaaatgaacaactgcgggtatgtggtaaaatgagcattgaatttagagtcagacttaaattcagttaagtattagctcttaycacttttcaaatctgtgaccctaggtaagcctcagttttgttctgttttttggggttcttttttttgagacagagtcttgctcttgtcacccaggccacagtgcagtggtacaatctcggctcactgcaacctctgcctcccgggttcaagcaattctcctgcctcagccttgcctcccaggttcaagcaattttcctgcctcagcctccygagtagttgggattacaggtgtgtgccaccatgcctggcttttttttttttcrtctttttggtacagatggggttttgccatgttgaccaggctggtctcaaactcctggcctcaagtgatctgcccatctcggcctccagaagtactgggattacaggtgtgagccacacacccagccagttattttctcattcgtaaaatgagaataacagccccaacctgatccacctcacagttgtggcagtgattgagtagaatggcagaggtggaccagtgaggttagctgatgtgtggccctgaactctggaaactgcttctcagtgtgcaggattccttttgttccagccttaccttcctgatgaccctagcctttttccatcacagattctgctgaagtgatccagtctcgagtgaacgaccaggagggccgagaggaattctatgtacactacgtgggctgtgagtggcttggcacatctgggcgtgggtgcrgggagttggctgccctggcagcactcttatggcccatacttacagttaaccggcggctggacgagtgggtagacaagaaccggctggcgctgaccaagacagtgaaggatgctgtacagaagaactcagagaagtacctgagcgagctcgcagagcagcctgagcgcaagatcactcgcaaccaaaagcgcaagcatgatgagatcaaccatgtgcagaaggtccggatcccttcccatccaygggcccaggaggcccagcttctctgccagttcccttgggtctctcgggccccagtgccaaaaccatagcaaatcccatttcttaagctcctgtagtgtgtcagggactttacctacttcctcttacttacttttcataggtaagaaaacagacagagggtaagggcttcgctgcagtctcacagcaaggaaatggcacagctgggactagaactcaggcctccggcactggtagcctcttttgtctcctagtagctgtgtcttagtagaaaaaatgacttgaagttcagtgggaaagacgagaatgttattcggcagttgctatagccaagcaccctgccaagtgctgtatatgtataagctcctcaaatccttcccaacaattcaacacacrggaatagttacttttttggtaggtgaggaagcaggctgagagagattaagtaacatgcccaaggtcacacagccagtaaaacggtgggctggaattagaataataatgccaaacacttgttagccggtgagcagaagtattcagctaaatggtttttgtgtgtgtgtgtgtgtgtgtgtgtgtgtgtgttttgttttttgtttttttttttgagacggagtcttgctctgtcgcccaggttggagtacagtggaatgatctcggctcactgtaaactccgccacctgggttcaagcaattttcctgtctcagcctcccaagtagctaggactacaggtacctgccaccacgcccggataatttttgtatttttagtagagacgaggtttcgccatattggtcaggctggtctcgaactcctgacctcaggtgatctgcccacctcggcctcccaaagtgctgggattacaggcgtgagctactgcgcccggcctaagctaagtgttttaatacatgacctcactgacatttcacagtaggcctgtgaagtaagcatgcagaagagctacagataagtttagggacccagacaggaatttgatcaaccagctaaattgtgctacctcagagccagaggccttagcaatgattttggtttttttcttaagagacgggagtcttggtgtgttgctcaggctggacttgaactcctgggctcaaatgttcttcctgccttagccttctaagtagctgggactacaggagtgcatccctgtacctgccttggttttttcttgtattgatacataataattgtacatattattgttattttttttttttgagacagcgtcttactctrtcgtctaggctgagtgcagtggcacaatcatggctcacttcagcctcaacctcctgggctcaagcaatcctcctgcctcagcctcctgagtagctgggaccataggcacgtgccaccatgcccagctaattttttatttttttgtagagacgggatctgctatgttgcccacactagtctcaaactcctggtctcaagcgatcctcctgccttagcctcccaaagtgctgggattacaggtgtgagccactgcgcccgaccaagtctcagtttctaaatttataaaaatcaggagtgcaaaccagagcaagatttgtcaaagtctccagacacccagayatttgttactttcagctattgcagcttcatccttctgagtacatgagttagtgggcaagcccaacatttaaatttctttaaatggaagaaagaaagtggataagatagaaaaatcagggtgttgcactttattaagtgtaggtattgttttgagaagcttttatttcacacccaataaaagtgtgcaggattcctcttgttccagccttaccttcccgatgatcctagcacatacttgtgtgtatatacagacatgttacagtgccaagtgtacttcctactgtggtgtgatttaaaaaattgaaataccctaaactggaagaactcctcaaggtctaaactgccgaatcgaacttcctattgtaatggaaatgttctatagctgtactrtctagtaccgtagccactagccacatgtagctgttgagcacttgaaatgtgtctagtgtgacgaagaattaagaattttagctgggcgcggtggcttacgcctgtaatcccagcactttgggaggccaaggtgggtggatcaccaggtcagaagatcgagaccatcccggctaacatggtgaaaccccatctctactgaaaaatacaaaataattagccgggcgtggtggcgtgcacctgtagtcccagctactcgggaggctgaggtaggagaatggcgtgaacccgggaggtggagcttgtagtgagccgagatcctgggctcactccagcctgggtgacagagtgagactccgtctcaaaaaaaaaaaaatttttaaattatgggtgcagtggctcacgcctgtaatcccaacactttgggaggcggaggtgggtggatcacttaaggtcaggggattgagaccagcctggccaacatggccaaaaccccatctctactaaaaatacaaaaattagccgggcgtggtggtgcacacctgtaatcccggctacttaggaggctgaggcaggagaatcgcttgagcccaggagatggaggttgcagtcagccaagatcatgccactgcactccatccagcctgggtgtccgatcaagactgtctcaaaaaaaaattaattatcattttttaaaaaaattttatttttattttttcgagacagagtctcactctgttaaccaggctggagtgcagtggtgcgatctcagctcactgcaacctccgcctcccagattcaagtgagtttcctgccgcagcctcccaagtagctgggactacaggcrcgcaccatcatgcctggctaatttttgtatttttagtagagatagggtttcactatgtttggcctcaaactcctgacctcaactgatccgcctgcctcggcctcccaaagtgctgggattacaggtgtgagccaccgtgcccagccaaaattttcattttttgagacagagtctcactctgtcacctaggcgggagtacagtggcgagctcttgggttactgcaacctccgccttcctggcttaagcaatttttgtgcctcagcctcccaagtatctgagattacaggcgtgtgccaccacacccagctattttttattttttrtttttagtagagatggggtttcgccatgttggccagactggtctggaactcctggcctcaagtggtcctcccacctcggcctctcarrgtgctgggattacaggcgtgagccaccacgtttagctgagtataattttaaatagccctatgtgacaagtggctactttattggacagtgtagatctaagattaattcctcaactgttttgcactcaacaaagacatacctctgagttggcaaccagcagggtggataacgggccagtggtgataaaatcaaagaataggtaatgaaacaatcatccagttaacaatcagcaaggttcttcagagcctaattaatgtttaattctaaataaattgcaacaattaagaaaagtagtgtttttgtagttctttattgcatttgcagaagagtactgtattttgtgagaattgggaaatgtgttttaaagagatgtgtgaggaggaaaatctttcttcctcatctttacagtggttaggttcagaattggacagaccaggggcccatgcccaactctgctgagtaccagttctgtgaccttgggcaagtgacctcacctctttgtgcctcagttttctctcatacaacagggacaatgagcactcttatttcaaaggctcattgtgaggaacaaaatgaaataatgtcggctgggtgcagtggctcatgcctgtaatcccagcactctgggaagctgagatgattggatcatttgaggtcaggagttcgagatcagcctggccaatatggtgaaagcccgtctctactaaaaatacaaaaagaggccaggcgcaggcagaccacgaggtcaggagttggaggccagcatggccaacatggtgaaaccctgtctttactaaagatacaaaaaattagctgggtgtgatggtgcacacctgtaatcccagctacttgggaggctggggcaggagaatcgcttgaacccaggaggcgaggttgcagtgacgtgagattttgccattgcactccagcctgggcgacagggcgaggctccatttcaaaaaaaaaaaaaaaaagaaaaaaggctatggctcaygcctgtaatcccagcactttgagaggccaaggtgggtggatcatctgaaggtcagaagttcaagaccagcctggccaacatggtgaaaccccatctctaccaaaaatacaaaaaattagccgggcttgctggtgggcgcctgtaatcccagctgcttgggacactgaggtgggaagatcgcttgaactcaggaggtggaggttgtagtgagccaagattgcaccattgctccagcctgggcaacaagagcaaaatttcatctcaaaaaacaaaataaattagctgggaatggtagcaggcacatgtagtctcagccacttgggaggctgacgtaggagaatcacttaagcccagaaggcagaggttgtggtgagctgagatctccccactgcactccagcctgggcgacagagtgagagtctatctcagaagaaaaaaaaaaaaacatgtctgtgccgtgcttgccacttggaataaatggcagctcactagtccccgagggtaagggacctcaccttgccctgcctgtttactactctgtaaaattgaaataacgcagctgggtgcagtggctcacgcctgtaatctcagcactttgggagtgcgaggctggttgatcacctgaggtcaggagtttgagaacagcctggccaacatggcgaaactccattgctactaaacatacaaaaattacctggatgtggcggcatgtgcctgtagtcccagctacttgggaggctgaggcaggagaattgcttgaacctgggaggcggaggttgcagtgagccgagatggtgccactgtactccagcctgagcaacagagtgagactccgtctcaaaaaaaaaaaaaaaaaaaaaagaaataacactctatgtaagggttactgaaaggattaaatgaggccatataaacatataggcacagtgctttgtggagggggttctgggtaaagcactggctccttcctcccttctcagctacagggcagggccttgtctgccctggtgtaggtcatggaccgtcttgggtcccccttccattgtcaggctgtactgggttcctcccacagggtctggcctaggagcaggatgtgttgtgagtgtggtgtgactcttagtctctgctttctaaggacttgaaaaatagaggaacccaggtgggcatacttggacagtgttgccctgttgaccacttctcgctgaacttgggaaggagggaatgttttctggatgggaagaatccagtcaggcctcctggagggggtggtaagaatctcaagccttgaaggatgggaaagagcacaataacaacagtgacaaaggatagatcacaaagcatcatggactcacctgactcatgctccgtgccaggctgaggaagtgttttctgctggcagtgagagaaggaagggcattctccaggtagaaggagctgtttgtgcagaagcatgaaggccgctaaaagggggctgctgatagcaatgaggaggctggggctggaggcagggagtctgaggcggcctagtaaattgtccagacctgagatggggccatgactacctggagcaggacagagaggagaattccagagagggcccaattccagagatgtcagaagtagactygacatccactgtattaggacttggccaggccgagggagagagagtagtctgaggcaagcctagttatgggtcttggacactgggaccaagggtgatgttcccagtaaaatgagcaacccaggaggaggcgcaggtttgcagggaggagtgatgaggtcctttctgcacatcttgagtccgctgtccctgtgggagggacctctggggcagtcgcatgggcaggcagggtctggtcctcaggaaaggggtccaggaacatcggggaggtagtaacagttcttacgctgggcctggaaggcaaatctgttatttcatttgagtctcacaactttggcagagctggattgccccccatcgtgcagctgaagccccatcctgatcctaaccctgttcatctggcaaaaggtccaaacttggacatcagggatgtctgggatatcgggggtggggcgggtgggtgtgagaggagtctggaccagccagcttcagaaccaagtcagataggttagctattggtgtggttattattgccatccaggaatgaggtctggtagacggcagggaagccttgtgggtcctgacgggagggacrgcctggtcaccacttctgttcacctctgcccacttttctttcctggcccagacttatgcagagatggaccccaccacagcagccttggagaaggagcatgaggcggtaagtggggctgggaagctgcctgcaggtcccccrtctccccttgccgaggagcccctgctgagccgtgcactgtgcctcactcccaccctgcctgcagatcaccaaggtgaagtatgtggacaagatccacatcgggaactacgaaattgatgcctggtatttctcaccattccccgaagactatgggaaacagcccaagctctggctctgcgagtactgcctcaagtacatgaaatatgagaagagctaccgcttccacttggtgaggctgggccggccgggccgagctgggcaggggcccggtgagaggcagaggcaggcatggagactgagggcggctgcgccggcagctccagggaggagacaggcccaaaggagcgagtacagggaagagctgctgggggtcaggaggcctggattccaggcctggctttgctgttgctggcagggtgaccttgccaacttcagacctcagctcctcttctctggaatggggacagtaactcacccccttcaggtcttttgccaaggccagctccatcccaggaagcacacatagcccctggcagtgggaccttaagtgtggatgaaattgggggctgtcaggaaggggcgctctcatcactgacacagtgggctgcttcccgaagtgtggaatctgaagcgaataggtgtggtttagggaagccattgtcatggacgggtccctccagagccaggcccacagagactcaaaaccccaccgtgctgtgtgatgtttggatctctgtgcctgggccttggtctgtaaaagcaggatcactttcctaaggctgctgggaggattactcgatgtaggtgaagtgttgrggggggaaacagagaggcagagacttgctccaaagcatgcagtggtgggttgggtgcctcctagcagagaacatatgggcagcgaacctgttctcttgtccccgaccagggtcagtgccagtggcggcagccccccgggaaagagatctaccgcaagagcaacatctccgtgtacgaagttgatggcaaagaccataaggtgagtgggtggccaggggttgggagaggccggggaggccctgggcacctcccagatgatcctcatcaccaccaaaggggagggggcagccttagctgagcctctatgggcagaatgcctctgaggggccgggcactgcagctcacacctgtaatcctagcacttttggaggctgaggtgggcagattgcctgagctcaggagtttgagagcagcctgggtaacatgacgaaactcctcgactaaaaatacaaaaaattagctggcgtggtggtgcgcacctgtaatcccagctactcgggaggctgaggcacaagaattgcttgaacctgggaggcagaggttgcagtgagctgagattgtgccactgtactccagcctggtcgtcagattgagaatctgtctcaaaaaaaaaaaagaaggcctctgagggcctcctagcctggcactaggcctgtagttggtgcataggaaacacagggccttgtggtggccccaagactcttctgctggtggggttaggttcaaacttgggttgttctggaacccagaggagattttcttgcctgaggctgcttttagaagtgctctctccttccgttggaaagaaaggtgtttgtttttgcctgggaggggactgctttgtgtgaaatttcctcctgagagagctctgtggctttcaaggtttgagttccttgttcctggccccgaatgacttcagcagggcaggttggggcctttgggacctgcctagctgttgtagagaacttggcctttgccttatcagtctgggagggtctggccaagtgtactggtttcccgcagatgggccatacagcacaggacagagagggcaggcttcagggtggctcatgttgccttgtcacttcctcactgaccacagacaagttacttaacatggtttgttcctgtttccttgtccataagacgggagtcataatatttaatatttacctagttgtgttgttagtggaataaatgagacagcaaatgtcaagtgtttagtgcagtgcttagcactagtatgtgcttaataaacacgggccttgttattatcggtgacctcttggggcttgattagccttggactcggagaatacgcaggctgagcccagcccttgcccctgctctgccttcctgagcatggctgtgtggaatagcagaagggcccccgctggagatgtgggggtgctttccaactgcgctctgccagctttgaggctctgggcaagcacttccactctgggagcttcagcttcctcctgagtaagatgggcctggcagtgctgggctcgcacagctgccgggttggatgagakagtggctgtggtgtcataaaccagggagccccttagtgtgtgccgtgaagccaaactcggtcccattgtccccctcctggagtgcagccaagtggacagacagggctcgaggttcctccattcagcagacgtttaccaggcacccagcttcatacttagactcgtgctaggcgctggggacacagccatgaacaggacggtctaaattcctgcctcggagcctcagtttcacgagctgaaacagagttaatgtctgtgaagactgaagcagatcctgcatggaaggcacccagctcgtatttggcactcagaaggggtggccgggcttcatccagctccactggcacctccgaagtgctgttgctctctcatttccagttccctgttcgtcagaggctgaccgaagactccttccagtgtgaaatccttctggcctggcgaggcgcccacttcgcgtgggctggtgccggccgctggaaccagctgggtggggcctgtgcctgccccctgagcctgtctcccccctcctcaaccctagatttactgtcagaacctgtgtctgctggccaagcttttcctggaccataagacactgtactttgacgtggagccgttcgtcttttacatcctgactgaggtggaccggcagggggcccacattgttggctacttctccaaggtgctgggtctggaaactcggggtggggagggtggggagggcgaaggtgggcatgaacagagagtggggcagagcctccccagcggccctgagcacctgcctcctgcaggagaaggagtccccggatggaaacaatgtggcctgcatcctgaccttgcccccctaccaacgccgcggctacgggaagttcctcatcgctttcagtgagtggttcctggcctgtctgggagggggagacctgtggggcaggggtgccagggcaggctggatcctaagttcctctttctactgctgccaggttatgagctctccaagctggagagcacagtcggctccccggagaagccrctgtctgacctgggcaagctcagctaccgcagctactggtcctgggtgctgctrgagatcctgcggracttccggggcacactgtccatcaaggacckcaggtgagggggcctcccgggccctgggggcagracttgccctgagatgggccacgatcctgcttcctyataccctgtcaccatcctggccagatcccacaagggcaccaggtctggcatttgctctcatccctttttgcagccagatgaccagtatcacccaaaatgacatcatcagtaccctgcaatccctcaatatggtcaagtactggaagggccagcacgtgatctgtgtcacacccaagctggtggaggagcacctcaaaagtgcccagtataagaaaccacccatcacaggtgggtggggggctgctgtgtgtcgggggcggtgggggagtgtcagtatatggactggtaggagtcaaggcctccttattgctgtcacatgatcccaaaccagtcagaccagctcccaggatggagcccggggcaggcctctcattcctgggcttccctrcccctccccagcacagcctgcccttttgttytcacctggaggaggtgaaactggcctgagcccagaggagggcagccaggtgtgagctggcctggcccaggcccagccctgcctccckccccttctccccacagtggactccgtytgcctcaagtgggcaccccccaagcacaagcaagtcaagctctccaagaagtgagcagcctggcccctgctgtcggacctgagcctcctggctcccagcctgtaaatatgtatagacctgttttgtcatttttttaataaagtcagttctggtggccctggactttggaggggaaggggaggccaagagcggatgttcttcatttcacttcacacatgcacggcaagttgtgctcaaacattttaatcatttctgccctgttactcccaccccagatccaagcgccagcccagttccggtgggggctcagtcctccggagtccaggagtcagggctcgggggcgctcagcggccagtgggcaagattggggcctttcctgtcctcgaagctgcacaaaggtggccccagcccagaacacagggagagggcagagagatgtgctcatcagtctgggcaggcgggccgggagcagtcttccagaaacaggtgggagccagggctcattttcatagccaagggtcccaggagctccccaggagctcggccaatgggctggtccatggtgggtgaggggccagaggctctggccattgctacaggcagtaaaactcctgactctcagtgatggtcccaaaaagcacacccagaagaatgggctcaaagatcaagatggggccccagcctcccgcagagtcctgaaggaaggagtggctcaagtcaggccctgggtccaaaggccatcagggaaggaccaggctcctgtccttgagtgtgatgcatccatcctggaagtagggccagctcagtgctcgctgagccatggggagaggaggcccagagccaggcccagaggcaggaaaaggatgggcctcagcaagccctgggctggggcagagctgaaggccaggtggctgccacagaggttgctgtcgggctgggactcctgggtttggggcaccacacgaggctggagttctgtcaccttgctttggatccaggaggcatagctggaggccagagtgtacacaccaggcctgttgcgggccccacaggcatctccccagctcacaatgcccgtcaggtaccagagaccctccacagggcaggagagtgggcccccagagtcaccctgaggagagaagccacacagcagccatcaggaccgggccaggcctcctttccgaagttgcactggtcatctgccccccgggcctgtgcttacctggcaggcgtccttgcccccctccacatagccagcacacaccatgtcctcttggacaaagtgcggctcctcaggcttggcgtcgatgttgtacaggcagttacacgtctcacgactgatcagaggcacctcgagttgctgcagtggcttgggcgtcaggaggctcactgtgggggtaaaagaggcttaccctgggcccctccccaagtcaggtgcccctccacacctctaggcacccagcgtyccacctcacctgagggggccacatgaccccagccagtgacagtgcagtggaggccgttggggaaggaggcgttggctgcagggaggcagatgggccggatgtagcgggagaaggtgatgggtctgctgagttggaggagtgcaatgtcgccctgggagccctcctggaggtagctggggtgggggatgatgtccttcagggtgctgaccttggcgtcctcggagtaggagtctagctggtgggcccccagcttgacctcataggcttccttgtggtgctcgctgcaggcagggggcaaaggctgagacccaggagacctctccttgttccccaacccccactgccaacccctgattccgatcagccccttttaggtctcaaattgcaccttagttttatcatgtaacctctgacccctcaccttcactcctaactggtccttccagacttagaactgacactctcagacccaacccaagaaccccaacctctgacctggattgacccattaactttgacctccagcccacttttgactttcaccatttggtacctggggaagcagtgagcagctgacagcacccactgctcagacacgagagagccaccacacacatggacgccttcataggtgatgctgacctgccagggccactgaccggcgactgcactgctgccacctgtgatgcgtgcttggggggccacaccgcagggagctgcycagggaggaagggaaggggtcaggttgttagcctggccactcctatgcagcccaggagctctgatatagagcttgggaagtgggttcacaggagtcaacacccctttgtcccctcccaggcatgggcagttgtgccccttctgtccactacccattacctaattcaggtctcatggcagcttctctccttgcaagccttccatccatcccgccccttacaagtctgaagattttcataaacccccaatctgaccaggccacagccctgcttaaacccttcttggctccacgcggtccttaagatacattccagacagaccatggcaccgccatcggacccagccgtcccctctggacccttcagttgtgtacatcaggccacacacttgtttacccgggaccttggctgatccaggtcactctacctggtatgcccttccccatccttactgtctggcaaacttccctttgcctgtggatgcttgattggaacagcagcccctccgtagacaggcgggcttctgctggctgagttgggcattgcctccgagcccagcaccccccaacctccaccatgctccccgatgctgcccagtctcacaattgttccggagtccacaactgtgtctgtttccaccacaccaatctgggcattccctaggggcagattctcatgtctgcagtgcctgtggcgtcgtggacatatattcaacaaaccaacagcagaactgggctcctgtgatgtgaatgtctagtttccaggacagccccagccccacccccattgaggccactttggagtggagcccaactgctcttcacaaagtcatctaggagcagagaaaattgcagaccagatctttctctcccttatcatcatgacaatagccactatttagagagcctagcggctgtgccaggccctggaggggctttcgcttcctcatctccctgcatcctctccacagccccaggagacggacatgaccagcttcattttagaggtgaggagtctaaggcttagagaagtggggggacttggccaatgacacacagccagtgcatggggaagccaggattgaaagccggtctgactcagagctgggttgggtgccttccaagaaaggagacccttggtttggttccctcaaaaccacctccaggacgggaacggtggctcacacctgtaatcccagcactttgagaggccaaggcaggaggatcgcttgagcccaggagttcaagacctgcccggccaacatagtgagacccacatctctaccaaacaaaaacaaaaacaaaaacaaaacacaactagctgggtgtgatggcatgcacctgtagtcccagccactagggaggctgaggtggggaggtgggaggatcacgtgagcccgggaggctggatcactgagactgcagtgagctgcgatcgggccactgcactccagcctgggtgacgacagacccagaccctgtttcaaaagacaaaaaccaaaccaaaaaaaccacctcgattgccccactttgggagtcagacgtggatctgaatcccagctgcaccttcactggcagtgtgccctgggcaagtccctgcttctctgcccataaggtgagggctaaaaccccccactctgggagccctaagagaatctagttggaaggcagcccagctgaaggccaggcactggttaaaccccaggggaatccgatccaagtcacctccccctcccctcctccctctccgaggaaagtctcaccttctgccccttccgctcctagaaagaaagagaaagaggaggggtgagtagggaagactcgggttccctgaccccttagtacccaccactgctccagagggctggccccttccctgacagagccaaggtgggaaagagaggccaagagctagggaggccgggggttttcttgggccccagacaagggcacaccccagaaaatgatcacgccggctccctccagtgcattgtccccaccctgcccccacgtcctcacttacctgtccccgaccggagtaatccaagatagagcagaatggccacagcccccagctgcccaggccccaggacccccttctgggccatggcccaggacaagggcccctggggcagactccaggcacgcaaggtaggaagccttggggtggtgtcgaaggcaggacccagatgttggctcagagggaaggatcccagaatccgggctggaaaggggcagcaagtgtccaaggctggcctctaaggcagggagcggccgcaacgggagacgcctggagtatccgaagcgagcagtgtggacgagtcaccagcaccgtctggccacgcagggtcctcccaggagtggctgcacctacctgcccgcccctcccctggccccgcccactggctgggctccgccagctcctcttgccaccaaagtcatgagtcctttcagagctgcaggcccgtgtgtgtgcatgtatgtgtccgtgtgtatgtgtgtgcacatgcataggccttttgtgtgtgtgtcccggtgtgtagtgtgtatgtggtgtgtgtgtatgcctgtgtaggctgtgtgtgtcctcttatgtggtgtggtatgtgtgtgtgtgtgcatgtacaggctgtatgtgcacatgtgtaggctgtgtgtgtccctgtgtgtgtagtgtgtgtgtctgagtgtgcrtgcatgcacgtgcatgtggtttgtgtgtgtgtgcagtctccctggaatgtgacgactctcctccgcctcaggtctttcaggttatctcaggccagttatgccccccagggcctggccccagcttttattatctggagccacagccactcctcccttcttccctccctccttaggctggttatgggagcttaagacactatggtctgtcccctgccaggccctttctgcgatgcctgcacctcatgggtggtggcgagcttgtggagcagcaccaatcatcccacagacatttcctaagtgcctatgatgttcccaggtgtccaggacaaaacaggcaccagccccgtcccccttgagccctgagctcatggtgaagtaggggtgacacacttcaatcaaataatcacaaacaggctggcaaggtggctagtcggctttgggaggctgaggctggagcatcacttgaagccaggagttccagaccagcctggggaatatagcgaggcctcatctctacaaagaaatataaaaattaggcaggcattgtggcgcatgcctatggttccagctatttgggaggctgaggcaggaggattgcttgagcccaggagttcaacgaagcattgagctatgatcacgccactgcactccagcctgggcaacagagggagaccctgtcttaaaaaaaaaaattgcaattacacaataatttcaagctaggaatagtgatgaaaaagaatggcgtgagcacaccacagcctggcaaaggctggcattgtgaaagggtcctcgaggaattgccttggaaactgagaccgaaagggattataaaaggtggtaaggcgaagatggggggatggggtgcagagggcagaggctcagggaaagaaggcttgccgtgtggctgcggtgggagtgaggcatgtatcctccttgagggccactctggccgttcaaaacacctgttgaggctgggtgtggtggctcacgcctctaatctcggcactttgggaggccaaggcacacgaatcacgaggtcaggagtttgagaccatcctgaacaacatggtgaaaccccatttctactaaaaatacaaaaattagccaggcgtggtagcacgcacctgtaattccagctactcaggaggctgaggcaggagaatcgcttgaacccaggaggtggaggttgcagtgagccgagatattgcgccattgcactccagcctgagcgacagagcgagactccgtctcaaaaaacaaacaaacaaaaaaaattgtggagcttggatgtggtggctcacacctat

SEQ ID NO: 94934 - DNA, 244150 bp, Homo sapiens
  misc_feature (1)...(244150): n = A,T,C or G
ataggtggagacaggggaaggatggacgttttcttcttcttttctaagtacagggtcatctagactaggcagaacttctagtggtttttaatatgtaaagttggtcttcagcatttgctttctgttcactgtcttccaaatcctggtgttcctctccccaggctcttaggcataaatagttaccctagactaaataatgcattaattaattcagtagctataatgtttgcctactaaaataaccatggctactttttattgaacactttcatccacagtatttcaatccttcaaacaaccttgcatggtacattaaaattacttccatttaatagataaataaattgaggcagggtgaagtttaaatatatacagctactgatttatgtactgacttacaaataaccggtatatatttgaatatcacttaggaaaagtttgtatcatatatgagagtttgttaaaggaatatatagaaaacctccatcccttccccacttcatctcctcccctgacacacaagcacctctgggacactgttctgcttttgaagactatacagcttcagggtagaagaaaagaagcaaaaagagttataaaaagtttctgatacttgtcaacctccccatcctcaagtctatccccagaaaaccctccacccccggactggatgtcttcatataacaggattgaacaatgattcctattagagatttggctcaaaaagcatctttgtgctaaagtgtaatgaaagaactcttggaaagattaaggaattcttggttattagcacattattgtcagctagttcaatgacatcttcttctgagctaccttcagggtctttctgatcaatggagttgaaaaggaagtggaggcacctccatggtttaaatctgtacttcccggtcctgtatgtagctgtggaggacgtgaaatgtggtcagtttgaactgaaatgtgctttaagtgtaaaattcacactggatttaaaagccttagtatttaaaaaaagaaagaaaaaaattagtaactgtttatattaatgttgaaacaataagtttggctttagtgagttaaataaaatgttattaaaattttcatctgttttatgtttttaaaatgtgattactagaaaattttaaattacacccatgggttgtgttatatttcaattggacagtgctggtttggactaattctccacctgtcctgtgtcttccagcttttgttcgtcctagtagccatgctctgtactatgtctcctctctttcctacatcttcattctctcctctttactggcccttttctctcagtttttattcattcagcaaatatttcctgttttcttagttcctatgctggtattaggaacatgcagaatctcttccatcctaaaaacaaaacaaaacgtgaaagcaaacaaacccaactctgtctcaatccatgttgccctccccacatgcctcctcttcgccatccagccttttgaggaagagcctggattctttaccccacttttaccactccatgctaactcttctggccaccaattttacccactcctcagtctttccctgcagcatttgacactgtccttggagtctctccttccttgacttcgaagttctctctctctctttcatttttctctctcccgctttaactttgtttttaagcatgtgactgactcatcagctttgtgacgctggatgggcctaacctcatggagcctcagtatcttctgtgtcacattggggcttgcattcgtcagtgggcactgtggtgacccaccccctccaaggctggtgctttttttttttttttttttttttttttgagacagagtctcactctgttgcccaggctggagtgcagtggtgtgatcttggctcactgcaacccttacctccctggttcaagcgattctcgtgcctcagcctcctgagtagctgggattacaggcatgttccaccatgcccagctaatttttgtatttttagtggagacagagttttaccatgttggccaggttgatcttgaactcctgacctcaggtgatctgactgcctcagcctcccaaagtgctgggattataagcctgagccactgcgcccggctggtgcatggtttcttttgcaggattctcttcatcttcaccgggttctgtggaaactctacatttgtttttttcttctccgcctcccagtactcttccttggtagtttctttgtatccatgcttccaattagaatgctcttcatgcgtttctttttttttctaattctttaaggctcacctcagatatcacctctgccaccaagtgtttcctgtcttcttcagccaaacttttgcctcacaaatctttctcagtttcctcatctgaaaagagagataatgatgttatctcttggaattaatttacaatattctgagggcttactcgagatacctgatgtgaaagtgctttggaaaaggttaagcccattataaatatgtttttatcactttcagatgccctacaacatttattgtccccacaaatttgttaagactaattatacatgtatataaagtgccattgataccagcttgaattatctcatatatgaatatttgcttttgttccccaaaatttcaagttcccacagggaaagggctatgttaggaaaagaaaagaaagaaattgaaaaaaaaaaaaaccttactctttttactatttagcatacactgcagctttatggtagacatgtagtagtagatgctccatacatttttgcaggtgcaattaagctagcagattcacacatttctagctctttttgttctttcactgaaaacaaatatgtattatgtatttggtttttggcccttagttgcgtgtcttttcttgttagaatgcaggcttttttgaactagggactttgacttttgctctgttgtatccttaatgcttttcacttaggaggagcacagttatttttgcatgaacgatgaacccactactggtgatgaagttgagtttcaactttttttttttttttttttttgagatggagtctcgctctgtcgcccagactggagtccagtggtgcgatctctgctcactgcaagctccgcctcctgggttcatgccattctcctgcctcagcctcccgagtagctgggactacaggcacccgccaccacgcctggctaattttttctattttgtagtagagatggggtttcaccatgttagccaggatggtctcaatctcctgacttcatgatccgcctgcgtcggcctcccaaagtgctgggattacaggcgcgtgccaccaggcccggctcgaagaccagggaatggctcttgtcagtgttatggggccaaagcttgggctctgagatatctgaggtcctcactgcctacaaggctcttttgtttctgttaggcgctatgctttgaaatactgaagatgctgattaagtagaaggggtggtgggaattatgggagtattaaaaccagttcttgatataattaaagtagaatgtagtcacataatggtattaataactaaacttgaccaagcacttactatatgccagacactgtttgaaatgttttatctgtactgatttatttagttctctccaaaatcctatgaggcagatgttatgttcttcctggataggtggggaaacagagggacagagagttaaaataaattgtctaagatcatagagtgatagaaagtaaagatataaccgaaatccagaagttgggcttcagagctttttctcttagctgctgtgctaacctgtctctctgcttaaatacagataatttaaaaacagtaatgtgggcatacatacatgttatttcacttttttctagagaggaataattgtcagyatttcttctgttgtgattttaagctataagggttgtggcctatttctttctttcagggaagtagtttagttatatacagccygcattttttattcaactacaatgtgttaggagttgattatttatagttcttgctgaagctgatgtgctgcatgactcactgagtttataaagaaataatggcctgttgaaagtcagtaaaatgaaatttcttgaaactatcagattagaagttgacctgtattttaagcttcatagattggagattttctaataattatggattcttttatggtatcagagttaccatagaccacatacagaaaataagtgccaactttatgaagagagatatgggatttaaaaccattgaactgagtaaatcagcttatctgttcatttttatttctatccttttcacaaaagatatcttgtccaagttattttcattcaagagatagtgctcaaagtatgagatctactttatggcagaaactatttgaataaatacatttgcaagtgctataaacctagcacagaagcatgtcctcttcatccaaagtgtctgtgaactcaatgggaggatgggagaaaaaaccctatcttcccttgccctcctctcagactcagtagccaaggtcgttagctgtcatgtaaatattgcacccaaggttactttgtttgttttttaaatgaaaactcatgcagtgggtgttgaaatatatcatatgagaagtggtagtgtgagtggcagaaagttttttcatagacttcccaggacccaatagggtttgccctgagatgaaacatggcataatgaagatggtggcaggtaccaagattgaggaataaatgtgaaatccataaattcatgagtggattatgtagttctgaaagggatggtacagaagaaaatcagatcaattctatgtaaagctagtgagatccgagtgaggtaatgtaaacccatggcaaacaggtaaggcgctggtagatagaaccttagttgtgctgcgttaaagtacaggaggtactggagtctctgtctgtatctggaagtattttataactagactcagtgagccaaaaaggggctgtctaagttccaacagggaaggccttgttcctttggaaccaaaggaaatagcttatcgggagccaaaggaaatagcttatcatgatccagatggcccaaataatgtggaccagccagaaagtcaggatggcaaggggcaggctcaggaaagggactggagataaaagttatttcaagaagtatctaggagaaagatgcttactcttcctgcatctgttatttaacaaatatttatcgacatgtaccgtgtagcaggcactgttgtagacactggggataaagtagccaacaaaacagatgaaaatccctgcctttgtgaaacttacattcttgtcaggggaagtagacaataaccaaataaataagtaaattgtatggtacgttagatcacaaaaattgctatagagaaaaatcaagaaaggagggatggggaatgctggggtgctgcagttttaaatgtgatggccactgtatttaggggaagaggtaacatttgagcaagctcctgaaaagatttcagtgagttacattcttatgctaaggaaactgagcaagtgaacttgtacttaatggtgtacttcaactgtatttagcatgtgtctcgctattttaaaatttcattgcagcagcaaataaatatgtgtgtgggatggaaaacgagaagaggatgccatgtttgaacgtggggtgtttgggaaaggatagacctaaaagggatggcaaggaaatcctctcctccttgattgctaggagaaagctgtgccaagtgaaatcgagggtcgcaggcatgtgacagcctttgccatcatgtgacttgactctatagaagctgtttctgacatcatcatttaacagtagaataataggttttattttgacaacagaagattattgcatgatcaggcttattaaacaccctttaaggctttatgtctggaaagcttaaatctrattcttcgtrttgtagcactaatgttttatgtttatctgtctcttgcagctttgtaggcagccaatcccagagaagcagacgggatggctagttcagcccgggagcacctgctttttgtgaggcgtcgaaatccccagatgcggtacacattgagcccagagaacctccagagccttgccgcccagagctccatgccagagaacatgaccctgcagcgggccaacagcgacaccgacctggtgacttctgaragccgctccagcttawctgccagcatgtacgagtacacgctggggcaagcccagaacctcattatcttctgggacattaaagaggaggtggaccccagtgattggattggactttatcatataggtgagtcaagtggaatggacttgcatgtgactcagagcatacaagtttttagtttgacatttttaccattctgtattttcttctggaaaaaaattcacatgcacatatacacatagcagattctgggaatttattttttttcttctttgggaggaggagattcaacagtacatttgcttatattatgaartttgtggttacatctctacctcattaaatgtcagaaccttcagaacctgcaggtgttacagtattttctcttaggtcgatgcaaaagtaattgcaccaataaaacttcacctttctcttgatcagcagtcccattttagaaagagatatctattaacatttactaacatttttaaactgatgaaagagacgtgtagatttagatgacatattttaaaagctctgtattttctaaaatttgagttttgttaagaactacttgtagcctaagatgtctttttatttttaaatttcatgactctgttctagatcaattaggggaaggaagtgtcatgttttcctgacaaatgacttataaataattgctatttgctttaataaaaacagttcagctctgtttagctaatttacgcttgttgttcttagtgaacttacatttgctgagtgagcgatgaatgaaacatcccaaaaagtacgatgtctgccacattggaaagcaaaaatctaacctaccaactaaacaaaaagaaaattgaaatccaacccaataataaaatctaacattttccaaagttggagaactttttcattgaatgaagaaaattctctccaaaatttagcatcagatattaggaagacattgttgctttcaatgtaagttgtaagccaagcatccccccatcaccccgccgcccttttttttttaacgaataaatcagaggaaaaaaagacccatctgtttatggcagtacttcttagccagggaagattttgccccctagaggacattcggcaaggtttggagacatttttggttgtcacaactgggtagggggatatgaagccagggtgctgtaaaacatccaacaatgtaaaggacagcctccctccacagtgatctagccccaaatgccaatagcaccactgttgagaagccctgtttgaggcaaaacaacactcttgctgaaattttgttagattgttaaagccactgaaatttatttttctctgggataaagaattttatattgactgaaataaaaacatttgatttgtattcacttatataactcttaatggttaatcatgctggaaagcaaaaaatctaaactgggcaaagctttaatgaattgttatctctcttttttttccttatggtaaacaaaaaaggggaaaagtcttcacagcattttccctaagtgtgttttaaaatataatcaaattgaggaagatacataatttaaaaattacatttgtatcattatgttcacaaaaagtcttagttttgttgggattttagatgtaacccttttgatttgaatgtaatttcactcttttgcacttcatataacttctctttagactttctcattttttaccattttagcttttattttataatcttaatagaagacttaatatgagactacaaataccaaattgtagtttaaaaaatccttttatgatatttatttgggaaataatcagttttactttctcatataagatgatttattttgtgtacgaataacttaatctttaaactgctagaatcacttaaaaagttgattcccatacacacacttgctttatttccctgtctaaatttaatcaggaaggaactaaggaattccaaccgcaatgaatcttatctccaagtgaccaaacccacaaaatcttgatgttgttatattttactttctagaggaagaagtataggtcagagtcctaagtctggaattaatccaaggttgtcactaggaaagcagaattaggaaataaatcccttttgaaaartgataactcttcatcagtttatttcaagaagcttctgtgtctttctcatgtaagttatcattgtgtctttgttcccctgtatgttacatgtcttttttcccctcctttggctaytttcaagatttttctctttatcttggtttccagcagtttgtctatgctatacttaggtgtgattttctttttatttattccagttgatattctctgagcttcgtaagttaatgtttttgatgaaatttggacaaatgttggccaytatttcttcaaatattttttctgtttttatttttttcttctttttctgagatgccagttatgcatatgttagaatcatttcatgttgttctgcaaggccccgaggctctcgttcattttccttcaacatctttcctctttgatattcaaatttgataatttctatttatctatcttcaagttcactaactttgccctttttttgtcttcattctgttgtcagtcccacccaatggatttttaaactttgagttatttgacttttcatttctagaatatgcatttctctttttctagttttcatttctcttatgagatttcttgtgtgttaactcattcagatcatatttttgttcagttcttcaaactgaattgaatatagctactttaaagattctgtcttctaatttcaacatctaggccatctcatgatcagttcctattgactattttttttttcattgaccatggttcttattttttggtttctttgcatagctagcactttttgattttacactggatattaaggattctatgtggtagaaattctgaattctgtggaataacagtgttgattttttttctaataagcaggtttatttctttgagcttgtataggtttgattttttacactttgttagactggatctgtggaaaggccagtgtatttttctactatttctaacttgatggaattcatcctccgaatttggtctcccctgtgaattttgttaggtcttgcttttgggctgtggtaaaatcagtgtatggtaggccttatattagtacattctgcttactcctgagcagcagcatttctgatgtcttagctggatacctggagtgctagccaggtctcttcactctggctgggctgtagctccagcattcaccagcactgcttaacctctggtcactctgttttcctctcagccctgtaaagctgctctctataaagccttggtcatttctttctgagcatgtgcaccccagaccttggccaagatttgtaggggatcccctttgtggacttctggccctcatccttctagagctcttttctttccagggccctggcctggagattctagtactccrgttgactcagactcagatctctgtatccaagctcagcagaactgctatggactctagcttcttgctctacactcaggaaattgtcctccatctgagatctgggtgatcatagagtcacctcataagtttctcttttctctgagattatagtctaataccatctgttttccaatgtctgaaaaccacttctacttctaattttacagttatgtacattgggaaagctagtctggtgctaattacttcattaaggcctgaagcggaagttcctttataatttgatttagggtgggagataagaggtctcaattttcccctctagccatttccaaagaactgaataaaattgattgcttacatctatgttgtcacttcttactgtattttctaatagatttctatccctagcaggaaagagggatgaggacctggcatcccagaccccacaagggtccattttctgcccccttcgctctgtagtcagaaccctgatagggtcattgtgagcagtaagtcctyaatctcaggrcaggtaggccccccccaggctcaggaaaggtctaaacttgtatgctaatccaaacattgagtagtctagaagtagacatgtgactcggttcttgcccatgagatctaatgggaaacctttgggggaactttgctttccaatgaaaagccagagtttcatgaagagtcttttaaacttcctcttctcttgtacttggaactctggtgaaaagacacgatttcttgagctgttgcatccatgtagcaatcatgaggcatcaatcaagagaataaaaagctatggatggcagagcagaaaatagatcttggactggcactctgaagttcatgttatatgtgggaaaaaatgttcttctcttggtttaagtcagcagcaggctttcttgtacctgcagttgktcctaatagagccactaacacagctagaaatacaagaaagggaaaagggtaacaactgcttttaaaggcaagataaagaatgagtgggctgctttggtagttactacttcgtggagagtgttaaggactattttaatatctgtgaaagccaccaggttgtttttaaaagaagcaacaacaattttgatataaaaattctgaacacagtaactccaagccatgtggaaattttcagtgctttaataggaccaatactgtgttgggaataatctttcaaatgagtaattaataacatgaaaatgtgcaaaacaattttttggatactattaaatgaaagtaggtaaaatgatacatttggagaggaagtgaaagaaaagaggaaacaccatgctagaacaggaaaagatttttgaggttcaggttaagtcacaaatttaatactgtgtggctaaacaggaacatgcataataaattctctcttgggctctgtgaaatagatgtgctgagaatccaggtttcgtaacaatagcatgtatgtcagaaatagcttcagatttctataccttttggtaggaagcagcctctccccttcagttgtgtcctgagaagcctgtttcctagcaacttctagttttagttatggaacagagagatggtctctatagaaataagtcccaaaggagaaggaatttagtagaacatcaagctgacgaggtgtggcttgttggcacactctgcattttgattgtgtttctcttggcttacattttcttcccctctagaagtgtgagttttgtttttgtttggctcattgtgcagaatgttttgaagtgtacaactcactccagatgacttgtagcacttctaatctggagggaaaacatatgcatgtgaatcagaaaagtaaatccttctttaggcatttttaggcagtaaataggccctattggaaatacaaagaaaaaagttgaaaatatcaaagcattatttgagaagactttgggtgtgaacacagttctcaaaacatatgctaattatatttcctccttccagaaagcctcatatacaccctgagatttctagagatgatcacaatggagctataggcccaaacctccaaattacaacaattaatcccttgcagatggtttgcggaaatcactaggcttataatttattgttggtctccaaaattagaaytgattcctcacaaatttaacagtgctatttattgcctcctcctaagtgcaccaaataaaaagaaccaaatgcttatcttatacaaagacacttaggtcatccaacacaaacagctttccatgaagaatcagatggaaacagtttaaagaggatgtagatgatagtaaatttgtttcaggctcactatctaattccccttcacctttggacctatgctcatttttctggctgttcaaaagaaaaacaaacacttcagaaggctccatttgccatttctcatttgtaggcaacttcaggtacttaacagaactacgaaagtgcacattaagacaattattttttaattttgcataacgaaaatgtaaaagtgtatactatgctatgtaccagcagttattcaaagtactggtctgcaaactgttactgatctgtgaacagataaggtgctctctccaaaatgtaaatcaatatactgatttcttcgatgagaaaatgttgctatgaaaaaaatcatctgaagtttcttgatgtaagtatttcagattctggctcaagcttcttacattgtcatggactggtaacaaataatttaccagcatttctctggaccacactttaagtagacctctcagtgtctatggattgattatgtcttcaaaagtgaatggcagaacaactgtattttgactgtcagtcttaaaaaagtatcatggtaatatattttgacatctttcatatttcttcacatttggagaataaaataaagtaagattgcaatagtaaaccaaagcattatcatcatgtatcttagagctttaagatcccaaagtttaagcttatgttttataaataaataactaaggtctagaatgatgataccctacagcttgttgggggaagagtcaaggctggaacttcagtgtcctatgttccaagtcttcatttttctttcctgtgctgagaattgtagtctcgtatttcccaactgttaattacttgctcaccaccttcttgattttttgcagttttagatgattggctatagtgttaatattttcctttaaactatctaattgacaaaggaccagaatagacacttctcaaaagaagacaagcaaatgtccaacaggtatattaaaaaaaaaaatcaacatcactaattatcatggaaatgcaaattcaaaccacaatgagatatcaccccacacctattagaatggctgttatcaaaaagacaaaagataacaagtgttggtgacatttggagaaaagggaacccttacacactgtaggtgggaatgtaaattagtacagccattatggaaaacaatacaggcataactagagatagtgtggtttcggttctggatccccataatgaagtgaatagcaaattaaagccagtcacagttttttggtttctcagtgcatataaaagttgtgtgtacactatactgtaatctaaatattaagtgtgcagtagcactatgtctaaaaaaaactgatgtacataccttaacttaaaaagactttatcataaaaaaatgttaatgatcatctgagcttcagtaagtcatcatgtttttgctggtggagggtcttgcctccatgttgatagctgctgactgatcagggtggtggttgctgaaggttcgggtagctgcacaatgtgtttaaataagacagtagtgaagtttgctacattgacagactcttcctttcacgaaagatttctctgtagcatgaatgctatttgatagcattttacccacagtagaacttttttcaaaattggagtcaatcttttcaaaccctgctgctagtttttcaactcagtttatggaatattctaattttttttgttgttgtaattttaacaatgttcacagcttctttatcaggagtagattttatctcaggaaaccactttctttactcacccataagaaggaactccttatccattcaagttttatcataagattggagcaactcagttacatcttcaggcaccacttctaattctagttctcttgctatttctaccacatttacagtgacttccatcactgaagtcttgaacccttcaaagtcatccatgagggttggaatcaacttcttccagactcctgtcaatggtgatattttagtctaccccatgaattgtgaatggcatctagaatggtgaatcccttccagaaggtttttaatttactttgcccagattcatcagagaaattcctatctatggcagctatagccttaagaaatgtattgcttaaataataagacttgaaattcaaaattactccttggcccatgggctacagaatgagtgttgtgttagcaggcatgaaaacaacattaatttccttgtaaatcttcatcagacctcttaggtgacttgtcgcagtttttttttttttttccaagcagtatgtctcaatagtggccttaaaatattcagcaaaatattccgtaaaaatattcagtaaatctaaatgacagatgtgctgtcattttggctttgttgttccatttctagagtgccaacagagtggctttagtataattcttaagggctctaggatttctggaatggtaaatgagcattggcttcaacttaaagtcaccagctgtatgagcccctaacaagagaatctgttctttaagctttaaagccagacattgacatctcctctagctatggaagtcctagatggcatcttcttccaatagaaggctgttttgcccacattgaaaatcatttgtttagtgtagccaccttaatcaatgatcttagctagatcttctggataacttactgcaacttctacatcaacacttgctgttttactttgtacttttatgctatagagatggcttctttccttaaacttatgaatcaacctttcctagcttccagcttttcttctgcagcttccttacctctctcagccttcatagaattgaatagggttagggtcttgctctggattaggcttggtttaagagaatattttgactattttgatcttctctccagactcctataattttctccatatcaataataaggctgtttcactttcttatcattcgtatgtactttggaatagcattttaaatttccttcaagaacgtttcctttgcttttacaacttggctaactgttcgaagcaagaggcctagcttttggcctgtctcaatttttgagatgccttcctctctaagtttaatcacttttaacttttgatttaaagtgagagatgtgtgacttttcctttcatttaaatacttagaggccattgtagggttattaattggcctaatttcaatattgttgtgtctcaggagttaggacagctgaagagagggagaaagaggatcgttgggtcagtggaacagtcagaacacacacaatattcattgattaagtttatagtcttgggcacagttcatggtgcctcaaaacaattacaataatatcatcaaaagaccactgatcagagatcatcacgacaggcataataataatgaaaaagcttgaaatattgcaataaatagcaaaatgtgacacagagacatgaagtgagcatatgctgttggaaaagaaatggcaccaacagacttgctcaatgtggggtttccacacaccttctatttgtaaaaaaaacacattatctgtgaagtgcaataaagcaaagcatcataaaaagagttttctatgtaggcttctcaaaaaattaaaaatataaatactatatgacccagcaatcccacttatgggtatacatatccaaaggaaatgaagtcagcatacagaagagatatctggattcccatgtttattgcagcactatttataatagccaagatatgcagtcaacctaagtgtccatcagtggatgaatggataagaaaaatgtgataaacacacacacacacacacacacacacacacaatggaatactatacattcattaaaaaagaaggaaaccctctcatttgtgacaacatagatgaacctggaggtgaagtgaaataactcatttgattaaaacaaaacatgctctctaccctgacaatgttctaagcaatagtgttagagaaaggtttgcgttgttaggtatatttctttctgacatgcattaactgttaaggaataacttttgtcaatgaactacccaggaccgtcacagcagcacactttgagaagctctgacgttatcaattgttgagatcacaggcgctatagttagacacattagtaaattcagtgaatgactagctgaatgaccatgggcagataatttaactttttaaacctcaatttctccatttttaaaaaaatgacttaaaccaccaatattatgagaattaaatgagatattgcatataaaatgctcggcacggtgcttgggcagattgtaaggttattattataaactatcattaatattttggtaattattaataataataaaatcattttactggtagcctgaagctgcagctcaaacttacccactgaatgaattcccaagaagggatttccagtttaaagtgacacaatgggccacttctacctaaggaaaacaaaattcatttatttgaagcagagctctagaaattatataagcacttaaaatgtgaatgctaaataatacagtattttaatttgagtattatttaggttctaaatcaacatgctttacaaggtgatgggaaatccacaatttaatctgaaattcaatcaaatggaacaaataatgcattaggtttttcatcttcagaatagctatcaaatatagttaagagtgcccgatcctaagttcttttgatattttatcatgattcctggtgaagaaaagttgttttaggtcatatttttaaaattttaaaatgctcttagaaagtaagagctttgaacatgtaattgttttttggaacaacttaactctaaattcttttcacctagtcagattatgctgcaataatttactaaccctaaatcctcagggcttaacagaacaaaggattatttattgctaatgctgcatgtctcgtgtgggttggcagggggcttgattcatactgtcacttagggactcaggctcatcaccttctttattttttccatattagattattaaaggctcaaccattttatcattatgccatctggacacatgacctctttgggcaagtgtcaggggaagagagagctggaaactcttatgctagctcttaaatacttagacaccaaagccacacatttcacttcggctcagagctcattgttcagcattggtagcaaaattttgtctaactgcaaggggactgggaaatgcatagaagcctttggctattcagtgagcaatcagtgtctctcccatagtagaatgtcttgctaacaatgtgtctggtcctccagtctgtttcaaagcttaaggcatccttgtatggtcactgcaagaatagatactaggggttagaaagtctcatactttggaatacactttgcaaggtgttcagagactgaatgagcaggcatacccagggcagtaccaaggacagtgcatgaccattatagatgaaaaatagcttagtggaatctgaattcacaggatcaccttggtatctcagactatcacggatcttccttttaatatgcgtgtggaagatttggtccacagaggagtccacatgttcaaaatggttatgaaagactcccctggatattagatgggttttcgaaaattgcataggttggtgtagccaaagaagctttagtgtattttatgctttaacatattgactgcaagcgatacttgatacaggcattcttctctccatagattgagatgattctagaaacattacccttattgtatttttattgccccccatgcttatttgtgtcacttttccttaaaggagactcatatagccaaaattagtaaatgttaaataattgtaaatattttgtgattgaattaagatagcttttgcatgcggtttagaaattctttgttctgattgcaaccattactaacccacaaaataattccttactrtacatactgattttatygtgtttgttataattagctttttatactttcttaaggactaaatagtggacacacctataaagttacttataatgcaattattttatcctgctatatttcttaaagtctgttttgtctgttatcagttgtyacatcaacttcctttcagttagtttttgcttagtgtatcttttcccatcaatttactttcagccattctttggcatgctctagatttatctgctgtaaatcatgtaaagctttatgatttttaatctaatttaagtgagcatcttttaaaattggtacatgtagagttttttacatctgcttttacttttgatatgtttggactttttacaacatcttatttattttctgcatatcatgctttttcttagttttttccccctatttttataccctcaatggaaatgatgagttgtttttactcccacatctcacattcttcctgagcatatttgcttggaatttaaacattctagtctattctcttaaaagtttatcctttcaatttttgacatatgtaattgagttagcatataatgaattgggatctttcagtgcctcaaactgtacaagaatcttaggatcttttcattccaatcactttctttcccatcttctcttttattgttgacgacatttaattccatcctattttaaaccccttcttccacattagtcattactattattattgtgtttttttcatagacatattctatgtaacaaacctccataacataatggctgaaaacagtaatcttttggataaataaacaatttgaagatgaaaaaaaaagaactgacttatctgaatcagcagcaccagagtacaactgggcttgattttcttatagaacacatacatacaaaaaatgttgcattataaaataaatggaagcacataggtgaagtttacaatttaacttcaaatccttgttggtttaccaaaccaaagaatatatttttttcttgattaatgtaggttatgatgaaaggtgtcagatatatccaaaatcttctcttcattttctccagtgggtcttccccttaacaggctctcatgtgttctctatttcattttgcaccagctatttttatcattatttgtaaagtcaaggccttaaaccaatcttacgcttgcaatctttgagttacagtggagctgtgataactatcaaagtcattatatttttttccgtcaattgtttcccacaatctggctgacattattgttgaattgttgaataaatacagacttgcctcacartagtgtgcagttcatatggacttcagagaaactgcattgagcaactcagattttcaacctgttttaagtttagaaaccagagtattgtaactcagatttagtggtgacgttaagggattcttccacattttcatagtttgagtttttgtacttattttatttaaattatgaattgcaaaactccaaatgtatgttcattgagaaagcatgatatttctcttccttcatcaaaatgtgtaaaacaacagtcaaatagtataaatgatcacattttcttagctactgtagttcataaaatcattaccagaaccatsgtaatgcyttacytacaaacaagctggaactggatagagtctccattaacttcaacattgggtaataatacagtggctctgaggatcgttttggagtgggggtacgggacagtagttggcacttggaagagttgctgaaccattccgagcytcaatttcttaatataccaacytcataagattgcactgaaggtggaacaagataacatttgtaattgtgatacgcgagtagccaggtagccaccccactacacacatccccaacaaacatttgttgagaacytactgtgtggctgccactaggcaataggataaaaaatgaatcagctcataataggtgagatataagtaggaaggaaataattgtaatgcactgtattcagaacaatattacaaagaccacaggagcatggagaaggggcagtttaatgcctgagatgggttcagagatgggaagggtatagaaaggctttaccaagaagatgatatttggacttcatgtgaaattgagatgttttttggcattcacacacaagaaaggtcattccaggaggtggaaattgtatgtgcacatgccagtcttttgtcccgaagggtttgcagatgtacttgaagagaacacctcctgttcctttccctttttctgtctgaattccgtgtatcttttaagtgaggattcagaaaaatcgcccactctgtgggtaatctacctaactattctgggtaatcagtctgttttcctactcccttaggtattttataatatcgctgtctcagtgctgattacactgtgttatttataatttgtctttctccatgcttcttccttccattgcactcttaactccttaactgcatcttgttcatgttgtaggctgagcaccttacccagctctctgtgctgcattatctgtgcagattcattaattcattcgagagttggttttaagctagagtaattatggtgtgagtaaatacttttttattgaggatgattccatgttatgtagctttcaactaatgattttattgaacagaatatctttggtattcattcatctgtttgtttaacaatgttagaactttacaatgtaccaggcttctgaaaaaattttttaaatatcctctatattcaggatcatagttaataagtcatcattgcaggtttttcctaattttttacagtgtaccagccttttgtttcccatttccttacctataggatctgtcttcaatattgaaagcattttatgtttaaatagaaataacattttcctgaattcagtatgtctactgctttatactctcattttttggtcttttcttattctcttgtttccgaaaatgtgcatctgttgctctaagcagtcatagatgttttcctgaaagttataacttgtttgacatgaagaatatctattatatttttgacactctgaaatatgtaccagtatatttgcgatatagttattatacctctagtacaagcaagtgctgttttgagattattgatggatcaagaagtgatcatctggccgggcacggtggctcacgcctgtaatcacagcactttgggaggccgaggcaggcagatcaygaggtcaggaaatcgagaccatcctggctaacacagtgaaaccccgtctcttctaaaaatacaaaaaattagctgggtgtggtggcaggcgcctgtagtcccagctactcgggaggctgaggcaggagaatggcgtgaacccgggaggcagagcttgcagtgagccgagatggtgccactgcactccagcctgggcaacagagcgagactccatctcaaaaaaaaaaaagaagtgatcatcctttccctctacaaaattaagtactgcttttttggggactatatttatagcactaagctatactattagactcaaatatgttaatgaatgactaacctaaaaaatgtgaaatttccaactgggaatttacattaaattaactaacaggartctaaatatttactatgtatctttttaaggcatccaagtaaatagtagggttttttttctttaagtgtaagtctgtggcatatttttgacattgtaaagcattcaccatgaaaaggaaagctttaagaattcagcgaacatctagaggttaaattcttagtttggggctccatgacagccactttttctcttttcactttaactgccaaaacctgtcatttctgagacatttcaaggagataaacaaggtgaactgtgctatgcacatgactcgatgtaactgctgatttgagcaaggttactggtcagcatatgtaaggtaacttggagttttctggtccatcatgtgattcatttgcctgaatggagtgytatgcaactaataaaattcttttgaaaaatcagcattgtttgccagtagtaccagttactcgggaggctgaggctggaggatcacttgagcccagaagtttgagtccagcttgggcagcatagcaagagcctgtctctaaaaatttttttaattaaaaataatcaggattattacttgtaaaattctttctaactgcatcaacactgctaggacaagcagcaacattgtcatcttagtgacatcttattatgtgatgctgtctttggaatctccacaattctatgttttaaataagtttcactcaaatctaaggaaactatattacttatttaaggaaattgaatgctagcagtgaagtatgatatttttcatcatttggaatcattaaaatattatttatctgttgaagtgtattttaaaatatagagccataaaggttttaaatttagaattaaaattaatgatcattgactctatcggtctcattttacaaattagaagccgaaggcttagatggattaagtaatgtgtacctggttgctcagtaaaacaacagggaaaaatacagtgcctaataggaatttccttcatcgtggagttgcttcttaaaaggaattagttgctaaagccacttcctgaaggtgattttttagtatagccaaaattacccctgaaaactccttaggaaagcaatatgacttaacaccaaattcaatggcaggtttttcttccagctttagaacagactgctgtctcagactgagtgccagagaagaagttagcttgtgtttatgggctgtttttataagaaaacaaacaaataataacaacaaagcccttgtcatcaaaaactaaaattccctgcagcctggcgggatacttggaagaattgtatatttcacgttccctcttgggtcacacatgcagggtttggaattgttcccatgctgcttcaattgtcccctttggcagtctcctctcttgcacccagtaggcttgtgtggttacactgaaatatgttaaatgggcatttactgggcctcccactgaacatgaatctgatcctccaagattcagtagaatatgatgattcagtttcttagatggaggctcatagaggtttaatttataattttttgctagttttttaatagcaccatttaaaatatctcaccaatactgtttttgtaaagctgccacagttttttaggtgatctttatgatcaaatacatagaaatacttttttttctgttatctcttatgtttcctttttagtgcagcacactgtccttgggattttaaatccacagggctgagtgcttgcttatataagccctaggcataggagagagtgagatgttctaacatgattgtatatagtacaaacatttctttgccacaaaatttaaaacttattcatctttctctaaactgtaactgatgtaatttattgttttctaaaggtcagtgtgaccaatgcaagtgtctgtaagctaaaatatttcagcataatttctttaatatctctagtaagaaaagctatctctattaagagaaagatacgaagaaataaaattcaaatagaaaattcttatttttatgagaaattacaactagaacccctctatccctactgtgtagtaaaaccatgcacttggaaatcaacaataactcttaaaagtcatattactaaaccttttgttaatcttcaactcccaacaccctttgatactgttttttgccccttctttttgagacttttttcttcattggctgtgacactgtcctggatctcccagttttctggccaatcctttcatttttacagaaacttgtttctttccttattctaaatattcttcaggctttgttgtggatgtccttccttttaagaggccagtttaagcagaaagcttcatctccaaccaaaggtgcctggagccatctcttactggctcctgggagcccattctgcatgtcatgcacggaaagctcagctccgcattcagtgcgtgcacgttggtagcaggaagtcagctgtgatgagagcatttacaccacaggaagcagcaaacactacacatcagggctttcccaccctcagagagccagtgtcccagcatacccctattgaatcccaacctctgtctaaagctcccaggatcatttctctccaaatatgctactcactttcaaactcagtttgttcaaaacgaacagactgacaagcaaaaccagttcttgattcccctgtttttgttggtagaaatgccattttttcaatctcataggcttggaaaccttgtacaagattttgactcctactacacttttaacatgcacatccagtctcctaccgaggaatataagtaccctgcttcttttcagtgtatgtatatgtttttgacaaagataacaggttcaccagaacatagacagtggccccagagaaatcccctatgaaatcaacaactcctctctcacctggtagccaggtaagggtcatgagaatgattctggaccaccttcttcccatgtcctgcttggacagtgaggcatctcactttggactttgggtatggctgtcacctttcacttcagggcctcagcaggggtacttccctctaccttaagtcagatgagagaggcatgaagggaactgctctaagagcttcatgagtgctgtctgcagtggactgatatccgacccacacctgaagactcccaaggtgagaggctgtggctggaactcagagtgagaggggctgtgctgacaataacctgcacggtttgagttgttggggcaagaacacatgattcttgtggaccaggtgtgggggatccgcccacaacaaagctggtgttggggcactgttactcctgctggaaaggagtccccaggggctgatgttacccaggggcctcagaggccagatggaagaccctggcagaaagaggcagtgtgtggtcctgaagcctagtgtctagggctagtgaccacctcaggggaatttgcaagtgcaagtctccagaaatgggtcctctctctaggactcaggaaggcccctttgagggaaagagagacactccacactcacagaatgttcgcaccagatcatggcgataccagctcaatcagcccttccctgcctcctaagcacattttatctttgaagttagaaggggagaagatcctaacacatactgagatttgtttggctttatttttcaagttggaaatggagatgttacaggaatggaggacaggtagggtttcagtctcagattcagaggtgaaattgagctgactctggctgagtaaagtgggatacaaaacagtgctgttgggggaaatgttgcctttctctggtctgttgcttctgagtcaagctaactgacagctgtgctcaagtcccctggagagaaccacttttgaagaaatattcacgtggcgtgaggctctgaactatttatggaaaagcaaagcatttcactcaaaagcagcaaagaagagaaaatcaggggactgtcttctcagtgctttttgatgactgtgttggtggggtacagctgagtgcagaggtgagctgcagagtagtgatcaccagcaacacacaacgaaggcagaacctgcctcagtccttgaggcttgaagcacggggtgatggaaatgaggtcatctgtcactaagaacagcttccgcgttcctatagagaccagcaccagccaacaggctaagagaagtgcaggctggtgtgggtgggcagtgtaactgtaggaaacctcagagaatacagggagagctccagattagagagtggaaaagagcagaagtaagggttcaagtttttcatctgctgtccattttatccatkataatatttttatagtgcttttatattgagagagctcttctaataatattatctcatataattttttttgagacagggtcggctgggcatagtggcttacacctgtaatcccagcactttgggaggccaaggcgggtgtatcagctgaggtcaggagtttgagaccagcctggccaacatttgaaaccctgtctgtactagaaatacaaaaattagccgggcatggtggtgcgtgcctgtaatcccagctacttgggaggctgaggcgggagaattgcttgaacctgggaggcggaggttgcagtgaaccaagattgcaccacagcactccagcctgagcaatggagtgagactcaatctcaaaaaaaaaaagacagggtcttgctctgtcacccaggctggagtgcagtggcacaatcatagctcactgttacctcacgctcctgtgctcaagcgatcctcccacgccagcttcctgagtggctgggactgcaggcagtacaccaccatgcctggctaattttttaatttttttgtagtgacagggtctctctatgttgcccaggctagtcttggactcctggcctcaagtgatcctccagcctgggcctcccaaactgctgagagtacaggagagagctatcatgcccagctctatttcatgttatttyatatttcatataattcttagggcagctctccacctgattaactgtgccacctgatggtgggaaccagaggaggaagttaacaggttaagttgcttacccatgacagatgatggtgacagaatttggaccaaagttgtctaataatttcctaattcagagggctccttccagcctttagggctatgttgaactggggtaaaaggatttcatatgattcatgggcagtattttaaaatttaattgtaatgtgtttagttttaaatttactttctatttttggcagggatactggttttccattaatggactgaggtaaactcacttaagtaaaaagagcaaagatgaaaaagcatcaagtaaatagtagcatcaagatgtggcagtaattgtgaaggggactgtgaacatgaaatttcaaagccactgctctaaaggcttcctggccaaaacaaagagtttatcatttgattacattccctaaagggtgttctgaatgtgtcctgtgactaaatcctgacctcaaaatgggatgataaactctttgtgaataaggactgtgccttctataatccagatgctgtgtcctggcaccccccaaattcatatgttgaagtcgtaaccccagtacctcagaatgtggtcttatttggagacagcgtctttacagaggtaagcaagttaaatgatgtcattagggtgggccttaattcaatatgactgttgccctatggaaaggggaagcagcatgtgacatgaagacggtcacctgcacaccaaggaaagaggcttagaacagattttcctacactggtcgcaaaagaaaacaacctggtcaacatcttgattttggacttctagcctccagaactttaacattctgttgtttaagctaaccagtttgtggtactttatcacggcagccctagcaaactaatacaataggtttgtgcataaatactgggaacataaataatgaaccttaaactgaataacaagatcttcccgtgtaatttttattcatttatttatttatttttattttttaagacagagtcttgctctgtcacccaggctgcagtgcactggtgcaattttggctcactgcaacctctgcctcctgggctcaactgattctcctgcttcagcctcccaagtagctgggactacaggtgtgcgccactacaccagctagtttttgtagtttttgtagagatggggtttccccatgttggccaggctggtctgaaactcttgacctcaagttatctgcccacctcggcctcccaaagtgctaggattacaggcgtgagccaccgcatccaggcttcccatgtaattttgatccaagtcactccaagtttctaattaaaaatgcctcctcttgagctttaaggccttgttggccagctcttctctctctttgcatttcaacaatgcttcccactgccccagtactgctatctcctgagcttgggcatttcctggtgtgtctccttttacagaagtacagtgccctagatgtctggactttgccacttgattcatgtggagagccatcctcctttgcacaagacctttgtattgaaacaggattgctttttttaaaccttaaatgccttgcgagttttttgtttgtttgtttaattcctctgagcagaaaataattgttacctttagaagtgatagcacccactaaaaaggaagagcactgcaccctggaacctggcccttaattaaaagatgctgctagtccaggcatggtggctcatgcctgtaatcccaacactttgggagatggaggtgggaggattgctttaggccaggagttcgaaaccagcctgtgcaaaatagggagaccttgtctgtacaaaactaaaaataaaaaaaattagccatatatggtagtgtgtacctgtagtcccagctactcaggaaactgaggcaggaggatcacttgagcctgagaggtcaaggctgtaatgaactatggtcacaccattgcacttcagcctcagcaacagagtgagaccctgcctcaaaacaaaacaaaacaaaaagctcctgtctctagctgagccattgcattgcctggaatggcattatgatctcagaatctgcatgtatcttctcggtgggctgttgttatcactgctgtctgtatgctatgttgttacatttgtggatgtgctagccttctactgtgctctgtggacttcttgactttacagactgaccatgtctgaatcatatttggatcaagttcaataaaaatgtgttgaataatgaacattttaaaaggagaactgaagttcagtgtcctgttggctgtatttctgtttgatatacaattgaattttgtgacatggttcactggaagtatmcctttagtctttaratttaaaatcttgttgatttggggaaagctgttagtcctggactgaatttccaagacttcatggatcctatattcctagggagctttaagaattgttttcaatggcttaagtactgatctgatcggacataacagactgacctaaaaaactcccccctttttgttttagtctctaaagatttatttttatgaattagattagatacatatgatcattttctagaattcattctaagtttaaactgctttgtctatttttaagttctgctctctctgactgaatttttagaaatctggctccaacacacttacaaatagatcctgctagatattgttcttgtcatcacttttaggattatgtcaaaatgtaccattgctatttacttgatcccaaaatatgttacatgcatttttctttcaaagcgcatgaccatgraacaatgatcatatttacaaatctttgcatccctaagtgagaacacttggcagagcagaagcaacatttccattttttttcaggatgaaaccttgcacaataacactgccatcctacatgataggataaatctgtgctggcttgtcatgagcacttattttgaggagtcctctgttgctctgggagaaacatttaactaaatgttattcattgcccatataccaatctcaggtcaatgaacccccaaactctaccaaaccagggaattgactttagcaaatctttttatgattcttgtgccaggttttgtgggtaatacgcagtctctcccttcaagggatttactgtataagggattcaggatggtggctcaggatcaagactggaactctggtgttaggatatgtgctttttaaaaatcttctggtagcatggcacttttcattcctgccctcatacctagagggcttcttatggaacctcacaactgcaacaggatagaagtagcatgcacttgacaaataatggccagaaatgctctgagagcctctagcctaagtctaaatgtaacgcttgagtcagctggaggctttctgaaactttctttcatgcaactaaaaaattaagagtcctgagaactttagaactatgactaagttkgagtgtggtgcgttggccaaatgcatcagactgaaacagcactagactgtggtctagcagaagatgggaagattgatccatgtcttgctgctgcccagcttttggttcctggagaatttcctgtaagatctcgggagtcagggtaggtatgaccyggacagagaatcataaaatcccaagttttagatcctaaagagatatttgagttcatttgtttaacttctcttaacattttagtcaacagcacagagatttagaaacttgctccagttttcatggtcagttaatgggaatattagaactagaacccaggtttcttgatttatgaatcttctctttgttctctgttggtgttgcattatctgtttttcccagagcccagagcctttctagccaagtgccatggtcagtagtgtgttgacaaactggatttctctttcaaacaaaaacaaaaaaccctggtctgtagtatttttagatttccatggtataaatacttctaccatggccaatttcaagctaccaacatctaacaaccagcttgcaagtttcctgaaaaagttaacaatagactcccgcacaccattgattgtattctcctgtatgcttgttctttttggcattgttggtagcatatcagtgaccaaccttttgtgagataggtgggccccttatggcgatgggagataaattaatggaattaagagaaggacttgtttcattgattagcttacttcaaacgagtccagcattcctcagatcctaatctctccataacactcagtagtcctcttgacttaacatgtgataaaaaataatggaagctaaagggagatatttcctttgtttctaaagcattttgaaacttttgtgttgtgggacttaggatttgctgttcataaagtttctrcttctactttgtgtcttgaaagaaagttcaatggaggagtgtagaatttctagaatttcccatttatctagtcatttgttcattcattcatttatgtttgactattaccactgtaccctaacctaattatggcaatcctctagctattttgagttcagagactgagggggataagatactggatacagtgtcataaaaatcatgaccacttagagagtaacagattttagagctgggaacgaccctacagatgatcatcacccctatgctgtagataaggaagctgagagactgacagaaatctgcatagaatcacgcagttgtttggagtcttcactgggttcataacttgtgattcttgatacctcattcaatgtttttccattataccattataactcatttttctcccacattcagagcatgaaaaaaatatatagcatatgtctctagcctgtgacttcagattgaataaatcttagattttcagcacagccttttgatcatatcaggaagggggaagtgaattggagtactgatttagaggactgcctactgctcttctaacctcctgcatcttgtggcacatacattgtcagtgaaagactcagaaggtgctggatggtgtgaaacttagggcttttcagaagaatcattaagggttttatatattcagagtgaagtctttagtattgagatagaataaccaatctgttttgcatggagaagaagacttggctctgatatgagtattcagttaaattcaacaagcattttaacacctacaaggtaccacgcactgtgctaagcactaggaatacacagatgaataaaacatcaactttattttataggaacacatagcctgtgggaaaagagacatgaacaagtaacttcagtatagtcttctaagtgcagcacacacacagttcaatacattgttttcatttgttaatttagacttagtgggaagagcactgagcaaggagtctagccatttaggttttagtcccagcactgccactgcctgacagtgtgacctggtatagatcatttagcaccttcctctctgtgttggggaaaggaaggatcatgaagaccttctaaaaggtaattgggaaaattaaacaaatgtttgtgaaagtgttttgagccaggtgtgctggctcatgcctgtaatcccagcccgttgggaggctgaggtgggcagatcrtgtragttcaggagtttgagaccagcctaggcaacatggtgaaaccctgtctttcacccttccatggtggaagtatttataccatggaataaagaaaattagctgagtgtagtaacatgcacttctagtcccagctacttgggaggctgaggtgggaggatcacctgagtccaggaggtagaggttgcagtgagccaggagagaccctgtcttaaaaaaaaaaaaaaaagttttgaaagtattatctgccacataaacctaagtatattatttttattttgcaaataggtaacttttttataccagaaagctcgtattctttgactaagctctactgagaaagcacttattatcaaatatttattgagcatccacttggcgctagacatacttctagatcctgggatatggcaataaatacaacagagcgtctcccwacttgtggagcttacattctaaagagaaaagatggaaaataaatacacaagaaaaatgtcagatagtatttcaagtaagtacaatgcagataataaaaacagtgtaatgcaacaggaatgattgggcagactttagattgggagtcaggaaagacctttctgcaaggtgatgtttaggctgagtracaagaaggaacaagcattgccaacatcagaggtaggagcattctaggcagagaatggttcctaaggccctaagcaggaacgagcttggcaggtgtcaggaacagagagagggccagagtggctggagcatggcgggccaggtggaaatgggacacagtgggttcagagaagaaggttggggtcagatcacagagaactttgtcaaccaacataaggagtttgggttttattccaagtacagtggagaccaggattttaagcaggagatkaataaggtttgacttttagaagatgactctggcttttggaggagaatggattataggtcagtcttgtagcagtgcagatgagagggaatatgggcttatactgggctaataatagaaaagttgataaaagtagaatatgtgtagggtatcactgaagatggtataaagagaaactcctcatggcttagattggtgtgggaaacagaagtatcaggtgtggttccttgattgttggccagagtaggacaatttactgaaggaaaagtaattatggggaatgaggaggaaaaggagagtcaggaattgttttgaccctgtgaaatttgacttgcctatcagtcatcttggtgaatatgtcaagaaggaagaagctgggtctgcaaatctctagtgtaggaatcactggcacatagatggagctggaggaggttaccctgaaggacagtgtacacagagaaaggaaggggttctagcttggaggctgagcccagagaggaggcacagaaggctgaaaaagaatagtcagtgaggaaaaccatgagaatgaggtgtcctggaagctactagaagaaagtaggggataatcaagtaggagggaggtcaagcagtgtaagaacagagaagcgaccactgggcttggcaatgtgtcaagggaagctgtcggctggtgtcttgayaggattggtgggggtagaagttgaaatgaaatgagttgagaaagagatgtgaggtgaggaagtgggtatttcagctgtagagaattcccttaagaagtttgctgtgaagggggacaaagcaatggggaatgcctactggagaattcagaacaaagtaaagatatctggtatgtttgcacattaatgaatatgatctagtagacattgtccacatgacattgatgtgcacaaggagggataattattggagataaatccttgggaaggtgtgagcagatgggatttagagcataagatggggggttggacttcaacaggagcagagacatttcatccagaagagcaaaagggaacacagagaagtatggcagatgagtggtagatgtggcattgaaaaggtgaatctgtttgcttctgttctttatgcatttgaaagtggtggggagctagaggagagaggtagacatgtgatatcgtcacctggagaagtgaggaaacacgtatgtagagcactgtggcaaagttgcctggcagtattgagtcccctgcaagatttgtggtcctgagtctaaagtaagactcatgagcatgcttgtgtttggttttgttttattcttctaccagctggactgcaggtgtggtttaagtagtagctagtttaatcactgttgggtttttccaggggagtacagtggaaggggagacggaagatggagttagaaatattaccaacaggaggggccgggcgcgatggctcacacctgtaatcccagcactttgggaggccgaggcgggcggatcacgaggtcaggagattgagaccatcctggctaacatggtgaaaccccatctctactaaaaatacaaaaaaaaaaaaaatttgccgggagtggtggcagacacctgtagtcccagctacttgggaggctgaggcaggagaatggcgtgaacctgggaggcagagcttgcmgcgagccgagattgcaccactgcactccaggctgggtgacagagcgagactatgtctcaaaaaaaaaaaaaaaaaaaaaaagagaagaaaaaagaaaaaaaaagaaatattaccaacaggatgattataagaatggatcagggaatctggcaggataaggaggaaattgataactgggggtgattaatggagaaaaagtggattggagagcttgagatggaagggtttctgtagtgggagcactggaactggtgacctggaagatcaggaaatgtttgaatgcagaaatgtgccaaaagacaggaaacattttccaagatgataaaaatctcagtagtgaaaatctctttggggtttaatgtattttgaggctttcaccacaattaaaaagtgacactaattctgaagttacagatctttgactaggggaggcagtagaagaccctctgaaccttcctggctggtcaggacaagcttactgggttttgggaaataaaaacatcattttcttctcctagaaggtctaggaagagactttgaagaatctctttattacagaatcctagcagacatgacagagagaggcatgactaatgcttaggcaagtaagtatatattcatggggcaaatcatagggagaattatgctttttaactattaaagttcatgtaawgggacttacgcccagtctccaactcaagtgccatgtttctcctcaattattacaaaaatcaagagtatcctatgtggatactacaagttgctaagctctttattgtatggattcaaacagaagacttttttctggcactcaattgcatttagtaaaaatgtagtataacatggttagccaaccatagccattgcatggttccattatatattactagagtgtttttctcagatgaatgtgaggcctaaaacactcacagtgacataatttcacaagaaattctgggttctatagagaaggttggcagtgtgatgctgaaatatgtaacaggcctgaaatacaacctgaaggaatacttgaagaagtgtctggctttctgctacatatcttaagcaggaagacagrcatgttcttttttgttattattatttccttcaaaagatctgaggatctgttacatgaggtcattcttcttccctgtgtacttccttaggctgactggtcttatagccacgattatcttccctgcagagaatgaattttccagaatgttttggttcatttccttgagagcttttaagctttagaattttttcacagactaggwtagctgtaaaactttaggaaagtgactcagtcttcttaaataaataatgtaagccactgagtactttgtaatcaagtcacattttgcagaaatgagctgcatagtataaatgtctttttaaaagtacattaaaaattatgggcatcttgaaggtttgtgtttactgtatctctcatatgaggagatgcatttttaatgacagatcctacctttccctggaagtctttttaatagtctctatggataccctatgtggaaagcagaaacacttaagcatctgttgctttattactgtgatcatgttcctgaacrtgtatctgttaaatactttcttgtacattacgtcagctgtcaaatgcagtatcaaaatacagcatttagttgagtgacattttagtagcctgtggctatttagtacttatttgctctttctatgcctatgtctgtgtcctacccagcacagttaaaattggtcatcagtggaaagaatgacagaagaataagaatcccaaggtggacaggtgtggtggctcatgcctataatcccagcacttgggaggccaaggtgggcggatcacctgaggtcaggagttcaatatgagcctggccaacatagtgaaactccgtctctacgaaaaatacaaaaattagccaagcatggtagtgcgcgcctgtaatcccagctactcgggaggctgaggcacaagaattgcttgagcccagaaggcggaggttgcagtgagctgagatcgtgccactgcactccagcctgggtgacagagcgagactctgtctcaaaaaaaaaaaaaaaaaaaaattcccaaggcaaggaatctgtttgttaattgattactttatttgatttacaatattcacatttccaagtatgtatttgacctcccaaattaaattgttagctatagaaattttgttcgttctcttacagtttgttttttgagtttcaggactattgttaaaggtatactgtgacaatgtgtattagataccatgaaaaatatatcattgaatatgctgtatcactcacactgacaaaaagctgttaaataaataacagagaaacattatggaacataatatctgtcagggggactgaatcagtgaaggaaaagtagccaaagtaacccatgatgtggaggtgcaccatgcacactattaatggctcagagtctctcactcttattcccatgttagacaactatttcaaagtttctttgactaagaataaaaagtaaatctcttgcaagccatscccccagaaatgaaactcaaggtctgttaaagggccagtatatagctgcacaattatcaaatttctgagctaaagcttgtcatttcttttttcctttagtaacttattatggcaagtttccctctttttttttttttttttttttttwttgagacagagtctcactctgttgcccaggcaggagtgcagtggtgccatctcggctcactgcaagctccgcctcccagattcatgccattctcctgcctcagcctcccgagtagctgggactacaggcgcccgccaccacgtccggctaatttttttgtatttttagtagagacacggtttcaccatgttagccaggatggtctcgatctcctgaccttgtgatccgcccgcctcagcctcccaaagtgctgggattacaggcgtgagccaccgcgcccggcaagtttcccttcttatgacgcctagttatttttggtaccctctccatttgagaacrtagtaggtccttgattccatgtcttaacttatctgagggattttgttttccattggaaatcatattggtgaagaaaatattctcattagtaaaaattttttctctaagattataaatgaaagctctttaaatgttcattttaaaacatcctgaatattcacatctgtgtgatatacaggatgaatatataccctgactgtgtattcactcctgtgtatataaaacatctgtgaaaggtatatgtcacctgaacctaatattttgaaatatttgacaaaargaacaactgatccatattttttgaggtagcgtttttaaagaaaaattctatttaaaaattccagaagagtattgtatttttcataaaatttcaaataatactaattgtttccctttcttcaccaaaggaaagaagtgttaatggtggattatatataataatacacacagagaaacacatatgcacaagtgtacttttaaacaaaaatgtattatgttatatgcattcttctgtaaatagttgcttctactttgcaatatgccttagacatcaatccatctcaatattcattgtttataacttcttgatagtactccttaatatgcttgtactataatttctttaaccattaccctattaatggtcctttgggttggtcttaatatttgatattacaaatagtgctgcagtaaacatccctacacttacatttttgagcatttgtgtcagtatttcaaaaaacaatttctaggcatgaaactgctgaggcaaagaatgtgcgcatttaatttgagacatactgataaatatccctacagaaatgttgtttcagtttccggaagtctgttattaatcatgaaacgaaataaattagaagtttctcaaatgataggaattacaagtctgctgaatgattagggcatatatcacagatgaagttttataactctttttggttttgtataaatttaaaatttatattttaagtagacacaagttgaatacaagacatggaaattattttagctctttttttttttttgcattttgtgggaatgggggttagtggctcagagagaggagagggcaaaagagtcactatttggtcttggaaatggagaaatgtaggtgagtgaaagcatctttataagaatatgctttctggaacaagatgatgtttagtaaggttttcatgattttcaagtaaaccagctgtgactgggattcagtccaagaaggtctttgtgctgggacaatacagatctttaggctatggaataggagtagaacaacaaaatttcctgtgcatatttggtttataaaaataacctctttgaaagcacattttaagtttcaagtatcccgtgcttctgaactatttctaggctatcctgtttcagtcaaagggcttgattttaatacaatacctaagcttatcttttcactcaagagcaaaaattctatatcttttccagagttatgcaggcattagtcatatactctactctccttccccgccaacacgaaaatccttcctctgtctgtcccatttcctcactgatgtatgtaacaggagtgatgcaatttctttgcaatgttggcagttataattaggctatctcttttggaaaggcctcaagaatcccatagtgaaggctgcaaaggcaccacatgcttttttattcactgtgtgattagaaaaattattgaaaatttgagatttgattcttagacctatgaagaagctcttgtgaaactggcctgagaaagggagccagttaatttctttataagacaaatttctccatgctttcagattccagcatattttattattttagcaggcacccagttattaattactgtagtaattcagttaaatataagattgttgagtgctccttaggaccttctccaggagtctacttaattcctgaggaccctttcttatactaatactgggcttggcagtatctggtgcactattccctcacctaggaaatgtcagtagacacagctgtgaaaggctatttaactgtttgttcaaagatacgttaatacttgcttataatttgaagtattcttttgaaaactagttaggcctacggtyctatctgtcagtcctacttaggagactgtgtggttagaaagaacaatagcattggtgttcaaataggcctgtgttttgaatcccacttttgtttttgttacctactacagtggcttcagcttgggcaggttatgtcagatgggtatcataactcctgtaggactagagaaagaagtgagcaaatgtttgtaacatgcataacaccacacttaacttgggggaagagctggatcagcaatcgttgttctcttcattagcacttccttctcagttttggggaatccttaaaatagtgcttcccagagtgttccacaagggtattcctgctgcagaagatcataagccctctggcctctggcagtttagcccagagtagtctgctgccagggggaaatgacttgaagtcttgttttactttaacctctttgtaatatacatatgttttcatgcagaaatgatgttagaattaccaattgaataawaatgtaacttgatgtttccccttcttcaaatccttggggaaaaaattagcctccaaaagtatgctccacacttctaatggggctgagtctggggaagcccattagtagtgcttcyggagtgtacatgctcaacctgagaaccatacccaagagaagctctggagattaagaatagattttgggggccaatatgtcatcatgaattgaaataaaatcatataataacattggattgtaaatatatgttggtttagaagccatacttttgtctctattttttgtttttaaagagacagggtctccctctcttgcccaggctggagtgcagtggtgaaatcacagctcactgcagcctctaactcctgggctcaagccatcctcccacatcaccctcccaaatgcaagtagctgggactacaggcgtgcaccaccatgcttagctcagtatttttaaaaattttatttctcctcagagttattgagcttctgtatctgcagaataacgtgagtcttttgctctcactggggaaaccagatatggggatacaaggtatcagaagattcatagctacatgcagtggcatatgattaggtgagaaatggtggtgtggatcataaataacatgtttaatagagaaagatgccaccttggaccgaaagccagaggtggtttcttcgaggtgcatagataacttgatgagtttggagaatgggtgggatttgattggttggaaaacaaggcatcttgggatatttcttcttttccattctcatagctattactaaatcttactgcttatgttttcyaccagctcctgaaacactaatttatttgaacctatggcaatatctcttgtttttgaaaagacctgtagtaatggtataacatttttgttaaatgtgtttatttaaaactgtcacattttactatatgtctgtgtttctctgcatgcataatcaaacagtattttttcccactgacttggccatattgttctgtcttcaaaacccttaaccattaacctttctgatcaaattatgagtctttcccatttagctaagattattttcaggccaatgtatcctccctactcacatgcatgcattttgacttcccaggccatttyccctaactcccccacccacccacaaacccatccagccacctttcccctacactcacttttttccccttctattgtgtccttccttctcctttgcttgcctgaaaccacctacctcttmttataaaagactccacttcctggtgaggtatctcggaagggtatgctttctgcagggctgttagaactttgtggaaatactttggctcagtgcagctttattgagcccttccatgaatatctttgggagcaggtgaggaggatggggtatatgaagcaatggtattgggactgctttgagtcttaaaagactacattggaagcatttgggaaacaatgtcttggcatatatggaaggaaatgatatctaaacagttggtggaaatcccaacctaaagaatttaacaacttccaagggaaaacagattgttgcaatttactttcttaatttaaacgggaaaacatgccttggccattttcaactaatgatgctgtctggtatttggtgggggactaaaggggattctgtcactattatctggaggttgtatagagagccagcgaagctgttaagcataaatagaatacattttttaaaaataataaraagaaaaaacaaaccaaactcacttttatccttgccctccgctgccttcaccccaaaaagaatttaagatttcacaaagctacatccctagaggatggccagaagaggtttgtgtgtagatcattgagatgatataaaatgtggtaggttcacatgggccctaggaagtgaatgtcagtaagcccttccagatatgaatgtaaagcttttcagaagaagagacatttctctggtacctgcatcatattaggtgctaccttatgttaccttagttgggacagaaagcagggacacacagcrgtgtctttcctctgtcacaccaatctgtctaaacagctctgattcttccatatgtagaagaattcccaaagacggttttttatttttgtttttttttkttttgttttgttttgttttgttttgttgagacggagtctcgctctgtcccccaggctggagtgcagtggcgccatctcggctcactgcaagctccgcctcccgggttcactccttctcctgcctcagcttcccgagtaggtgggactacaggtgcccgccaccacgcctggctatttttttttgtatttttagtagagatggggcttcaccatgttagccaggatggtctcaatctcctgacctcgtgatccgtccgcctcggcctcccagagtgctgggattacaggtgtgagccaccacaccyggccattttttttttaattggaatatatgcaaacctaggtctgtaatatttttgcaagacaatagtttgctggaactggaggggacattgccacatcccacccaggccactttactaattcttgtttccttcttgatctctgttaacatttcagagcctctaaggaaatgcctctaggcaaggctctaggtacccaaaaacattagtctggggcatatttctccaaaaggggaaacaatagagatacattgatagcttgcgttgaacatttatacattattctttagaagattgaaatggtcttatatgttgcaaccagaaatgtgtaataatgcctgtttttatctgtttatttttctttaccaggtgttcagggmatctgtaaaaatggcacttgtgaacttttctctatgtgataatttactatctttttggttctgcatatatttgcattcatcattttgtaaagagatcctgggaattgattatatgtgtttatctaaaaactatttctatagtttgaatagtaaagttctcaattacttttgtgctattgcttgtttgtatactttttattccatttagatatgcaaactttttctcattcattctctcctctccccagcccctggcaaccatcattctactttctgtctctatgaatttgattactctaggtacctcatgtatgtggaatcatacaatatttgtcctttatgactggcttatatcacttagcgtaatatcttcagagttcatccatgttgtagcatatgtcagaatttccatcatttttaagattggatcatgttccattgtgtgtatatactacatgttgtttattcaatggacactcagtttgcttccgccttttggctattgtgaatagtgctcctatgaacgtgggcatacagatacctgtttgagtcccattttaatccctttacgtgtatacccagaagtagaatagctggatcgtatggtaattctatgtttaattatttgaagaattaccrtataatttttcatagcagctgcaccatttcacattctaccagcaatgcacaaggattccagtttctccacatcctcactaacatttatgattttctttttttwaaaaaaaaaaaacatagtcatcctaatgggtgcacagtggtatcattgtgattttggcttgcattttcctaatgatgatatgcatcattagtgatgttaaacatctttttaatgtgcttagtggtcatttgtatgtctttggagaaatgtctattaagttctttgcgcatttctaaaccaagttgtttggtttttgttgtcgttgttgagttgtaggagttctttatatattctggatatcaatctcttatcacatacatgatttgcaaatattttctcctattctgtatattgcttttccattctgtcgatagtgttttttgatgtacaagagttttaaattttgatgaagtccaatttatctatttttttctcctgttaactgtgtttttggtgtcatattcaagaaatcrttgccaaatccaatgtcataaagcttttaccgtatgttttcctctaagagttttaagttttagctctatgtttaagtccttgacccatttttgaattaatttttgtgtactctataatgtagaagtctgctatggtctgaatctttgtttcttcccaaaattcatgtattgatacccccaaggtgatgatagtaggagttggggcctttgagaggtgatgaggtcatgagggcagacctctcatgaatgggattagtgcccttatgaaaaagaccccaaagagctatctggccccttctaccaagtgggcacacataaaaggcattatttatgaggaagcaggccctcaccagacactgaatctgctgatgtcttgatcttagacttcccagccttcagagggaaatgagaaataaaggtttattgtttataagctacccagtttatgatattttctgatagcaacacaaagggactaagacatggtccaacttcattctttcacatctggaaaatgagttttcccagcactatttgttcaaaagattgtccttttcccaatgaatggcagacatttttagaagtaatattttcaaagccatttttctttctcagagargtattgtgatatattgaactttagaatcatacaaatcttacttcactactaattaactgatctgggatacattaattgacctttctgagacaggattggagagatcgttcatctttctggctctcgtgtctgcctttaggtggtctgaactctctaaaggggggrtgtttattgactcactaaaattacaccagctccaatttcaggcaaaaagatggaaggaatattttattttaaaacatgagattttagtttctctctatctaattggtctatcttataccttaggttataagaaaaatagaaaataaattctggtctatctttacatttaccacctgtactatttttctgggatcattttcttttcttttttatttttaattatactttaagttctagggtacatgtgcacaacrtgcacatttgttacgtatgcatacatgtgccatgttggtgtgctgcacccattaactcgtcatttacattaggtatatctcctaatgctatccctcccccctctcccccctcacccccggacaggccccagtgtgggatgttccccaccctgtgtccaagtgttctcattgttcagttcccacctatgagtgagaacatgtggtgtttttgtccttgtgatagtttgctcagaatgatggtttccagcttcatccatgtccctacaaaggacatgaactcatccttttttatggctgcatagtattccatggtgtataggtgccacattttcttaatccagtctatcattgatggacatttgggttggttccaagtctttgctattgtgaatagtgccgcaataaacatatgtgtccatgtgtctttatagcagcatgatttatcatcctttgggtatatacccagtaatgggatagctgggtcaaatggtattttagttctagatacttgaggaatcgccacactgtcttccacaatggttaagctagtttacaatcccaccaacagtgtaaaagtgtacctatttctccacatcctctccagcacctgtwgtttcctgactttttaatgatctccattctaactggtctgagatggtatctcattgtggttttgatttgcatttctctgatggccagtgatgatgagcattttttcgtgtgtctgttggcttcataaatgtcttcttttgagaattgtctattcrtatcctttgcccacttgttgaatggggttgtttgattttttttcttgtaaatttgtttaagttctttgtagattctcaatattagccctttgtcagatgggtggattgtaaaaattttctcccattctgtaggttgcctgttcactctgatggtagtttcttttgctgtgcagaagctctttagtttaattagatcccatttgtcaattttggctttttttgccattgcttttgatgttttagtcagtcatgaagtccttgtctatgcctatgtcctgaatggtattgcttaggttttcttctagggattttatggctttaggtctaatgtttaagtctttaatccatcttgaattaatttttgtataaggtgtaaggaagggatccagtttcagctttctacatatggctagcctagcaccatttattaaatagggaatcctttccccatttcttgtttttgtcaggtttgtcaaagatcagatggttgtagatgtgtggtattatttctgagggctctgttctgttccattggtctgtatctctgttttggtaccagtaccatgctgtttgggttactgtagccttgtagtgtagtttgaagtcaggtagcgtgatgcctccagctttgttcttttggcttaggattgtcttggcaatgtgggctcttttttggttccatatgaactttaaagtagttttttccaatacgaaaatcttttgtatgtaaatagtggtggtttcttgtcttccttttctccatttattactgttgtttcagtgttgatttgtattgcttttgcatttctttaatgttttccagaaatatttctgaaacatggtggtggcatttggcatttttgtattttatattttgttaaggagaatgattcatgcttttctgttacctactcctacttataacatttataattattttgatgttagaatatggaacaccttgtgttgcattgctgacaaaacacaaacaaatctttaaattaattaamaaaaattttttaatgtaccacacttccttaaacttctctatgtagcattttaattaaggaatataaaacttaaaagcaaagaactagaaggagcctgataggttacacagccctggcaccgaaagtaggttttatcttacattcctatccgagttgaatagtggaagctgcatagagtgctatgttaggaagactgaggcttcattctggaargagttgtataatcaattagcgatgttgggcatgggcaagagatgaagcaaaatattactcaattttattctattcattaccaatcttaatataatttattttacagataaagggattgaatctaaaaaggaaaaaagtttgcatagatttacatagcatatgtgtagtgctttgaatagtgtccccataagtcatgtcttcctgaatctccgaatatgaccttgcttrgaagtagggtctttgcaggtataattagtgaagataaggtcatactggattacagtgggccaatgaatccartgaatgttgtccttaaaagaagaggacaggataagagaaagacacagagaagaccatgtgaagacagaggcagagactggacagattcagctacaaaccaaggagtatgaaagattgccaacaaccatcagaagctaggaaagggcaagacaggattcttccctagagcctttggagggaggatggcttgctaacaccttgattttagacttctagattctggaagtatgagagagtaactttctgttgttttaagtcactcagtttgtggtactttgtcacagaaactctaagaaactaatacagtatctgggactaaaacccatacctccttaatctaattccaaagagttaagcacagcatgagagaaaaaatatagaactaaactttgaaaagtagaaaaactatggggttacatgtgataagcctttgggttccaaatgtgagatcctatcatctaaaacatacattcatgagagttaaacagtataatgagagcagtatcaattcagtacaaaaaacagtgcaaggaagttcttgattgattgttatgtcagtcagggtccctgccagatgcagatggccatctcaacttagatcatttgtgtgacctttaatacagggactgtttataaaagcatagagagatcataggggtgatacattacaacacagccagtaacagtggggcagggtactgttactactcctaggcctgaagatgtaagaagagggaacagttactagaacctgggttacggagagagctaggttgaggggtcasctggtagaagataaataacctgcagagagactatatatttagaactgggagtttaaatattccagtcttactctcctccctgcctcctgtctcttgctggtgctccctgttgactaaatccacttgcaaatttgaggtcagtggagctcagtgatgcagtacctataggtcggtttcccagggcagagagcagagtgtatgggggagggagggaggcacatggaagataaccagccaatgccaatgagtataagacagcagattaataaggaaattgagctcgcacaatgtagaatttcctagacaatatgcaaagctcaaaacagaaagtcctcttgtgtctaagtacgtagcccattcaagtaaaaacaacattcctgcctgttgtgatgtcttaatctacttatctccaagcatcttatttcttatggtgacatgttttgcaaagaatgtatttgtgtctagatccatgaatgccttggacccaacaggcatcaagtatgaaactgttgtgttaataaaaaacaacaaggttatagatggcattttttcccttaggaggctaaacatgcagtcacagtactttctctaccacattatgaattagtgcaagtgtgatttgtgtttttcaggtgagcaaagacaggcacagaaaaggctagtaagctacctagggtcacctagtgtgtttagttttccatgcagcgacttttgctgtttagtttcagaggtgaccaagtgtctgctgcaaagtcacgataagtgatcatttgggggagtacaaggagtgctggcaagaatgtaaaagcagttccttctgataattaaactatcaagttgacatattgatcattccaacaacttggaaggttctccgatctttaaaccagtaaagcagctggtagagaatgtggattccaaagaccaatggcctggatgcaaatttttggttggcctttctttttctgtaattttgggcaagctacataacttctttgagcctcaggtattcatgaataaaatggrtrtcataatagggtctacctcatggagttgtcaggaaaattatgagataataaatataatataatatagtatctgagcataatatcagtatttcatgccatatctaacattgagaaggtactaaataaatgttaactatttttatttcaagcctaagctttcaaagtatctaaagaggtcctgaaccatcagaaagggttttggctggytgtggaagcttagcacgagtggtgtagtcctttgtagtgtccatccagtggctgttcagggagaggatacactcatccaaggatgaggtctgtggtccccagggccacatgtgcatgaatcagactgttagctagaaacctttaaacatctgaactcactcccccacttctgatttcttactaccaagaaaacttgtgatgataaattggctttctctgtagttttcctagaaagccagaagatgccaagaataaggcccctttcaaagttacctttcttagtcaatttagtctgcctttctggtactgaccacctctgagaccctgacaaggtcaagactcttgcagaggcaggaggcagatctggaatagtgggggatycatcaaggtacattccccaggctgtttgtaggtgttctgttataaagtgttcctgggttaaatcagtttaggacgccgtagaaggcagagggcttccagagctttcgtattatttactaatgcatgttttgaacttctaaagggggagtatggtatccaccacatcctagtcgtatttgaccaggagcccatttttcctagtaacacctcaaaacactagggtttctcaaaatgcattttagaaaatgctgcactaaggaaataactctctgtaggtcttcttggtaacacatccatttgcccatttgcctgccacagacagttttgcaacatgacagttaatttcatgtgctaaatattctttaattaatggtgtgaagtggctgtgacttataaagagagaaatcagatatgggtgaaaaatttgtaaaaccagatatgggtgaaaagtttgtcctgaatggtccataaagtgactccacaacagatcgcacttcagtcacaattggtatttgccaatatatttatgcttcagattctaggaactatatagcttttctgttgcctataaaggctatcctgtagagacttatatttctgttcagtttttcactggggtgcccctcagagtggcagtaaccatgcttccaaatgccagtcttccccgtcagcaaaagttaatttatgtaacagcaaagcagctttgtggaccagtgactctggtgtctgagaagtatatacctctaataatcttaacattttcacttttgaaaaactaccacaatattttgcttttgatacctagacaaatttgcctcttatcttgtttttctaggtttccattcttatagattgaaaattatgcatatgattagatgctagccatacattaaggaaaaaggaaaaagatatatgttgaagtcccacaagtaaatatagagtagcatagcatagcagttacatacctatactctgaagccagatatctggattgaattcgggccctactactgactgactagttgtgtacccatggatatattacgtaccttctgtgtctcagtttcccccacaggtaacatgggaatgataatagcatctaatttataaggttgttgttaggattaaataaatttacatttgtaaagcactataaaccatgcctgacagtaagcactatgtaattattaaatcgatagacctaaagaaagccatgaaaaaacaaaaatctctagaaatgacgttttgtacaattataataagaaaattgtaattttttttgagacagtgtctcactgtatcatccatactggagtacagtagtccaatcatagctattgcaaccttgacctgggcttacatgatcctcttgcttcagcctcccaggcagctgagactacaggtgcatgccaccatgcctggataattaaaaawwtttttttttttagtagagatgaggtcttattacgttgcccagtctggtcttgaactcctgggctcaagcaatcctcccacattggtctcccaaagtgctgggattataggtgtgagacactgtttctggccacaaaattgtattttaaggagtgtttactaataactcagtgcttacaagccttgtttaatttagttgaggtgaattagggcctttgaatttgataaaacttatttactgctgctactcttcaatgaaatacggaggttgctaaatgatattcccaaagtcacagcatggaagacaaatgctgtaatttggcatgttattttcttacctacatcactcaccacacagaccccagtggtctcttttctactgttgacttcatgctgaaatagagccacaagattctgatccctggagatatatatatctctctctatatatagatatgtagatatatctatgcatattttcaagagtatgtttttaataagacattttaagttttgtgtttttgttcaaaataatccacctgtcttagtccattcaggctcccataacagaagactttaggctaggtaatttataagcaacagaaatttctttctccgttctggaggctgggaagtgcaagatcaaggtgccagcagattcggtgtccagtgaggacctattcctcacagatgrtgctacctttgtgtcctcatatggtggaagagcagaaaggcaaaatgggatgaacaagctctctcttttataaggatgctaattrcattcatgagggctttatcctcatgacctaatcactgcttaaaggcccacctcttaataatattgcattggggatttgaagtcaacatatggtttttgtgagagacacatccagaccatagcaccccaaagtacttaagcatattctaactaatggagatcatcagtttatagtcttcctgcttataatattgctgtcaccaagtaatactgctttaactgtctgagcttatgaaagaaggtaagaagtaagtttaatatgtaaattatgtgtttgtgccaagaaagggccaaaacaaaatacttttctaatagagaaaaatgagaaaaattgagtcatcacctagcaccatgcattattctcatgatggactcaaaacaatctttgctgttaggagttagtattatagccttgttataagctatamcaaggcttataacaagccttgtgatttagttctagcaaacgactacaatcattcacagtgagtgagtgttgttaatcagaacttgattctttttctagttttgtttgtatttaatgcatcattttttgttttatgaatttgtttagcactattggcagttaactgtatgtttttgtacatttaatgatactatgataacagtatctacactrgggattgtgccagaaattagtcacattcaaaaatcattgcctrggaaggagatggtcttgtccctgaggccttcattttgcttaaaaagagacccagagcaaagaaggccaaggatatttttctcaccttttcctaatttgcartgcccagcttgtcaacagagacaagtcaaaaacagtggcagcagtgaaamgctaattcaaacaggtggtctgcttctttacattgctgttaatatctgcactccttttatctctttgctgcttctcaagcatgttagcaagctccctcattggggcctttgcactgattgttctttttgcctggaatgtaaggccaaatccaagacctcactcaattctttgctcaaacatccccttctgaatgaggcctactatgcttccctactctcaagccccagctttccctctctgttctctttcccccaacacttataaccatcctatacactatatgatttaccttaatatgttccttgtttactgtccatctcccctttccatctcccgctagaatgtaagctccatgagggcaggtggttttctttttgttgaattcactcatgtatcctaagatcctggcacaaagtaggcactcagtaaatagttattgagttaattagtctttctaccatctcgttagtcyrattcttcatgaagttatagcctaagtttctcctttctaaacagtttcagggttgagggtagaggtggcacattggtgtatgttaataggaagaagttctagatacacagctctacactgttgtgacatttttcacattaaatgaggcattttacattcaatgaaacatacctaataggttttaataaatasgcttccaaccaagttagtttcatttggaccaaattcctaagtaattaggaaaaaaaacaaaacccatgtactacagtagttattttaatctagacaagttatatttgcatttatattgcactttacagtttgaagagcagcttataccaaaatttccttggattttcaaccaccatgactggtctgaacaagtattttcagtccccatgtgctccagttccagagaagttaaaggactagcttcagatcacaaaagtgattctctaagacctgccacccaggtcttctagcrtcctaccttaggtgagtagagtgctctttttaataagaggcttttggtatcaggtttaataagaggctttggtatcagggcatagggcttaatggagagggatggccaatgatacatgattttaggaagaagttctgcatgatggaaaattaattaccttctagtgagatcatattttaaaaatttgctttaatatctccatgttcagtggtttgttgaatacttttcattaagtaactagagcttttatattctgattaaataaatgagccggggcttgtaagatggggaaggcttttactgtcttaattaaataagattatgatttattgcatatgagatacagaaaagaaaccatcagaccaggcacaatggctcatgcttgtaatcccagcactttgggaggctaaggcaggacgattgcttgagcccaggagttcaagaccaacctgggcaacatagcaagaccctgtctctacaaataaaaattagctggacrtggtaactggtgcctacagtctcagatatttggaaagctgaggcaggaggattgcttgagcccaggaattggaggctgcagtgagctgtgattgtgccactgccctccagcctgagcgaaagaacaggaccctgactaaaaaaaaaagtgaaagaaacaaaaaaagaaaccatctaacaggtggctgaggagatttattgttagtttcatgaagttactgagaattgcagagaaggatagattaaataaaagtatttaggagaagtgattaacattttataaagcatgctaaagaagttaatcaattggcagcctagtgtttctgttttttgtaaccttaattcaggatgtcataatgaatgaatgtaaaaaatactagggaggggcaataagtgttttgttcatcatttcattgtgtaaatacttatgaataactcttcagacttctgctattttatttgccaccttatgattaaaacaatttttttttggagacagggtcttgctctgttgcccaggctggagtatagtagtgctgtctcggctcactgcagcatctgcctcccgggctcaagtgatcctcccacttcagcctcatgagtatctgggactgcaggcggatgccaccatgcttggttaatttttaaatttttttgtagagatggggtctttctatattatgcaggctggtctcaaactcctgggctcaagcgatcctcctgcctcggcctcccaaagtgttggaattacaggtacgagccaccgtgctcagcctaaaagaattttttatgtagcctgtgagagctgggatcaagccttaatcattttttttgtccccaggttccagtaaattaaagcccatggaaagggcttaataaatgtttattgccaagtgaatgagtaaggttaatgaacagtgctgaatgagcttgttaaacaatccaaccttcaatcagggaggtcaagatttaatttctttttggttttacacagatggaagagtgaagaaatataatagcatctgaatgactgagcaggcactaagctagttgctcacctcatctaaccctcagtaacctgttgaggttgtacaattcccattgccattttacagatgagtaatatgagacacagtcacacaagtgatagaaacaggattttaactcagggaatatatttaaccactacactgaactgtttaaccttttgccgtgaaataaatgagaatatgatttccatgttcacgtcttagggattttaaatgagtgatgtgtgaagggccactgttgaatgatttagttttcttagttgaaatgttcaccttccattttattcctcagcccacctcagcctagctttcaactccaaaccttgactgtcactgccccactgaggacattggagcccttgtcattgccaactgggtgaagtggggctttgtcctcttaaatcttgacagtatttgatgctgttgatgtcactgttcccttcttgaaaaggtctactctttaatctttcctagacccttcttttctagttacctgcctgaagttatttctgttttgtcctttgctctctcttcttccaccttagttggtgttccacagacttttctctcctaggctcttttctcctaattttgctcttggcaccctgcaatctcatctgtttccatggattcagccaatacctatacacttacatccccaatcttcattctttttctgagtgccattattgtatttctagctgtggacttggcatctccacctggattggcctcagacccctcaaattcattgtagcccaaacagaatttgaccacattcttcatcctccttcatacgcctctttaatgttgctggcagcagttacgcaaatcagacatttgagacttatgcttgcatttttcttcatcacttccatccaggtggcctggtcaattaacctcttcaacttatctatatctggctccactgcttcaacttttattcctatctttgttatctttctcctaccttgaaccactcttctgactgatgcttctgccaccaatttcctcttactgcaattcatcccccatactgccaccagagccacctgtcttatgaaaaatatagttttrtccctgatcatgaaagttaagcttagtgaaaaacatttaaaatacagaaaatagaataaaatkaaagctacttgtggtcctgctaccatttgcaatawcatttttactagtattgaggctggttacatttctaaaggtcagggttatcatgcsagctaccctggtttagaacattcatgtaaagcaagtgccatttccrttggaaatgcagttgctgtagatgctttttaaagccaggttatttataaataatgaagacaaagtagggcacgtattgctacaagacagagaatacaatccgctattatattgtacagactctcattctatcctttttcatgttatatacctattcagaaattctttctggggtttacttagggcttcatcaactagagatttacaaaatctgaatacatctctagtttctaattttttaaaaaactgtaagataatgttattacatgttttttttttgccctatgtgaataaccagaggccttttttcgattaagtaatatagtcatttggcccaaaaaactttctaaatgcaaagaagtagtttgacaggtttcctttcaacctctcatgcatttccaaatttttccctttttttctcacaggtaacaatgctcattagtttcaggtttattctttcaaagtttttatacatatatggatggatatatattccacacatgtatatatatatatwhacacacacacacatactatatgtatatacacacacacatatacatacatgtatatcaataagcaaatacaactatgtagaaattttcacctctttyaatataaaaaatagcaaaatatatgcactattctacactttgtttcacttatatattgttcagatttttccaggtcagaacatagaaagagtcccattcttatatatgtgcacacttttattgttgagatgtaacataatttattaactggtatatttgatgggttaagtagtggacatttaaattgtctccagttttctctattacaaacaaatagtgctgtaatgaataatcatacatatatgtatatatttaaatcacattagtgttttgtcttgcttaatattacgtttaattttatttcagtttaaactagttaaagactaatgtcagctgtgtcctgcagtagatttctgcaggaaatctggcagtttaggaaagctgtcttctttatatcacactagacttctagtcatggtccacagagaaccttatcatggggatgttgccttactaatgacccttataacctcagctgggtctgatttctgggaaactcttgccctcctggtaggaggcaaatgtctgcttcctgacttcccagaacttttcgtctacttttatttattataatataaggaacattttctggctattaatagactggaacctgcttctttataatcctgacgctatgagaaaccagtgacctgcttgaaaatttcactgttggttgattttgggtagaattttatatggacattgattttactttatttttctatactgatttacaacttattaacagctaaggcaccaaagcattatgaaatgaagataaaaccttcatagaagctactatcatagtccacatggttagtaggacatgctgaatttaatcatttttctagtaggagggatgactttgtgctgaactgatccttagactcagtgacgtgagaaccatgtggggtgattggtgaggttcatggtcacagaacagtgtcttaagggactttagactttctaaagagcatcatgctttaagcaactgtgcttattgtaaatggcagctgagaagccgggtagggttttcctacggggcttaggtcaggggttttcttaccccaatctaatcttcaagggatgattgtgaggagaagcacttcgggaatggtagagtgagaacccccaccaccacattctgctccccaaaaaagcaatgaaaacactggagaaaattgcaaaagtcaacttttttagaactctggaaatcagccaaaagctttcaagtacatgaggagcatttattcaagaaacaggttgaactcagcacagtaggctttggctgtgtaacattttattatgacttgccttttatcattcctgtctccccagctctgcaataactgaaaaccagaagctctgcaaccatggtagtcatgaaaacaaacacaccttacgagccactaacggcagcagaatgggtttggagcttccccaaaaacctcatccctgttagagaattgtcactacctgacatgtctggcagctctctggaaaagccccatttgcaggactttcgttaacctggctcatagcttctttggtgcaaacaaccctatcaccagaacacttttcaaaaacaaccaatgacagttgtttaacactgcacttacctgaggtggcaataccacttggggcacataagggactaacagaaaaaaacggaaaaggacaatatagagaaagagatgtgcatagcaggctttgaaaagctcaaatatattcctgggaattgggaaagccaaatgcatacaaagggctgtgtgcatacccaggagagaccttattttcttctgtgcctgaccttcaggctctgtgcaagcaggaagtaaaagttaaggcagagctataaactgcttagagtactgaaggagtgttccatcaaacacacacagcccatcagcaaaggctgggggacttactgattgagtgcatttaagcaaatctttgtgcatttgttatccaaccactgagtgaactgagcagggacttaaatagccacacaggacaactgcttcacccctatgaacttctaatagggatattttcttaaataagcaaaatgtctttattatgcttaatattatacacaagaattatctaatattaaaatttcactgtttctcaaaaataattgatttaagcaaaatccagttaacaatttatttattatgtcacctttaatgtagagcagtaccttctcccctcatcctttttttttttttttgctggagaatagcatacatgcagagaagtaaaatcatcataaatttatggctcttgcatcttctcagtaacactcttccttaaaggtaaccattgtcctgacttcaaacaccataggctaattatgtctcttttattgttttattgaggaattgcacatatttaggaaagtccttaaggtgccataatcttttttttttttttttttttgwgacggagtatcgctctgtcgcccaggctggagtgcagtggtgtgatctcagctcactgcaagctctgcctcccgggttcatgccatcctcctgcctcagcctccygagtagstgggactacaggcgcccgccaccacgcctggctaattttttgtatttttagtagagacggggtttcaccatgttagccaggatggtttcgatctcctgacctcgtgatccacccgcctcracctcccaaagtgctgggattacaggcatgagccaccacgcccagccaakttgccataatcttaagtgtactgtgtaatgaacatttacgtatgtgtagacctgtataactgccacccagatcaggacatagagtattctcagcacctcaaaagtccttctcatactcccaatcacagcctccttaaggcttgattgtaggttagttttgcctgtttttgaactgtaaataaaaatagacttatttagagtgcattagttttatctgactcttttcactatcattttttcctttcatttttcacagtgccagtgacaactgtatctgttgtccttgagaatgtctcacattcaggatttgtttttttttttgctcactggtattgtcttttaacttgttccactgactcccttatttcttataaattggaggttaaccaaaagggtcttgaatatcatcaagttaatgtttttccccaaggatgcttctttggtggtgctgtgtacttcatgttgcattccatcaaaagttacacaagagtctgactgccccattcttcgtgatgctaagattgattagtgggttcaagttgtggcagcgtaatgtcttcgttagaatgtttctcattgatttttttgtctaatgttttcaaatatattattttcttatgcattgaaaaattatgaattttgtaattatcttatttcttctgtacttatttcctggaattcttatgtaaaaagcacttctcctcatggctygttagtacctttgaaatactgttcattctggaaaagcaaaatgatgcttaattctttaattttcaatgacagttttcagaatatgtgggcattggtgccctagttattgtcaattgtgactaatgagttttacttttattttatttaggggctacatatattttaatattgctatgaactcgtgtttaaacrttttattttcatgtgttctaatgaattgcagggttttgaaaatattctaattgggccaatggggaaagctatacaagaaggtgttttaagagtagttttatattttatccctggtatctccactctgaacacttattctctctgtaggtaaccatttgtggtggcttcttctttatcatttccgtgtttcttttcataaataaaagcacattgtatgaaattgtgtgtgtatgggggtggtggtgcagtatatatgctatttcagccctaggcaatgggaattaaagtgatttagccaagatgacaaaaagatgacatggtagggcctgaatttaaacttaggaatctgacttctgagcttgggtttttaaccactctgctctacttatggcagtcccattgactcccaacccaaggaaaggccaaagaggagacagttgtgattttgctactcttagagtaatacgtgcaaaactaatctgaacacagatttaacagtggaacttgtttttaaaataattgcagaaatgctttgtgagactgcatctgagtaaacttgtgccaagaaaatatatacttcttgattttctttcctttttttctcttttgtattttgcttgtttgtttggttcacattttctaatttggcttagcagtattgacttaatctgctggtaagaaacagtgagaaaaacttattttaagtgctttcagatgttgcaattgttattgcatgagaaatttgtaaaatggaaactttgcttcattcatgcattaactatgctgaggatatttcaggaaaatctgcatgatatggtttggctatgttcccacccaaatctcatcttgaattgtggctcccacagttcccacgtattgtgggaggaacccagtgggaggtaagtgaatcgtggaggtgggtctttcccatgctgttctcatgatagtgaataagtctcatgagatctgatggttttataaaggggagttcccctgcacaagccctctcttgcctgctaccatgtaagacgtcccttgctcttccaccatgattgtggggcctccctagctatgtggaactgtgagtcagttaaacctctttcctttactaattacccagtttcgggtatgtctttatgagcagcgtgagaacagactaatacactgcatcaggacaatttttagtaccttatatcaagaatacaattgttgcaagtagataactttaaaactgacaaaaaaatcaaaatgaccataatataatttgcctcttaggttgtgtttgagactctctcttcgggattctcagaatttactcattattttatcactgaaagtttaagctacttttccgtggcactaactagcggatagctttggccaacctggtttctctttgatttaggaattaatgttattaaaatttccttggcatgtttatgaaatttgagtatgatcaaacaataatttttatagagtttgtaactctatgttttttcccccaaggaatgaaaaacgatcttaattaattcattcatttatttttatgtattgattttttttttgagatggagttttgctcttgttgcctaggctggagtgcagtggtgtgatcttggctcactgcaacctccacctcccgggttcgagattctcctatctcagcctcttgagtagctgggattacaggtgcatgccaccacacctggctaatttttgtatttttagtagagacggggtttcatcgtattggtcaggctggtctcgaactcctgacctcaggttgatccgcctgcttcagcctcccaaagtgctgggactacaggcgtgagccaccatgcccggccctttttttttttttatgacagagtcttgctctgttgcccaggctggagtgcagtggtgtgacgtgatgttggctcactgcaatggccgcctccctggttcaagcaattgctacctgcctcagcctcctgagtagctgggattacaggtgcgcaccactgcacccagctaatttttgtatttttagtagagatggggtttcgtcatgttggccaggctggtctcaaactcctgacgttgtgattcatctgcctcggcctcccaaagtgctgggattacaggcatgagccactgtgcccagccgaaaatctattttaatttatgttttgttgttggattcttgttttttacttctcagtatgatgagattatttttgatgtggctttttgtctattatattcttagtatctcttcaaattgttgtttaaatagttgctcttaaatatacaaatttggagaccaataagttatgaagtacttcacacttctggtttggggcaaagtttgagggtaataaaagctaagattcagaatgtgttattattcttttaatcaaaaatatgtattgtgcccttcccaccattaggtaattgttaggaaaatggagattaataaaacrtggttctgagcctgaaggaacgtagactgatagagggaattggacctgacagtgtatccaaatggaccagattttcctaactggcataagaaggtacatgcgaaagtactttgaatagtagacatataagcttcaagaacgtgttcatcagccttggaaaaatgtatggcattggtgatatagaacaagtgtcattcataatatctgcataactgcaatacagtaataagtagaggctatttcacttttattctggacaatctccattagaaaaattgaaatagatgatgtttctctgtagacgttttcccacctctcatgtttgattcctttttcctagccattgcatgataccaatatccacatctttttccactgttgtgttcccactaataatcaattttgattctcaagtatacacttgccagtcttttacccgtcctgatgttttgaaaaaggttaccacttccttttctttcaaaacccagtggtaacaagctgtgaaattaaaaacatacttcccaaactggcaaaaactattatttcaatgaaaaaagtaaaagtagaatctattaaagtttatagagaaactggaaatatctgtgatcatgaatgctcacaatgattgattgcagtgtgatttctgtgtgtgtctgtctgtgtctgtttccagtcagagttagagaggctctaagatagactgggactccgaattcttttaatatttatgtttgatttaaattgatgtcatgattccatttgggacagttctctttaagttgatatctgctgaatacttgaagttttgaatacaacagctcaacagattgaaactagttttctttttcttttttttctttcttttttttttttgagactgagtcttactctgttgcccaggctagagtgcagtggcatgatctcagctcactgctacctctgcctcctgggttccagcaattctgcctcagcctcccgagtggctgggattacaggtgcgcaccaccaygactggctaatttttgtattttttagtagagacggggtttcaccatgttggccaagctggtcttgaactcctgaccttgtgatctgcccacctcgacctcccaaagtgctggcattacaggcatgagccactgcgcccggccaaaactagttttcatgtgccgtctttgcttctttttttttttttttactcttcccttactggatgtatcccacgtctatgctttgtcccctagaggtgaccttatggtggatgatacttgtattttttagaatcttgagatatgagttgttgataatactttgtggatagctacaaggtcactttttggggaaactgcttgataaatgaaaacttctttctgaatatttcataaatccacagtacaaataagattttcaaatgtcaaaatagttgatgattaaagatagatttgcaagggcagtgcagaggatgtagaaagataagagagagatgccagccttcatttttttcctgtattactgtttctgtatttgtctgtgacactaagccacaatgaagcctttcttttctgattagtaaggtaatgcaagttcattgtacaccacttggaaattatggacaaatatgaaggacttaggttttccagccaagctataactactatgaacattttggcatatttcttttacaactttaaatatagattgtatacatatttattttataatccagttaagttcctattgtacatataattttgcagtatgtttttccacttattatctcatgaacgttttccatgttattaaaaattatttgagaatatcatgggatggctacataataccctataatatgactgtaccacaatttaccttttcattaatttctggacagttatttagcttctaattattatgaatcatgacatattattcaccgttgaatttatataatctttggtggcacatatttatttatttatttattttattttattttttttgagacggagtctctctctgtcgcccaggctggagtgcagtggcgggatctcggctcactgcaagctccgcctcccgggttcacgccattctcctgcctcagcctcccaagtagctgggactacaggcgcccgccactacgcccggctaattttttgtatttttagtagagacggggtttcaccgttttagccgggatggtctcgatctcctgacctcgtgatctgcccgcctcggcttcccaatggtggcacatatttcttgagcatgcaccttattttgcttatcaagccatggcagataatttttttcatgtrtaatcattacttttttgtttgtttccccttgtactcttatcctttactgaaggaagttgttaaattttaaaaacaatagctttttttaagtttgagatgtttgtatataaaccctgaaataggttagaaggtaaaattacaaatcctgatgacagcagtttatgatggaaatgcttacggacctttaaatatagcttggtagggaagggtgggagtgaatcaagttgttacagtttgttccaggaaggacattttggatgaatgccatctgcttttacaaagatgtcctgtgattttagttatatttgctccacttaacctttcccaaagtgtgctgaaacaaatgtatgtggtacactaaaagaaattaacataattataattcctttggttaattgaaaacaggcaattctttttctccaaagatgttacttgaattacaaacaaagtactgaatttgaacatggtttgggcatgttagataacctagatcaaggagactgcagaggccagttcatctagccagctgccttcctggtggactatcctttatctattttgtgtacttgtcagagtgagaaaattccaagaacttctctagattttatttcagtgatttagagtcttccttgttaagaataacaacactcatatctgagcttttactgcagcaagcgtggactctgcaccaggtcgtgtgctgctgactttatgtagcttcacaatcctctcaaaattgtactggctgtgcctcgttatcccaattgtacagatgtgaaaactaaagtttagggagttaaatcacttggccaacctcacacagctaaaaaggtgtccatttttggccgcggaaccaaagctgttctggacagcctacaagctgtcagagagttcttagtcatatagttaaccgattacatgagaaaatgtcttaaaaattgggtttctaaaaaaaatgttaagcaaataaaatgaacaaatttagtgtgcaacttataagcatcagaaagcaaatttggacacttaatagttgacttcctaactcttctcaaagggggacacaattaggtagggaggaaaaaatcctcatttttattcttcctggccagagatcttggcaactgggaaagtggttgctattattgtgactttacccattgtatgcacagattcatacttccaggttctccatcctacaccttttataaacaccatgtttaacttggaaagggaaaatgttattcttggcaacacttatataccaaaagtagaaactgtaggggaccaccaaaggatattatcaaccaggaagcagataccgtaaagaatatatctaacatttaactttaatactgttcacagtgcaggtcttcaataagggagaaaattatgattcaaagtttactaggaggcagggaaaccacaaaatgagatccgtgtcccatgtatttatgactagaataatttactgatactttgtgcttcttattactgttattgccacatatcaagaaaatcattagatagttgatagggacctggcattaagatgagcaaagcagttaaaggacctgctttttgagaatagcagaatgagagaccatagtttcatgttagcaaaaatgcacagatagggtacagatattaatacaatgatagcattcgtcactgaatcctcaaatgttaagactcaagggtctctttgaaaattaaaagaaaaataaaagtgaaaaagtactactttacactgttgaaagtaaacttttaagaaatgttactaaaatgttattctaaaaggggatacaagctaaaaagaagttggtagattcacagaaaacagagatcgttcattgctgacagattcacagtaagtaattatgagaagttgaggatattcacttttgtattaaaatcctgggttaggagaggctcactggactaaccaagaaggccggttcttctctgtagagttcaccagtgcttcgcagactacctgtggacattgatcttttgtaaaatagagtgaaaataagctagtagaaaaagaaatggaataaaatayaagatctataaaatatgagtccaaaattttattattagattgaatagacataaaattactctgacaaatttctgtaaaagtttctaagagcttccagtcagtttctagacctatctcagattataaacaaccaattcatggaccagcacttacccatggcccacattttgtggagcactgttctcagcttaaatagaatctaaaactttgttctcatgttagtgcccctttctgtcttctttattcctgtacttgcttgtccttttactatgcttttttattctttatttaaaagtagattgaacataataattgtgagctgttaaggtaggggacacattacaggtacagatgtatgtctgtttttgagtttaataaaatgaatatgcaaaatcaaaaatgacatgtacctataygtgtacattaatatatggactattggattttaagactctacaccattgtctgttagaaatgtggttcaaagagtacctgtatcagaattagctgaggtaactgtttaaaaatgcagactttagggggcagagcaagatggtggaatagaagcctccactgattgtcctcttacagtaacaccaaattgaacgactctccacacacaaaaaaacaccttcataagaaccaaaaatcagatgagcaatcacagtatctggttttaatttcatgccactgaaagaggcattgaacagggtaggagagagagtttttcattgctgacactgcatcccccctatcctccagcagcagcaagtggcacagagagagaatctrtgcgcttaggggagggagaatgcagtgattgtgggactttgcattgaaatgctgtgctgtattgtcacagcagaaagcaacgctgggcagaacctagctggcacccacagagggagcatttagatcagccctagccagaggggaatcactcattctagcagtcagaacctgaatcccaggaagcctcgccaccatgggttaaattgctctgggkttgtaaataaacattaaaggcagtctagaccacaaggactgcaattcctgggcaagtcctggtgctgtgctgggcttagagccagtagactttgggggcttgtgacctagtgagacaccagctggggtagccaggggagtgcttgtgccatccctctcccacccccaggcagcacagctcacagttccaaaagagacccctgcattccacttgaggagaagagaggaaagaataaagaggactttgtcttgcaacttggataccagctcagccacagtaggatacgacaccagacagagtcttgaggcttccattccaggccctagctcctggatgacattttagacacagcctgggccagaagggaactcacttccttgaagggaaggactcagacctgtcaggattcatcacctgctgactaaagagcccttgggccctaaataatcagcagcagtatccaggtagtactcaccatgggccttgctgagacttggagacatgctggcttcaggtatgacccagcagattcccagctgtggcagctaaggggagggactccttctgcttgagaaaagaagagggaagagtaaggggactttgtcttactgcttaggtaccagcttgtccacaatgggtgaggacactccccactggtgtcctcaattctaggtcttggcttttagatggcatttctggaaataccctgggccagaggggagcccactgctctaaagggagagttccaggcctggcagcattcaccacaagctgactaaagagctttgtaagccttgaatgaatatcagtagtagccaggcagtgctcaccatggacctagggcagtagtggccatagggagaaatgcctctgtttgtggaaagatgagggcagagtggaaggactttgtcttgtggcttgggtgccagctcagctgcagtggaatagaacatcaagtatattcctaaggtttcctactctaggccctggttccttgatggcatctttaggcctgcccaggactgaggggattttgctgccctgaagggaaagacacaagcttggctagctttgttatgtgctgtgctgattgtagagccctaggcccttgagtgaacataggtggtagccaggcagtggttaacatgtgccttgggtgagacccagtgctgtgctggcttcaggtctgacccagtgcagtcccagtggtggtgacaacaggagtccatgtgtcattcctctcttaggttcagagagctcatcagtgagagagagagagagagagagagagagagagagagagagactccatttgtttaggaggagtaagggaagagaaaaagagtttctaccaggtaatccacagaattcttctagatcctatccaagactaccaaggtggtacctataggagtctgcaagactcacgctgttactaggcttgggatgccccctaatgaagatgtggctgcagtgatcaaaaacttagatcacaacaccaaagtcccttaaatatctggaataccttcaaagaaagacaggcacaaacaagcccagactgtaaagactgcartaaatacctaactcttcaaagcccagaccctgaagaacattcacaagcatcaagaccacccaggaaaacatgacctcaccaaaggaactaaataagacacyggtgaccaatcctggagaggcaggtatttgtggtcagtcagacagagaattcaaagtgactgttttgaggaaactaaaagaaattcaagtaaacaaagagaaggaattttgaatcctatcagataagttaaacaaagagcttgaaataactaaaaagagtcaagcagaaactctggagttggaaatgcaactgacatattgaagaatgcctcggagactcttagcagcagaattgatcaagcagaagaaaaaattakcttgaagacaggctatttgaaaacacacagtcagaggagacaaaaaagaataaaaaagaatgaagcatgcctacaagatctagaaaacagcctcaaaagggcaaatctaagttattggccttaatcaggaggtagagagagatagtggtagaaagtttattcaaagagataataacagaaaacctcccaaacctagagaaagatatcaatattcaaatacaagaaggttatagaacagcaagtagatttaactaaaacaagactacctcaagacatttaataatggaactcccaaaggtcaaggataaagaaaggatgctaaaagcagtaggagaaaagaaacaacgtacaatggacttccaatatatctagcagcagagaagtgcacagcaaaactgcaatgagatatcatcttaccccagttaaaatggcttttaaaatgctggtgaggatatgaagaaaagggaacccttgtacaccttggtagaaatgtaaattagtacaaccactatggaaaacagtttgsargttcctaaaaactaaacattgaactaacatatgatccagcaattacactgctaggtatatatgtaaaagaaaggaaatcagcatatcraagagatatctgcactgtttgctgcagcactgttcacaatagccaagatttgaaagcaacctaagtttataacagcagacgaatggaaaaagaaaatgtgatatatatatatgtatcatatatatgtatctcatatatgtatcatatatatgtatctcatatatatatgtatctatgtatctcatatatatatgtatctatgtaccatacacacacacacacacaaacacacacacacacacacacaatggagtactattcggccatgaaaaagaatgagatcctgtcatttgcaacaacatggatgatactggaggtcattatgttaagtgaaataaaccagggacagaaagacacacttcgcatgttgtcacttacttgtgggaactaaacatgaaaacaattgaactcatgaagatagaggatagaatgatggttaccagaggctgggaagggtagtgggttgcgggggaagtgcagatggtttatgtataaaaaaatatggttagatagaatgaataagatctagcatttgrtagcacaacagggtgacaacagtcaacaataatttattgtacatttaaaagtaactaagagtataattgaattatttttaacacaaagaaaggataaatgcttgaggtgatgaatacttcatttaccctgatgtgattattatgcattgtatgcctgtatcaaagtatctcatgtaccctgtaaatataggcacctaccatgtacccacaacaattaaaaattaaaaaatgcaaaygcctaagacccatcctatacctactgaatcacaatttctgtaatttgctctatggagtctgaattttaaacatgagtcccagatgattctaagacacgtaaaatttaagaactactctttcagcatgtgggaatctgtgcgatatgtttaattctgaatcatacactatggtggtaaagtataaatgccaattttgttcactaatgtgaatatgttagagtctctgaatgtgttctttcaggagagcatctccagggtatattattgtgttcattgctatatgcaaagcattattggaaaagggtaatgttcccattttacagacagaaacaacatatatatacacagataaaataattttacatctttctctactagtttcatcttaattgaagatttttgcatgcttaaaacctattcttaaattccccctggtttacaataatataatttaatttggaatgaaaaataacatagctgaagaacccattaactgtgcagttaaagagttataaattgaattagagaagggggattgtatttaaaccccttaatatttcacttggaaacatttgtgtttccattaatatggagttaatgcaacgttaacacaaagttcaccattaaggaaaaatataatactcttgatgttaatatgaaattctcccatgaggaaaaatactacatcctaagagcttcaagacatatgccaatcaaataaagcagataccactatagctgggtctttaattctgtggtggaagtaggtgaagggaaaagaactacatttattctgatttgtgtatagctttcagagtttttggcacattacatatgcttgtgggtattgatctgttaaacatagataactgagggtcatttatttttgtgtacgaaagtaatggatcacaatgctgatattttggcttgaatggacattcctagaggtatttccttgtccaccgaagatgaggaaatcagtcctttgggaattttcttctcttccaaagcatattaatagtttcccagataaaactgaaaaactttaagaaagtaacaagtccttaattacttttactaaactcattgtaccacacaaatttcttctgaaattgtgcagggttctgggaaatctccctctgcacatttcagccttgctgtggtgctcccttgatcaagttcctggaattctctgagctcagtttcctcatctaggggctaagaacacttctcagaattactgtgagaattctttcagtggatgattcttaattactgagcgtaattcttgacatttagtgaatggtaggtagttattgtggggggaagctgtagaagagtggcaaaagtatgggtaagctttgatgttatacagacccaagatttgaaatccagctagtttctggctatgtgatcttctgtgaacaagttattcaatctatcccctagttttcttcatttatgacatagggattgttactctggtgactctgaggattaaatgagtgtgtgtacacacttatagggcctagcatgtattcagttattataacaaataatagtcatgatcgtttttagtgagtttaacggcctactttctaagccaaatttaaaaatacacgtaktttgtacacatgtatcaacttgggtttagatttgaggtcctacccttgatattttagcagctacctcacttttgtatatattttcaaaaagctttctgatttatacacagactgatgtgtattcccattgaaacattttgggaatctgaaaacagagtgacaacgggacaagcattcctctggctgctttaggaacacagggttcgaagaaaaagtctccaataaaaattgcagcagataggcagacacatccagtgaggcttcaataatgtatataagtgatgtcagcctcagaggcatgcaaaatgcaaaacacaaaggaaattcataatgggattttcaggaaaagggttgttccttcctgatgtgctaaccttgattctagttgtgtttttagtaccagcataaagataggtggaggaggcactgctgaatttttccattgccaatttgtgttgtaatctaaggactgtgtctttgctcttccctgctttacttgcaataaatattctgcgagctttggggaatgagctactttagttaagtgatgtctttaattgtgtataattaatccattcagcatccataaatcacatttccacccatgggcatccttgctagatcaatagctttgaatgttgaaaactgtaataatcaggtgggcttgcagtgggagatctgatggaaatgggaaagataattgggggataatttccattccttcattcttaagcttccctttctatccctttacatcaattcttgaaatttctagatgctgttctccttcaccagcctcatcccttcagagcatggttcatatgccaatgccttgagtgagctttctctttttctcctgaccacgtcatgttgatggcccatccatactctgaggatcttttctttttcctttgtagcatgtgtcataattgtaattaaagaattcattttatatttatttaatgtttttctctttaaaatataagctctgtgagggcaggggctatgtttattttgttctcagctacctcctagtgcctagcaccatatgatatcatagtaagtaaaaacataagagtgttttgttgataaaaagtcgttattaatgtgcttccccattttatttgttgctcttggttttgctggactttccccacaaaggggtgtggtttggagaagggaaagcatatgtgaattatgatactctggatataccttctcaatataatcatttgctatgattaaagtagtactggctgaattacttgtgcttaaaaaattaccatcccagtgaaagagtacatgtgtgatggcttgaaattgaagctccaacattcatcaactgctgtggccctacactttttagtttctttcttggttagctgggaaatctaattccattatgatagtgtcttatgctggggggaagtaggttttctccatataggaaaatagatagtcacatgtaggtgttggtaatacgtgggtaatccagaacctagagcgcaggtaaagtggtatatgtaccaaatgttatggtatttggaaggcaaagaatcattgcttggaggaccagagttataggagcctcaggtgggattcagagaccagggagtgagtgatagtaagagctgcaccataagcagagtaggtgagtctctcttctacccaacagagtctattggtccataactagaaagtagtcaagagctcaagatgatactctattcctgcctggggataaaaacagagaggcttacattgttaagaagtctatttgttgtccataggctgtagccaactttgatgccaaaaagaggaaatatatttattctttctagatttcttattctttcttttcctcctttctttttctttttagagacaggatctcactctgttgcccaggctgattagcattggcaggattgtagctcactgtagcctcaaactcctgggctcaagcgctcctcccacctcagcctcccgagtagctggcactacaggtgcatgccaccatgccaagctaagtttaaaaaacatgtttttgtagagatggtgtctcaccatgatcttgaactcctggcctcatgcgaccctcctactttggcctcccaaagtgcttggattataggcgtgagccatggttcctggcctagatttatttttcttaatctcccagtggtgactgagcccactgtggacccattggccacctaaattagtgaggttgctggcattttcaagagtgttatatgaggaaggcagagtatcttaaaagagcttgggtttaagtgtctttcagatgagactttaaatcctggctgttatcacttcttctcggtgagccttagttttctcatctgtaacatgggcctaatgacactactgaccttattcttagagcacagtgacactcatttgatactatttttaaagcatcttctatgtgtccctggcacatagtaaccattctgaacatgcttgctattattgttgtttgctaggacactggaaagtcatagtgatttgttctaaaactgggctgggtttgcatgtccagaagaggcctggacagggtgatggtgatcctggagtgcctggcttgctgtgttcactcatccaattccagaatcagcccaaagctctgtggcccttcgaagcttcagggcaaactgtgtctgggttaagggaacaatagagaggtaattgcagccatcaaatgtagtgtgaagcttaaatctagtttgcatcttttcacagcaaatgtacctgacatgtaagaccatttcatctagttttcctggaggttgctggagagagatggtcttatagcctttgattacattaaaccagcaccttgtaattgcaaccactgacacaggtgggctaacagcttcagaaagcccctttctccattaaagaatggtggatctggactggggatttccctaccccaactctttccagtataagacaagagcattagctagattgatgattctatctgttttcacattaaaagtcaggtttgaaaataacttctgcattgataaccgcatgtttgaattttcattaaagctatattacgtttgaaaaagctttagtcctttttcacagtttgaaatcacaagtccacaaatttctctctggattagttaaaatactgtaagcccatttcagtaacctaaatgaatgctatgtctgatttatggtaatggtaagttggagttctcaggtagtgaccactctattctgagtaaatcaaatagcaagctcccctttctgggattgcagtcagcttgtttgacatcagcccactctgtgtgtgtgtgtgtgtgtgtgtgtgtgtgtgtgtgtgtgtgtgtgtgtgtgtgtgtgttacacataactcattctttggaattctcccatggaaaagcaaaggaaggaagctgaggggaggatggggcgattgcatcctgtaccctttacaggggtgtggccacgactgcctcagccgaggggatgtgatacattttttcacttaggatgcctggacagtgataagtcttgatgaaaggcaggagtggcttttagtgtcattcatactggacaggagcctcttgttagagacctgccggaatcctgtctagtatttcatttctagaactttgggggaagaggaagagaagcaggagcatccgtgaagtggacctgcagagctttcacagccaccttanaactccagacccgccttgacttcagttcagctctggctgctcctatgaatgaaactgccacgtgggttggccaggtgtatgattttaaggaagaatgccatgtttcttcttgctgctgcntaagtctcatttgactgatggattttaaaacctttgggattatatgaggtaagatattggaaagtgctgtggaatgaattccactgtcacttgatttccttgtccagctgtttgggatttacagttttctctgcctttcactttgaaaagctcttaaaagtggtcccctcccagctggctgagggacaattattaacaaactatgtggcacatttatcacttggcaactggatataagagatcagtgctgagattaaagcatgcaaaactgttacatatagacagtcacctcattgtgaatttttagggttctgcttgttttaaatggattgtgttgttaagtacaggttctacctacaagaaaatgcttttgaaaattgccktaggttgagtctaaatagatttcatggccggttatctgtccctggaataatcatggtttttgacaaattttaaagttcttctctcagggagtgagatgtgaaaacagatttacttttagggtaaagttcaaatggacaagtattcatagacatccatattctagagactgttgattgaatgacagtcttacagcaacacttttaacttgagaataaaaccatggtttttatgtagtatcttgtggcaactgtggcaaactgactcagttttctatagacctctaaaatttgcaagcagaaaatccactttaattaattatttaaaaactggaacaactccagggcaaaattttagttttatcctaattccttacaagttagttttatacagtgaaattttttactttttggctattaaatgccagtcagtgattctcaagaggggtggtgatgttcatttttattgccatgtagggtgcaactggcatttagtgcctgagagccaaggatgctaatgtttctgcaatgtattggatagactctcacaaagaattacccactagaatgcctgtagtgccctcattgagcacagtttagtgaaaagtatgttgaagatttagtaaagacttacatgagcagtmatctctggaaaggtaactgatcttctgataaagcagttttggggagggacccacagagagcagtcacttcataacactattctttaggatcaggagcaatgaatgtttcagaaatatttctcccacctgttttttttcctattttaggttcaggggtacatatgcaggtttgttaggtaggtaaacttgtgtcacaggagtttgttgaagagattattttgtcactcaggtactaagccactaggcttaatttttttttctgatcctstctctcctcccatccttcaccctcgagtaggctccagtgtctgttgttcccttttttgtgtccatgagtctcatctcttagctcccacttacaagtgagaacatgcagtatttggttttctgttcctgtgttagtttgctaagaataatggcctccagctccatccatgctcctgcaaaatacatgatctcattcttttttatggctgcatagtatcccatggtgtatatgtactacattttctttatcccatttgtcattgatgggcatttaggttgattccatgtctttgctcttgtgaatagtgctgcagtgaacatgcgcaggcatgtgctattatgatagaatgatttgtattgttttgggtatatacccagaagtgggattgctgggtcgaatggcagttctgtttttagctctttggaggtttgctaccctgctctttttgtgtaatttttttttagagacagggtctctctctgttgcctaggctggagtgcagtggcatgatcatagctcactgcagtctggaattcctggggctcaagcaatcctcctgcctcagcatcctgagtagctagaactgcaggtgtgtgacaccgtgcccagctaattgtaaaaaattatttgtagaggcagggtttgctgtgttgcccaggctagtctctaactcatagcgtcaagcaatcctcctatcttggcctcccaaagtgctggtattacaggcataagccactgcccccagccattcccacatgcttctaactaatattttcaggctgagattagatgagctccaacaagtatttggtttagttcaataagagtaacctccttctttaaataaaattagctattatagttcctcatccatattatatgaactcaktaagatcaaaggaataatttactcctaaccaaaggatgcttttgtattgaacattgtatttcaaaatgattgtatatttctctgaattttcagccttaggtgcaatgtaaaagtaacatcctacaggttctagaatttgctaaacttcacttactattaaaagagattatctttgagagcaggcttaatatatgcatggttttgtttgtttgtttgtttgtttgttttaagatggagtctcgctctgttgccaggctggagtgcagtggcaccacctcggctcactgcaacctctgcctcccaggttcaagcgattctcctgcctcagcctcctgagtagctgggactacagatgtgtgccatcacacccagctaatttttgtattttcagtagaaacaggatttcaccatgttggccaggatggtatcgatctcctgacctcatgatccacctgccttggcctcctaacatgctgggattacaggcatgagccaccgtgcctggcctgcatggtatgttttaaataattagaggaaagaaaggagggtgtgtaatcaaattgctattatcattcctggtaactctttacacacatagtgacaaggtagagattctcaagttgaacactatattcaaggtcctggtttcattgtgttagggagatgagggcacctccatctggttctttatcaagccaggcttaaagctcattgacagaattttaagctttgagtgaccttctgttgaagaactgggcagtatggagatactacatgtgagatactgtgctatgctcttagtggcatagtttacaatcactgtacagtaaggacttcacccatgctgcctgttcttttggcatctatggattaagaaagcagagtttcaagaaacataaataagcatgcctttgttttaatttatgtatatttatgagaaattagaataaaataaattttaaaagtaaaagctaaggaaatgaagttggagaattgtgcttttgaktaatgaaatgaaaacatagctccctttaaaagaaggaataaatagagtttcttttttttttttttttttttttttttttttgagacagagtcttgctctgtctcccaggctggagtgcagtggcgcgatctcggctcactgcaacctccgcctcctgtgttcaagggagattcaagcaattctcctgcctcagcctcccaagtagctgggattataggcacctgccaccatgcccagctaattttttgtgtttttagtagagacagggtttcatcatgttggtcaggccgatctcgaactcaagtactcaagtgatccacctgcctcagcctcccaaagtgctgggattacaggtatgagccaccgtgcccggtccgaaataggtttttaaaactcgtatgtttagctcctgatatatgccaggttcacatactatactcatgtactcctcacagctttctgagccgaagtgtgattactatcattttatagattaagaaaatggagtctatgcagttttcaagatttgcccaaggtcataaatccagcgaatgggagaaatggaatttaaacccaaatcagctgttacccagcagtggcagcctggcaatatgagtatcaagtggtgtaatattctcattgcacctgtaatgtgtgatatatacatagaaaaggaaaatgtacttytgttggtgtattagtccatttcacactactataaagaacttccctaagactggataatttatamacaaaagagatttaattgactcacagttccacatggctggggaggcctcaggaaacttacgatcatggcagaaggtgaaggggaagcaggtaccttcttcgcaaggtggcaggagagagaagtgagcaaaagcagggaaaactgccttacaaaaccatcagatctcatgagaactcacttgctatcatgagaacagcatggagagaaccacccccatgatccaatgacctccctccctcgacatgtggggattacaagtccttcccttggcacatggggattacaatttggtaatttgggtagggacacagagccaaactttgttggtgaataaaggtttatgtaggctgaacactagtgctatagtaaaaatgttgcattaagggttttactgagctacaaagtgatggacaatcagagctttatattttgactgattaaaattgagtgtggggaaaattggacttttgggagttgtttgaataaagagagggaggagaagagcatggtggaggtagacagtgaaattacaggatggtgtttgacttggagagggcttagaggaggatgagtgccgcccccccgcccaagccccccaccagggttgtcaaactgaagagtgcgagattgggtcacagccttttgcactaaggtggatatttgtatcggctatagctctgtctgcacagggaggatggagaaggaggtgagtcatgtccaggttatggctcccatgcttggtcgttggcctgggcatgaagcattgtgtgccatcctctcttgccgttctaccatctgttctgcacacagcagccagagttatctttatcattttttaatgcagatcatgtcacttccctgctttaaatcctttaatgactttccattatcctcagagtgtggtctagacagacagtaaggtgtagtgttgaggagcatggtcactggagcaagactgggttcactctgtgcatacagtaattccaccttatccacgggggatacgttccaagacccccagtggattctgaacctgcagatagtgctgaaccctaccatacactgttattccctatacatatatacctatgataaagtttactttataaattaggcacagtaagagattaacagtaactaaaacaaaatagaacaattataacaatatattataacaaaagttaggtgaatgtggtctctctctctcaaaatagcttctttgattgtgatctcttcctctgagaatatcttactgtgttgtactcacccttcttcttctttttgtgatgatgcaagatgacaaaatgcctgcgtgatgagataccatgacagctgatctgataattgagatggctactaagtggctgacaagcagggagcatctacagtatggacctgctggacagagagatgatttacatccgggcgggatggaagggacaatgcaaaatttcatcacactactcagaatgtacacaatctaaaacttatgagttgtttgtktctggaattttccatttaatattttcagactaaggttaactttgggtaatggaaattgcagaaagtgaaactatggatacgaggtgactgccgtaccagctttatcatcctagacaaatttcttaatctcttcctgttttactctcctcattgttaaaaattttatagataatagttcctaccctaaagggttgttagaggtttaaatgagtgaatcaaagtaaaacactagaacagcactggcacatagtaggttctagagagtgttattgttattgttacagtccggaagctggcccctgcctgtctgtttctctcatgtcttcttctcccactctctgcctcatccatgctgctgtagctgcatcacttggctgttccttggaacatggtaggcttgcttctgtttcagggcttttgcatttttgtgttacgccttttcccaaaatctccctgtggttcagtcccctgcttcattcaggttcctgttcaaatgcttccctgaccaacctatgtaaaattgtactctcctaccaacctctctccaccccattcccaagctttctttctttaagccagttactactacttgacattacatttttgcttatgtatctgcttactgaccactttccccaccagaccaaaatctccaccaggacagggactttgactcttttactcctacccaaatccctgtcacttagaatattgcctggtagatagtagatgctcaataaatatttgttgaatgaatttttgtaaatttcattttctctatcccttctataattgctgttttcattctgtctttgaggcttaaaatgttcttttcaactgtctttggcctgtttatccaaatggaaaaagagcatttactctgctctttcttatgaaagttctttgacagcaggaagtcttgttctactactttgagccttgttacaggggataggattgaggcattttatcatcattgtcatagaaaattcttgaagggcctaatgttggatcttgtgctaaggtgtttaccgagctaccaaatgctggccatacttcaccatttaaaagggttcgggtttacattttcattataaagcataattgccaaaggaaagtagccatgcaagtatgatggggaaaatcatgtactgacagcagtgtgtacttgaaagagactttggaaatcttgaagtctgaagttttacaaagaacacctcattcctgctaacatttttatcatgaaattggatgcaactattgcaaatgccttattctgttttcacatgagatttatagtaagttttacaatatccaccataaattataagtttcttgtttgatgtaagtaagcctttagtaattttccatttgagcattatcaaagaatttgagttctcacaaatcctatgtagtaaaacattcagtttggggaaaaaaatcttaatttagaaatgttctgaaaatccttgtcaagaaggaactttaagatgtttcaaaggccttactcgaaactggttatgtgatcttaggtaagcctcttaatcttttttgtgctttggtgtgaccaactgtaggatataaacaaagttgaatgtcacatcagcagtgtggatgaattaagtgtgaatgttaattggaaattcttattataaagatccagagtttaagctggttttgtggaattcgcctgataatgcttaccaagaatttgcaatgttgtccctgtttttctctacactgaataagatggagatctctttaaaaaggctttgtgtgttccatggtgaaaatgtyatttcttttttgtatatttaaagaatatagtactaatattcaattaatatcatataatcaaaagaagatatcaagatactgatgcaggatttttctcagcccccacagcaggaggcaccctgtctagtcagcccaccaggccttggttggcttgcactccagtgtggaacccagggccactgcgactgtgcgctcagcccctagcgggagggagtatgtgagcaagtgagtgtggggtctggccggccattccaaccactggtacagcagcaggctccatgcagagcttgtggctggaccagccatgtcaccctgatgggaatgcggtggtgcccaggcaggggtggccacaaccctgaagcctcagaaggggtgttacaatgtggtaattagctcttttagtcccactatctgcagcctgactgatggtggtgtattaacagcccagttagctcctagccccactctggcctgtggctccagagctggggcttggccctgatgttgcttcctgttgcatggggtggctgccctccactggcagagggcaargggccacagtattaacagccttttgattacttgcattyggtgggtcctgagttcttgccccacatccaagaagaatgaggtcatactgacaattgaagggtgatgagrttggagaattatattgagcagtgaaacagctctcaatggagaggggacaggaaagtagtctctaaccctaagtcaggtcatctatcaccctaagtcaggttgtctctgccagtgtggctgagtctgaggtttttataggcacaggatgggagagggacagaccataggcagtattggaaaaggcaacatttggttggttaaaaagcattattcagaaagaatcaatggggaaagggtgggcaaacatgaacagaggttctcactctgratcacggctttcatccagaaccagcagtgtggtctttcagccttcaggctgtttttggcttgaaggtggcatttcatcagggattcgcccctatgtacctaggcatttatctgcctcttgtcattatcaatatcttccattcaaccaaatattagcacctactatgtgtcaggttttattctaggcacttgggatacatcagtaaacagaatagacaaaattccttgacctcttggagtttacattcaacagaagaagacagacaatatatttaaatgtgtaactagattcttatagagtatgtgagaagatgataaggattatggataggaaattgagcaaagtaagatagtctgggaatgctggaggaagacttgcgtttcaaaatgaagcagtcagagtaggtctcattgaaaaggtgatgtataagccacaaaattgaagggaggaattgagccataacagtatctcggggaaagttccaggtgaatgggatggccagagcaatgtccctggagccaaatcctgaccacacctttggggacatcagggaggtcaatgtggctggaagggggtaaggagcgaggcggggaaagtaggaaagggtgaggtcagagctgtaattggagggagtgggaagccatgtcctgtggacactgcaagccatcataaacactttggatttcactctgagaagaatagggagccactgaacagaagagagacatgtttctatatgccagtgtgacgtgtgtttgaaattgattcttttgtaagccatttctgaactgctccttattatctggtatactgggccatgactgtaactcttgggagggatttactgaaatgagtccaagtgtttcttctcactgggctgtcagtaatttcttttccttgtcaaatgagtgtttaatcaaatagtttaggaccaattgtttttatctaggaagttgctgagcagagcctcctccctttgcctagtacatctagaagtgtgagtgtgcaggtgacccctcaggggtgtggttcagacttgactatatgtcacccagtttggatctagtaagacatttcacattctccagttggctccctgcttgtgataccctgctatagaggatacarcaataaaacatctctcttaaacttgatagtacatattgtgagttcaacaagtgtgccctgtgcctctccactctgccagcattcctttccagggcagtgatgaggtccatgtcagagatagtgtcctgcacacctttcagtgcacagatattcccaaggccagaccttgcagtcttgtcattggctcttctaagcccgtgttgtttttttctacccagtaatgtgctggtgcccatttctgcattctcrggcacactgttctcagcaaatcattctggtgccattcaagtggcttcaaagccgtagtcgccagtaggtgccctcttagcaggtggcctggtggtgccatgattgtcagacacactcttgtctccattcagagaagactttaatataaagaattgggcatctaaggagattgtgttaaaaactaatgctaagtttgcaaattcataaggaagtttgccagtgaattctcctagcacttaataaaattggtgctccatttggtacattcagttgtgaagacccacctgtcttccacagtatagctcagctctcaaagtcgtcgtcacagttttctcctcaatgtagctctgggattccagtaactggcctggtacttgctggtaaatttgtaccattttaacagtcaagcagtccctctgaaggggtgttctttgcccaggtctagaatgataatcttgattcaactcctagcttagtattgctctccaatcccaaattccagacaggcatctaattcccgagtgtacccataataagatcaagcatctttatggttccaatctcaggacatagttgttttcaatttatatacaaaagataattgaaaatcaatttagaatttatgccattttttaagaaaatgtagagaggagatggaattactttaaagcaaaagaaaatttgtaagtattatttttctgctctctggcacaatcggtcacatggcatctttctcaaaaaatttctcgtctatttttaactctcctgggttgattggtaggagggtaagtgctttggatactttttttgtttctattttatttcaagtaccgtatggaggttttggagttatttaacatagacataaaaacatttccaaatctagaatatgtttggatatgtctgatatgtctgttcatgtttcctatatattctcttattatcttaaaaggataattttctggaaatccaagaatcatgtacaggaaaaaaattaatcttttaaaaatagttttcacacccatctctgtgtgtggaatattatggggaagaaagaacttgaaaaaaaatttaaagtttttctgtttaaattattttagcttggtgtgtcatttttttwaaaaaaaaagaattagttttttaaaagactactctttataattacattgtaggttaatataattatcaacttttccagggaagaaaaggataatctcctgaggcccaagcaaaaatggtaacattgacctctgaattcagctttaaatatgttgcttctgatgaccattcatagaaccaaaaatgtgaactgtggaaggtaaagaaatacatatgtctagggaatggatgaggaaacaatgtctggcttagatttgtagacttctcaaaggagatctccgtaaactcttccaaagacactttaaacctaacagctcagaaccatatgaatcaagcacagacaccaggatgactaatcattcctcctcttttttcctcttttaacaaaacatggttacctttaccatagtaattttcgcattgcattatatatctatgtgccttatcccgtcagctccttatggcaggaaatatccccccttatcccgtcagctscttatggcaggaaatagatgcttatggtcttcatagtagtcagtcaataaatacctgtcaaatgaatgaatgaatgaacaaggtaacaaatgagagggacaatggtcaaagacatatgcatggtccacagcattgctgtgattgctcaacttccctggaaataaccatgaagcagaatttttcaaaatgtggtctttatggtacttgcatctgaatcatctggttggggtgcttgctaaaattcagattcctgagcccagactcaaacctactaaattcaaagtctctggaagagcagcacaagaattagcattttatttgtttatttttttaagacggagtctcgccctgttgcccaggccggagtgcagtggcacaatctcagctccctgcaacctccacctcccaggttcaagcagttctcctgcctcagcctcccgtatagctgggattacaggtgtgtgcctccacacccagctaattttttgtatttttattagagtcgaggtttcaccatgttarccaggctgatctcaaactcctgacctcaagtgatctgcctgcctcggcctcccaaagtgctgggattacaagcgtgagccaccatgcaggaagtagcattttaaagaagcaccacccaccccctcattcattgtgagccatgaagttgggcattcgttgccctggaggatcaggtagctaaaagagatggtgacccgtgaggatctgtgacagtgaatgtgcaggagattttggtaagtctgcttatatagagattctgtttaagacccctasgtgttcctcctaaaaataatgtggttttaatgaaggaaaaggggcctatttctcacctcattaacaagctctgagaagtttctctgtgtcattatatagttagtagaagagggttgtgtgttgtaatcttctatttctactcttttatctcctgggtccaaacactttgtttctcccttgaagaagcagaattaacataactaattccagtattagtaacaggattaatgggagtagctctaagttgtaatttaaaataataataaatgaaatcactttggataagtatcatgttcaggcatggtggctcacatctgtaatcccagtactttgggaggccaaggtacgcatgtgtgcgcgcrcacacacacacacacacacgtttcacttttctatttagagaaaatgtgtagccaactagacttgtaagagaatgaagaagtcgtgagacacaaagggacaagcttaatataaagcctaccaaacaaaattagatttagaaggtatttgggtatatatgtattaacatctccaatgtccctttctttgtaattatatttccactaggaagtaacctaagaatctagaatatatactcctgtaatatagactgttttgtaacaaaaaaacagacactttaatcctagtacgagaggaaataggaatgaggatgggaaagaaggcaaggaaggtaatagtcaaagaacaaagacaaaagcaggagaatatgcctcatggaagctgacaggtgtctaggttgagtggaaggtccctctagagaaaaaggttaaatattaagatgacagaaagtgactggtggagaagagggtgccgcaggcaccactgtaagggggagtagaaccctgggcaagaaggcaagaagtaggcacagatacagaggagatagtagtagggagatggagaaatcaagggagatcaggcctaatgtcctcttggatgccacagaatgcatgagtttagggacacagagttcacacagagttccagtgagggtggaaattaggtaggggatgtgaggacagagacagatttggaattgttaagrgaaacgagaaagggaagtggccaagtataacttggttttraagaccagtggcattctatgatttgtcggaacctttactcagttaaaggaagaaataaagttataattacttctatattacacatgtgggggatttagaattgtttctttgatatacctttttatattcagttattgttcttttttttgagttagggtcttgctctgtcatctgggctrcagtgcagtggtgcaatcgtggctcactgcagcctcaaactcctgggctcaagggacacccctgtctcagccttctgagtaactagggctacaggtgcatgccaccatgcccagctaattaaaaaaattttttttttgtagagacagggtcttgttgtgttgcccaggctggtctcaaacttctggcctcaagcaatcctcctatcttgtcctactgaagtgttaggatgacaggcatgacccactgcacctgggcccactattgttcttactttgggttgggggcattttgaaaaaaccaaatcacctcatacaggtactaaatgaggataaaaaagaatagttcattgaatataggaaaaaaaatatgttggcctatacaaaaaaatccatgaacaatagagctgagcagagaaaatgctaccactctaaaatgattctcaggctagaccaaaattgactgcaacgtaaacaaagatgtgaacaaaaaatttaatctaaaggactaattaaaattgatcttcttggaacaaaggaattagtcattctaggcatttcttagcatgatgtgccaaggctggccatagctctgctagccacagtaggagcagtggcagttgtagagattgtagtagccatttcacagtaatgtgaactctgtgtccctaaacttatttctcaggattcatatttgcaattaagggttgctgccactcagtggcggaagtatttgtatctgtcaaggataatgaattatcaagaatatgatcacatcaaagaaaaatttccatctagaataaccagaatattaacttgagggtctcttacttgacaagcaccatggttggcaaggaataacgcagcagctttccttccttatgaaggccaaaggatggtcactggccatggcatttgaacttgttttctgtaatcaaaacaggcccatccagcttctgctcagggtcagctcattctgcttctgacccattttttgtcgtatatggaacatttgtgttctgtgtgaacctgaatactcatggtacaatttacccatttggcttcaaagggctaacttttatttctttaaatgtcacagatttcaccaggccaggtgtggtggctcatgcctgtaatcccagcagtttcagaggttgaggcaggctgatcacccaaggtcaggagttcgagaccagcctagccaacatggtgaaacctcatctctattttgtattttgtattttgaaaaatacaaaaattagccaggcgtggtggcttacacctgtaatcctagcattttgggaggccaaagcaggtggatcacgaggtcaggaattcgagaccagcctggccaacatggtgaaaccccgtctctactgaaaatataaaaatcaaaaaaattagctgggcgtggtggcaggcgcctgtaatcccagctactcgggaggctgaggcaggagaatcacttgaacccaggaggcagaggttgcagtgagcttagataacaccactgtactccagcctgggtgacagaatgagactccatgtcaaaaaaaataaataaataaataaaaagtcaccaaacggaaatggaatttttttttttttttttgagacggagtctcactctgtcgcccaggctagagtacggtggcgtgatctcggctcactgcaaactccacctctcgggttcaagcaattcacctgcctcagcctcccgagtagctgggattacaggcgcctgtcaccacgcccagctaatttttttgttttctgtattttcagtagacacagggtttcaccatgttggccaggctggtctcgaattcctgacctcgtgatccacctgcctcagcctccaaaagtgctaggattacaggtgtgagccactgtgcccggctggaaatggaattttctacatggcctatgaactaaccaggggaactaaggcagagttacagagatatagagtttatcccaacctacaggagctggtgggtggattgaacacttaactctaggcttgtttcatggtaaagggtctgggaagaaagcacacgttatttattctcccttatttcctacttctgagactaagcaagggtatgcaagtagtacaatatttatacctagagatgaacctaactagcaaaggaagtgatattagtgacccacttagaataagagatgctgacaccagttctctgtccaagctcccttctagggaccatgtaaaggagcctcaggatctcctctgtccagggttcaggcctcatcctcatcccattcctacccatccattctaatttttgaccctcactggtccatgttcccaaaattgtcatgtcagaaatgcgtttggattaatttattggcttaattgattgcctggggagaaaaagtttagtaataccaaataatgcatacacttttacagtgaggtcacattaacaggtacaacttttttacagttgctttttatcttcttgattctagtacttgctccttaaaaccagatttgatactgcctcatcttttctgaggcctcaagaggaaggaatctgttacaacaacgtttttaggaaatttcccatgtacataactacttttttaaaaagctttgtgaataggtggacaccctctatctcctatgtgtgtgttctctttcttttagagtccagccttctgtgccttccaagtgaccagtagctaataagtaaatttatttgtgaaaataggagagttcttctcccagcatccaagcagctctgctaattaaagtatctttcagaaggtgaagcaaatacccttgttgtctaacctggagcagtgatccaaacttgaggattccagatcaagtcagaaatgatgagtctgaatcactgagtggtttttaggatgggtatatctgttaagaattgtgtgtagctgcaggtaacagaaacacaaccacagtggcttaaccaaatgggatttttttttcctaggtagcaagaagcctgaaggcaggtgggtcagggctcaatggatcatcctgattgcgtcttgcttcttgctctgccatcttagcaatgtggctttacttcaaaaagaggggacagggaagagcaaaaggatgttgagtttgtccttttcttattaggaaaattacagttttccatagggttccacctagtagacttccacttacatttcactgggcagaaccaggccacatgtcaccattagctggatgggattttggagaggtatttttaacagggcacattgttgccttgaacaaaattggggttcagttggcaaggtagaagctcagtggttatgcagcaagcagggtctgccctgaggagccatgtgatacctttcaaatccagtgatttttaagtgattgcccgagtaccatctaagtatcagcatcttggttatatttctgtatgaaatggagttgtttgctcgcattgtttatctaggagaggatgtgatgccatgaatgggttatgtctttccattcttataaagaacagtggctgcttcttggcctttcacagtaaagaacctttgayttataatgtgctcaatgcaaatgcatgaaaggaccatccctcccaaagttctttggcttttcaatatgatgaaactagtagggcaaccacaaaaaaaaccagaaatccctctgtccccttgctttgacccattttctgtttctttcatgcttaaaagaagaaaggtttttctcctcaggactattcctttgggcttgggaccttttctccatctttccatttttagtgtagctcatacttcaccccgtcttctttattccaactctcagttaaagtgcaaccttaatccttcctccttggaaagggatttggggaaacaaatgaggtacatctggcattaagagccaggatcactatatactttttaatgtgcctataaaactccaaattgtctccttttcgtgttttctagtttcatttcctattctgggccactaagacagagcttcaaactagtgtaatgtgagcaaattatagaatatgaatccccagtcctcagggtgctgggggcagagtctgaggaagccagagcatccctgcctgtcatattaaattgtaatcatggcctctgttgaatctagtgttgccatacaaatactaccactttctttgtgccatgaggtcagaaagcttggaaaatgctgctttcaggccttttggggggatcactgttctttctattcttcttcaacacaaaagcctatagagactcttttttttttttttttttttttcttatcttgtctcaaggtctatgcctttggtcttttgcaaaggactgtcctgacagatgtgatgaacttggtttgtgttccctaaacactgttcctggcaaagctgtgctgtatcttgactcactttcgtagcttaacgtcccttttgttcatcccatcttgaattctgttatattctcctaggtctgttcttcctttcctttttataaaagcgttttacaaatgggagcacacccaacccctttgttataaatcagctcatagctaaagttgtagcagttgtaccctttgttctttgcagttttgtcttttggcaacattgaccaccttggccaagcccagagatgccatcttctttccccccagccttctttctcccacataaatgcaagcacagaaactcgggtaatactctgctgggaggtagtcattaagaataatgtgcattatattttctcatttatcttytttccatttattttagaacttatgttaatcttcctgctacggagagamaggttataattaatctgaaaagtgtttctttggtttttctagatgagaattctccagccaacttctgggattctaagaacaggggtgtgactggaayacaaaaagggcaaattgtatggagaattgagcctggrccctatttcatggaacgtaagtaactaagtrtgaaatataaacttaytattgaacattgcataagtatgcagaattctatggagtctttttgaatgttattttgaaattctttggtttggatttacatatttatgccatgatggaaaatatattgttttagaaaatgctcagtaaagaatgttcacatattttgaaaaaactgtatgtgtttaaatatacagttagccatccatatccgtggatttcacacctacagattcaaccaactgtggatcaaaaatattcaggaaaaaaaaatgtcattttgtctctactgaacaagtacagacattttttcttattattccctaaacaatatggtataacaattatttgcatagcatttatgttaggtattataagttatctagagatgatttaaagtatacgagaggatgtacacaggttatatgcatatactctgacactttwtgtaaggaacttgagcatctgtggattttggtatcccatgggggtcttggaacgaatcccccgtggatatcaagggacaactatataatatgtgcatgtgtgtatatgtatatwcacacacacacacacaaacatacacatttacatatatatgcaaatattacatgtacatacatatacatgtatatatacaaaaatatatatagtatattttatattttacatatacattatgaatgtatggtatataaattatatatggttactttaatactttacacatttttatataccctttatatctataattaatatttattcatatgaatttcagaaagaataagtcaagatatcgcttaatttaataacatgacttgcctttgaaatatctcattataatttttgccagcggcagaataacttcgtgtktggaccccagtcttttcaaagtgttgatgaaatagacgggctcactgacattgaggtcggcttaccagaaaatcagacattggctgcagataactcaactattacctaattaattcagtgttatagtcatttataaattcaaatgctcatatatagtgcctggttcacaaaaatrtcttgtccctttttctgttgggtgatggtgttatttatagttgccaccaatattattgaaaaaatagtaaataswyagtacatttttgtggaatatatagaagaaggaaggaataaatgctttactagttggtccaggttaacttctacatttatagaatttatttttctttctttcttttttttttttttttcttgaaacggagtttagctcttgttgcccaggctggagtacaatggcgcaatctcggctcatcacaacctccgcctcccgggttcaagcaattctcctccctcagcctccagagtagctgggattacagtcatgcaccaccacgcccagctaattttgtatttttagtagagacagggtttctccatgttggtcaggctggtctcgaactcctgacctcaggtgatccgcccgcctcagcctcccaaagtgctgggattacagacatgagcccctgtgcctggccatttttctttaatgtagaaaaaaaaatgggctttttaaactttttctgagttgttgagctctgagtgagccttaagattagtatatgcaaaagatttaatataaaagagaatgtgtgggtactagtacttaaagatagcacttactaaacgtgaacattaaagatttgattaaatggaaacctgccacaagcatatctttgtgaagcatatcaaacttctctaatacacagttatcttaaaaggttaacatctgttactttgaattgccattaaaggcatgaaataatttcttttaccatccttactagtaaatcagcactctagaactttctctaatcctgcttctgccccataagaaatgtcttcttttcatattccagttttctgactggattctctcttaggccttaaaagaaatgtcatttttaagggaaaatgctcacaaaaagcagagagaaaggaaggtcagaaaggggaagtaggtacattcagcagaatcctagctaatagcacagcatataggaaagtttggaagaaaacttgccaacatgtgaatgaggatggtttctggcaggtggaattatggatgatttgtttttccgacttatgtctatgtaactttccaacattgccccagctggcacgactatctaagtaatgaagaaataagtgataaaagaatgtgggaaaatggaatgggaaatagctggttttactttcagtgtgattcctcctttgaaaggatcctggtgtttaaaaggctgatctagctgagaaatattgccaactgaacttcaggggaaaaggtaaaatcacttcctttggagtgattttggcaaaatcactccaaaatgctgaaggctgctggtaattattgcctgttggagtgcacagattgatattacaaggctcatgtgaacccatgggaagaagtcagtaccacatgctgctatagtttggaatataatgtgagaaaaagcccatttacagagtatcccctttactgtgattgattttctttctccctcccaaagtgttagagattcataatgtcctggctgattaggctatagttaaatagatctgtcttgactgatttctctacatctcaccctagtatttaatagaaatgggcttgatattgaaactaggagttgggaatgaagaaaagagaagggtttttttttttcttttctccgtattttagcatttccaccttaattcttctcacataaaattgggagtattgcggagcataattgtaaaactggaaatattcagtgatgcattttttaaagactgagaaatgtagtataagtaaagttcaggacagtgaataggaatttcagaaagattctcctttgaataagtctttcttcattaatcagaatgaagcactccttgccccaccaaaacactcaccccctacccttgcaatataaaagaagttgtaattatatttatagtgcctagaaatagtctatgcctttgggatgtcatttttttttttttttttttttttttgagacggagtcttgctgcgtctcccaggctggactgcagtggcgtgttcttggctcactgcaacctccacctcctgggttcaagcgattctcctgcctcagcctccaagtacctgggattacaggtatgcatcaccatgcccggctaatttttgtatttttaatatagacaggttttcaccatgttggccaggctggtttcaaactcctgacctccagtgatccacccaccttggcctcccgaagtgctgagattacagacgtgagccaccgtgcccggctggatgtcatttttaaaacccattgtctggctagagcattcttaaagggactcacaatggaatgttggttgaatctctggagctgattgcatggaacttttttttaaaattgtgaagagattagacagtttctaaaatattttccacctccaatcctgaaaatgcaaagtatttaaaaatgtttgtttttatctgcagaaaggaaatttgtttatctttaactcaccagaagtccaaacaaaggtttaaaaatctctgaaaattgatctattaaagttccagggaaaacctggatttgagcactacgtaggctatttgtgaatttaagatggctttagtttgtctggataaatccccagaggaggcaggtagtccaaatttatttcattatagggcttacctgaatggatttgaaggacaaaaccaagtataaatgtgggtagatgagcctcagggcattcaagaggagggccagcttcatctacacttacttgtcataagacagtcaagtattcaagagagctcaggctcacagaacctgaatgggtcatttgtgcagtatgcatttgtgagttttaaaatttaagaggtttcaaaagtactggcaggccagaatgtctgtttcattctatacagtcttttatgggttgtggtcattcatttattcatatttgctttctgttcttccttccctccttccatccatctgtccatctatctcctcatctatcctgaaatattcattgagtgctacctttgtgctgggtcttattctaggtgctcactaaatcttgtatcaatgagtgagcttagagtactaaacttcatcctacattgctatgtactgaattgatatgtgatcattgaggaatatgacaaaacactgatatttgtataaattacatagcgatttcacatacttacccatcccagccctgggaaatgtatataggattaggaaacagtatgcaagtgacaactgtgagtgagagtcttttctctgagtggtgctcaggttggtaccttgccagaatagatgtgtcatgggtgcctttttatttggtgtagatggggtggcctcggtctcttatttttactatcagagccttttctgtaactttcaccattcctaagtcccctcccaccaatatcagaaaggtctttttgccccttggatggagatttaatgcttttcatcccccatcttcacactttatattttaggcccagttagttctctagtcctattaggtttctgccacatctgcatggatattgtcccttttgtttttctgagttttagcagaggaaagcctggccatttcaggctccactggcccttgttaaagagaagacaacttccagtgacatgtaactgacaagtgagcatgtcactggcatgtgggtaaatttcctcaaaagcatgaagagtaaagctgtgaataagaatcataatattaatagtttaatgaaaacacataggacaatggtgaaagtcatgttctagaataaattacgattagcttgattctttaagattattctaccttttaagtaaaatagatatgattaaaggaagaaggacatttttattccatccatctttatgcttcaaatattcaacttctagaaacttggggaaaatccagactctctaaataggaacaggctgttaactactgcctgagtgaatcgtgtagctatttaagatgatggatgagatcctagtctgaggcaaaaccatttcttgcagggagtggcttgtagaacctttttgcagagagggcttgaaatataatcttatataaatgcctagggttaatacagctgagttgtgattgcttttctaaaaaataattttgaataggtaatatacgaaagagtataatgtttaaaaagtataaaaattgaaagtaaacgtctccccagcttcatgtccaattgccagttttcccaccctgaaggcaaccactacaaccagtgtcaagttatctatctggaaatattttattcatatacaaacccagaaatgtattcttcttttaaacaggtggtagaatggttgattttaaatgcagtgtcagaatttcacagttacagaaacccctttactcgagaacaggtttaagttcctaaacactgttcaaagcccctccgcctccccaacttgccctggaatatgcccaaagtgacgtctcacaaatgaccaccctccaacccatggtagaggggagcaggcatgctgctaccctgagggacatcttcatttgtatttatgaaaattagtaagtcaaaaatttgaaaataatggggcttttctgtttaaagaatattcaaatacagagtgctaaatctgtattttagcaatgctataagcaaatgtatcctgaagattatcaaaaggggcccttatattgccatgatctatgactsgcttcagctgtccagaagggacctcagagagcagatgccgctcatcctctgttctcttcctcctgaggctagacctggctcagccgatatcaggtccttacaggttcgtacaggatgcctttcccttttcctagctcactgccctctgaggcaacatgctttcgattagtgaattcaaaatactctttttatagcccaaaagaatggaggtagatagatatataacatatattatatatttggatacatataagtatatgcaaatattaaaatgtttctatacaaatatatattttatatatatatatttttttatttttttcccataatttgaggccagcagggggagatgttgcctgccacatcaggctgtgggaaaaagcagctaggatagatggactcattcattgctctttggtccatgtcctccatctctcctgcttatgaacaggagggctgggctctgtggatcactggggtcctccctaatcagtcatcgtgcctgtgcttacttccacctgcctttgtatatatttctcagaaatagctttttacaaaaaaaaaaaatgctcctcttgcagtcagaggttacacattgtaggtgcaacagaagcctgtgcccctgggcaccaacttcccttttccatccttctgagcattcttccgttacctcttccaataaccaaaatattcaaatatattaatcaaaatgctgctctccccctttgtcagaggggatgttgcttagttacaccattttaaaaaatcttgtatgatgttctaaaacattaaataacatttaaagatgaaaactcccactcagagtggaacattctgatatttttaggggcaggaatcttcactgatgtcctgctgaaggatccagctagttttcatccctacgcaaaccactcctcattctgtccaggactgttttcctctctagtgaccagcgtgtgtggttttgtaatgggtgatctgtggaaatcccctcagctttttgttcctgcgacacacagctctgtagcactggtgggggtggggggattggatcatgcccacaaaatctacttttgtgcaattcgagatacattgatcttagtttcagggattctactttgtcatctgggttggagatttttgttatagcaaggaataaagtaacacccaaaatgggtcagctagcaaagttggcatgattatcatcatcctccaaaaaaaataagcagtcacattttttttatctcattgtctgttacctagtcgactattaaaaccttaggaaaagaagatggcatcctaacttgagacagagttaggggaagatatcttataaaaatgcacttctctctgtggaaaaatggcctgctcactcgctaaccattgatttgatctatgaggtgctgcctgtagacagagccacggatgtttgcttccccagcatgaagagtgtgataccaatgagctcatgtccagagaattcaatccccatgcatgttaccacactttattctgctcggaccgtcctcgtgcacactacttagctttgttcttgcagactacatgctattcgtcttggaaaaaagcaagtgggagagtaaagtttgctcaggtctgtccagctaytactatttcagaaataaccagtaatctgtgtttgtgttcaggaaagtcatttgcagaagagttctcagggaggcaaagtaatagtaaagctagaattcctgcgtaggtcatctcgccattcttcaaacccagcatgcttcatctgtgcctccctgcttttgccactccttaactctctcyagccccattttgctcatccattagacctgttttttccatgacacctttctgactccaccatgtcctctctcatcttctctacgctctctatgctgttcgacctggtgctcttcctttttagtgtgtgtcttttgtattttgccatgcctgtgattggcatctcagcagctacactacagaacagccactagaccagaaacctttccttgattcccttgcactktctggcacattgcttcctggccatgtgctgtggcaggtacgtagtwaaaatcttctggccaatgatgcttattaaattatgaattattggatagtgactcacataaataatataaggactcaatatttttaccccataacaacttttgtttttttgagatttagtatttgttcattggtaggaagagtgtaatgatataaattcctggaagaggatttttcttcagttatcatatctttctcttaaaataaggaaaccaaagaccctgcaggaggccatttggtacagtcgagaaagtcagtgaaagatgaacttccttagggaaawacattgagcagccccactttaatagtcctggtgactcatttgagagaggaactccctccygtagcctaggattctccctccagggcctgcccatcagcatccttgcatatttagaacgacaccttgggagaaatgcatctcgcagtgacacttcagtgactcagacgctttgtatacagagaaattccagtgactgtaggtttatctttaacacagtttggtttcgtgctttggaattgtagttactttccaaaaaccataattggcatttgtattactttctatcaaagtggaattatcagaaaaaaatgtatgaaatgtgtggattgccacaagctgtgagatatagacatcagttgtttgtagatttgatccctgtctactgggtgtatttaaatgacttggaaaattaaaataatataaatttacagatcctgtcactagagaatctactacagtatacttccatgctttgttagactgcttttcctctatttccattgagagctacagtcaatgtagatagaggttatgagtgaaggctttggaatcagacagctcaggtttgagtcctgactctcatttcttatctgtctgacctrcagcaaacctcaacatctcttctgtaatatggggaaaggaatttctgcctcccaaggttctgtgagggttcactaacaacatgaacgtgagacataacattgtggcacgttaaggagcacctcaataaatgccagctagtcccattcttatcgctacactatttctattttggcatgttgttttggtgcatcatttttctgatatgttcaagaggttacaaagttttggaggagcatataaaatcaaacagaaattgatgtaatttgttggcgctgagtggaaaaaagaggtcattcagagtcatgagtaggattccctgagaggtggtatggtggatttccayagctgattcctccatgacttgtttcactgtttaaattactgttttctccaattgctttgcagcggagataaaaatctgttttaaatattaccacggcattagtggagccctgcgagccacgaccccctgcatcaccgtgaagaacccagctgtgatggtgagtgcccctcgctgccagcttccttgtgagatccatgctgggtcttgatttctatttttacctgtgcggccctgacagggttatgaggaacaatgaaaaaggaaacacataacagtgtgggcactgttataggaaaggaaatagcttacaaggttggcacacctgaatccctaattcgaatcagtggaaacataggatttgatttgtaacagccatttgtagagtcgactctccrgggaacccattcatgaagcaaagtagcaagtgccccattttggaaggtttaaacttagtgtgggtgaccagttggtaggaaagagtggcattgcatcttatgtgaattttaactatttaaattatgggtgatttacctgccagtcaacttaaggagccgttgctcggaagggagtctaagttggcagtcacaaatgcactgttttccttaaggtcttagtgctggttccttctcaatgctgagtttggatctagtgtctagagatatggctcatattttgggtaaaatgtggccactcaatggaagtcaacttctttaacttcagaagttgacttcagaagtcaggccttcagttgaagaaacagatatctaatttacttttgtaggaaacttgttgtgttggacttttgaaagaaagcctgcccatttccaacatggcaattttgtgattttttaaattttattttagaatctaacagtctcacaatacacagctacactgtatatgggtggttggactcagatggtttggggagattcttagagtctaagatatgtaaattacttcagttttaattagtcattactaaaaatgaggtcatgaaagcatagaaaaaatactgactcctatgacatagaatctttacaacattgtatgtgtgggtgtatgtgtatatacacatttatagatgcttgcatttttggaaacaggcaagtagtcaggttgaaattcagaaagcagtctttgcaaatggcactttgaaattgttcagactcaccctrtgctgtctctgatagtgcttgtacctatcaagcactgtatcaagcagtctttccctctcatctattcatttaaacaaatattcattaaatgtctgctaagtactaagcattgtgccaccactacagatgaaatgatgaagaaaaacsccgtcattgatctcgtaggtctggtgcagaagagagacatcaatcaaatattatatttatttgagtgataattgtatgagagggagcaaaatggggcaagagagcatgttctgtgtagtaggatttgtcctgatcaggaaattcctggaaggcttacctgaaggtgtgtccgagagacaagctgaagaatgaatagaagttttataggtgaagagggagggaagagcgttgcaggcagagggaatagtgtgtgcaaaatcctcaacatctaagtactctgctcacattagaattatatttgagtttccattgtagtaaacatagtgtagaacatagaagagaagcctacatttactatataagactttgaaggtcacaaagagaatagcaattgttgattacaaagtctgccatgtcacatagtaagcactggaacagactttagttaatattctaaaaamggaaagttacaaaactagaagagtggggctgtttttaataaaatctttaaaaaaatcattgtgtctgaaattagacaacagcttccaaacatttttaagcattttctggatttagatttttttagacttgagcaatttcagtatttagatatcattgaaggcagtgggagtttacggtttgttgaacactgatcttattccattgatttttgcattgagattgctctgtcaaagcctgtggatagtttggagataatttgcttcaaacaggtttcagagcatcttgaaagtgtcacagatacaacactggcaatcagtatagtgtattttggttcagagactgaataatgccatgggtctttaatcgatttytgaccaagcttgagacagtttggtctatgtccaaaattgaaaggctgtacctcaygggcacctcattttggggatcaggactatgtttctataatagcatgatggtcatctaggtatatgacatgtgtttagttatgtgactgattaacatccttgatacttacaaatcccacttagtacaattataccatggccagatacaaagaatagacctggaagatgtaattgagaaactccacagggaaggaaatgagctgtcatgctaatcatgtggtctcttttctcacatatcctattgcgatgaattgaagattaaaaaaaaargggggacctctctgtcatttgtattttgttttcattgtcattcatcagcatacacagtgatatgtgtctcagatacttggaacaggaaatctttcagcttcagggacaaattaaggctgccattactcactaccatgtattgtttcaacacttggttgacgttcttatttctgggttttcctggaatgaatctatggagtgagtttattttaaagctagtctctaaacattgagtgcagatgtgtttattatccctaatatccctgtatctagtggtaatgcctggtttttcctggctttattgtaatgaatgataaaaattgaattatttggatatgatttcagatgagcattttgccagagttgttgttcaggacactttttctgtgaagtctttgagaattgtttcaggaagccttttgccagagggtgaattacatttgaaaaatgagaattagaggacattttctttcgtttctcataatttcttataattttcaaataggttttaaatgaagacaggttatgaattgtttcagcctcattaaactcatttagcacaaatatccatagctgacagagatgtgttttgaggggtggcacatcttactggggcgtgtggcccatttgcagagaggccgcagtttctaggatatcttcctgtgcccaggcacagaaggaatggcaggttaccgagggtgtgtctcagtcatagtccagcgtagtgtgtggtgaaagcaggatgagatagccacagcagttagttctctggccagtgtactgctgcctctgccctagttaatctggaaatgctgagtcagaggagtacaatacaatataataaaccacacatgtttgttgagagccaactctatgacccaggaattggatctatagatggaaggaaaaacagatacctggatggaccctggtgtgttgcagaggacatgtgaagcaatcaggatgcagttaagtggcacacaaaatagtttgactaaggtacaggagttacagcggaggcagtagaaatttatacttcaaaatttgaatggaatttctcaactttgcttggattagtgatggcttttatctcctggggatgtgtgatttttataagagtgtggggaatgcagcaaagataaaggggagaaagagtttaaaaaaaaaatcagacctgggcagtagttaagtagtaaaagcaaattcaaatcacgaactattgcattaggggaaaagagaactcaatatagaattggctcaattccagatacaacaagggaaagtgggggttagtagccaagaagcagggttggagtggagggattggcagatggaaatttaccaagagcttagggggattcttgttaaactgacctaacagaattcttgctgatggcggggccagagtgatcagatatcgcatggaggatggtgggagatgaggagttcgatctgatatcaagggtgatcacatattgagggtggggattgactctaaactgacttaccagggattttgctaaaactaaactctataaggatggagataaaagcccaaggcctgcctagttgagcagagagctccaaagagcctgagtaaagtttgctcaaggaaataatctttgtcagaagaatttaatctaaacttcagaattaaaatgtggttctatttcccacatttgggtatattctgccttcaattctgttgacttcttttgacttattttgcagagtaatatgaaggtttttcttcctaatgtaccacaaattgtgcattaattgtacataatttgagagaaaggtctaaatttgctaggtggtttataaattactggcttcttgtgaggtataatttactcaaaagctttcaggaaaaggttatcagtataatagcactgcaaattcttattattgctaattatagtagcatgtgccatgtacctgcagcacaatagaacacaagcctacaagggagataggactccatgtggattttcagaaatacttgacgagagagcataattctgtatatatgggtaggtctgatatgaatcaattgtttcgtttattctaggttttcctaacaaatctgaaggaacttgatgtttggtttttaactaaagagaatgtttaatatagtaatagtaatatatttactacaaatcaactatattcttatcaaagggaaaaaaagacatagtttgattcatagttattggaaattttgaagcttatatattttttatttgtggtaaagattaaattttagtctttcctccaagaatcagcatttgtgtctctgttccaagattgggaaatgaaaggacacatgatacaatacccgtttgatgcaaaaatcattgcatttaggaacatacatggtttcctagtcagatccagtggcatcatatgcttctgaaacttcagatgcatgttttttcttttcagatgggggcagaaggcatggagggaggtgcttcaggaaacctgcattctcgaaaacttgttagctttacattgtcaggtaagaatgtctttaaacgtgacatccagtttgaaagtgtacagtttcgaaggtatgaatagtcacttctttctgcagactttcgtatatgatatgatgatatgtgaactagttttggggggtcatacttctgaaaattcaagtatatctcttaccatgataaattaattattaatataaattcagaaattatttcttctaccaagttttctggcgatagacagtctatataactatgtatagttacttcaagaaaaactgtaacgtaatgtgctaacctcactgaggagctttgattattgaaaataatttattcttacttcagctagagaaagaaaaaatttgaagactggaaaacaaaagccaatatacttctttatctgtggaggaatacacatgcaaattggaaagtggataagccaattatttttggcttgttttctgattagtaaaatgttcaaattgcttgtatgtttaccatacaagtaaagcacggcttttcaagttatgagacaagactcatttccagtttgtaagtttgatttagttaaaatcagtaactgaaaaaaaaagaataatgtcagagtttaccactaaagggattttttttgggtaaagcatcaatttatataaactgaaaattttcatatacaataatatacatccctatatttatgtgtagtaggttgcaatgtaaaatgtatttcatacataggacactgttgaaaaagtttgaagggcactgattttagaaaataaattggtagtcataaagtcaagaataagaaaatccatatttgaaatagacttttaaaacagataactatgctacaatacatagaaaataaagtctaatggatctccttcactggaatatgttttgttttcatttttctgtagttgtagtacttccaaaatttaaattagatccacttttcttgattgcaaaaaacaaacaaacaaacaaaaaacgtgttgtgagagtgagcgttaaaagacctgatcctgaaacagactattccacaacgcataattaccacatatgactaaagtgtacacatcagttcattgctggcccatggccttctgagtatctgtgcttggttttgcatgtktctccttttcccatatgagcttgcttttttgctttgcttccctggtgaatttcagcagctgtaaactagtgacttatggttcaaatttggccaataaatttgttttgttaggaaccatcagggtttaaaaaatatctaggtttgcagaagggcactaaaaataaccactgcctgtggtactatctccctacccctcttatctgcctgtttcctaaaaacattttggctggacacctgtgctttaaaccttcacagtattgagggtctgaagctactaaaatccctggtgacaggcaggaaacaatttgtcgaccctgatagctcagaaaatttagagtatgaccacaccatgggtttcttgtttttgtttttttaatttacaggtaaaaaaaatttttttatggtgtacagcatgatgttttgatataaaccatgggtttcttagtttaaaattattaccctatgcttttaggtgatccgtatcattctaagcatgacacacacttattggttttgactccagatgggatgttattaactgactatgtgagaatgaccatctgcaagttaaaaatcctagggcattttcctaaaaagtaggaagtaagctttgaggcacagccaaatgcttcttccttacacatttcttccaacatcgcacctctattcacatggaggctagctacctaacatctgttttatttcttaccatatagccagacatttgcagacagtgtacagaaatgactaggagctgaaaccaattctataatgttaattctaaaaattaatctggttgtagcatactaacagcagatgataatatttatctgagaacatttaagcactttagaatggctgcctacaaatgttccactcttgattatctatggataggtaggggcacaaatacttgaattttatggctaaaattaaaaatgtattttcattaatattttaaacatgctgcaaataaggctttatttaggatatttaacacgtcaaacctttgtgactttgagtccttctttggcctattatatggtgtggatatttgtgagcaatagcatatgtaaaagacaaaaaagaaaagatcagaaatgagatggataaagggaactgaataatcagattaaaaatcactggtagtttattgtatttattaaggaagatttatttgtacaatgtcccattgtggaaaaattttgtatcaggcttatctaacagtgatattatttatcgcagtgacttaattgtctggtggaatgctttttgttcaaaggaatattttttgtgaatgatttagctctgtcagaccttgtggcattcatttctgtctatgttactctttatttactacaaagagaacccttttttgggcatagatttaatatataaagaatatcattcttctgtctgggttcaagggcaacataatcaagaaaggcaagaaaatgaatgtggcaattgcattttcttctcaaagctgttccctgctgaagaaagccaagtgaaagtagcatcattaaactgacagtaagatgcaaattctgcatttaataatgagtacatagtttacgaagtgtcaggaatggggactgcacggctaatgagattatggcagcctctctgaagtgcctatctagttctttacccgtcttttccttctcctactggttttcagatcaaagatcttgctatatatttcatgcagtgttctcaatgtgcagtggctcacgcctgtaatcccagcactttgggaggcagaggtgggcaggtcatgaggtcaggagatcaagaccatcctggccaacatggtgaaaccccatctctactaaaaatacaaaaattcgctgggtgtggtggtacgtgcctgtaatcccagctactcaggaggctgaggtatgagaatcacctgaacccaggaggcagaggttgcagtgagccaagatcacaccacagcactccagcctggcgacacaacgagactctgtctcaaaaaaaaaaaaaattgctcttagtttaatttttaaatatttgcagatatatcaaactttccgcctctactgccaggtatgtgtcattagacctttctggagtgttttcagcacatgtacctgggccatgagttcttgtgggccactggtgagccacctcctgggagccctccttcaagaatacggttctatgggcaatttcaggccaattctatttttctaagaaagaccttgtatttcaggaatgggcttatgtgggatgaccctggtgacctcctataatttaagagtcactatccaggatctggttgccagctaatctgggtaattcaaaggtctttggaggttcaggggccatatgcagartttctctctgaaccacagtgttcagaacctccctagattaatcttccagcattttctaagattatttagctcccaggcctatcttattcaaactgatattctcagaaatgttgaagactcagtggagccagctttatttcctgacatgtttgtgtctcttagcctgaccatggaaaaacatacagtctcctcactaaatggactttggctaggacttttagcagcatatagtgtgaaacagcaatttgtgaatctaaggtgagttataggacattcttcaaatatttaagttactttactggctatttaaaatagcaggtagcacttacatttcagaaaacatttcccctaacattcatcacatttatggaatatatatgacattttgtggtacaaatggatatatgctctgatgtttcatctccaattaaacttagttctatgtatatgtagaagattcatttttctctcatgaaggaacatgtttttcagtgaactgcttactcagtatttccctcaagacattgtctgaaattctggttgccgaattacattgccctaggaaaaaggtggtgaagatgcacatgttggaatcaaaagagttcccaggaaaagtcagtttagggatgtgaggtggtgctaaaggtttggcttcacttttgcggcctgttaggtgacccctctgctgaaattactaccataacccatttgtcttcacttatctaagcaatcatagtgtgaataactgctattgtgttacagagccgtttctgtttagagcctcctgtgtgtttatttaagaacaaattatctttgagctgcttgttctaatcaggacatatgaatccttccttcttctgtcccttgttctctcccttcctcctttctttcctccctccctcctgctttctctttgtccctccctccttctccctctttctttaaagatcttagggcagttgggctaaagaaagggatgttcttcaatcctgacccttatcttaagatgtcaattcagccaggaaagaagagcagtttccccacctgtgcccaccacgggcaggagagacggtctactatcatcagtaayaccaccaatccaatttggcaccgagaggtaagatgatcctygggggtctcctacttgatggtgaggaagtcagcccagtctctctctttccttgagacttttgcatccctcaggttgtttatgaagtgtctaggggttctgctgggaaggggtacaatgagaatgagctattcccatctctccagagccaggtctagggtaagacaaatgaagctgtcacatcaggggaacaatttaaggagcctccaaaaaactcaattgttaaaataaaggtcttaatgcagttttttttaactcacaattaatgcaaaaaattcataatgaataaaatatgaacatttaaaataaggacaggatcagtaacattgccttgtagagtcatagtrgggcctgagssaagaggaaaaatcagcaatactgatcttgttttatttaaaattttgatattttgttgtagcatacatttagtacaaattaaaggaatttctctctctgcgggctttggcaaatgttttatgaatttctagagttttgttaattagatgagccattcaaggagtcatcatcctgagtgaagccagattgtgttgatggtattttagacttcctcacagctacagtatgctaccagtcatcttagtgcaccatatcagtgaaatcaagcaaagggttttctcatttgaactacggaaagtcaaagaatgaacaaatagacacttcttatctagtgagcaaagcttgagctctccctccatttcttggagatctgaggcatgttttacataactagtgtgaaaatctttctgggctggcataggagttacacagttaattagatcataccctaaatatttaatgacaacaatatgttctaacaatattgtagaaatatttaattggagagaggtatatcaggggatctaaaaccgattgcagaaaagatatagttatctgagacttgccaacacagcaaggcatttctcctgggcagttcctatggttttagatattgaatattgcttgtattcttacacttggtttaagaaactactaatgatctcatcatggtaaaaaaaaaaaaaaaaaaaaacaaaaaacaaaaaaaactcttaagggcatgccacttagtctaatgcatttcaaagcctagaagaaataaaaatatatctcaatatgattctagaaagcacataatagatatgataatgaaacaagcagtaactattttcctaacattttaaatttgcaaagtttttgaccatgtcaccagtgcaagcctgaaagggaggcacgaaggatgagattattatgtcttcattttggtgattaagaaattgaagcttaaagtgtttatgggactagctattcagagacagaagtggggattaaactcggcttttttattctaagcaagtacttttttccattaagcagactgccaaattgcttggccctttggaaaaccttaattgttatgactagataaacctagaggcacctaagtgaaaagttggctaacactattcacatcactatagttgcatggatactgtcagggaagcagtgaaataatttaggttagattcctggcaccatcatttacttatcctgagattctcatcttcaaaaagaaagttacatcgttgtaaagataaagtgaagataatatatgtaaaagtctctgtgagtaaagctcttcatatttattttatatccttattaatgtccgatccaaatttccccagtggcattcttaaaatgaaaacaacaaaagctatcttaacctcatacttttatttttctgtcccagaagaaatgaccctgtatgccttttaaacttaaggaaaaattccatttaaacattcttttaacatttatcagggaaaccacagtattctgcagatgttcctattttaaccactaagtggaggagtattttcaactatgttttgcaacttcagaatttcatgagattaggaattcaaattgtcaatcaaatatactagttaattctaatccattcyataacaagatattaaatatcaaagaattgagatacaataaatgtagggagtactaaaattgcattgtgcataacttaatatttgataacatctcctaaaactgtgaaactaggaagggctgcatgattgactgagagggcttcttttgtcatacagatccttgactgctgctttttaatcatggtgaatgctaatcattctgagtgaataaaggattgacaatagctgcagctatttctagctatgtggaactctgtatgttgttagaatttaagagataccatttcctatacaaataaaatgatatagtatcatatttgtctttcttttaaaccagcatgttatctgtttgtgttttcagaaatattccttttttgcacttcttactgatgtcttagaaattgaaattaaagacaaatttgccaagagccgtcccatcatcaagcgttttctggggaaactaaccattccagtccagaggctgctggagcgacaagccatcgggtaatcagcccttacctttggggawcttgttgagattagttcatataggaaaaaatgacatgaaacttggtagtcctaggacttttcatactgataagaagtagtaacacaattcttttaaaaataaaagtgtccttacacttattaaaatgtacttgacaaaaaagtagtttattttaattatatatgttttttgcrtctttatcttttccaagatgtacccactgttaatatttcagtgtcaaatctcatagtgtttgattgtctctcagtatattggagctttttataaaaacttctccctggggcagaattcttggatcaggttgatgcctaccttatcctaaataattccatccagagaacttgttactcttgaaaaacggaaacaatcttgtcttggagccatttaaaacgagacctagacttgaagaagtgttataataaagctcctagacatatacattcattcaagcaactaaaatttattcattgacattctcttaaaatttaatgtgtaattaatgtctrttttctttttgtgagctttttgtaagttgtgagtaaagtagtaagtcatactgaggagatagagaagaccaaaaacaagttatgcaaattaataatgcatagctgactagaggctctaaactgtacagtggagcaaagagtagatagaagaaacattgtatcttccttctgaaatagccattagagggcagaggtggagtgatttggcactatccttttgatgattttccttaattaagaataagttggccgggcacggcagctcattcctgtaatcccagcactttgagcggccgaggtgggcagatcacccgaggtcaggagttcgagaccagcctggccaacatagtgaaaccctgtctctactaaaaatacaaaaaaattagctgagtgtggtggcgggcacctataatcccagctacttgggaggctgaagctgggagaattgcttgaacccgggaggtggaggttgcagtgagccaacattgcaccactacactccaacctaggcaacccgggcaacagagcgagactctgtctcaaaaaaaaaaaaaaaagagagaaaaagaataagtcatttaattcagaataagattgttacttgtgtgcaggaaaatgaaatgactgcatttgactttgataaagaaacagacttgaaacagatggaaaactccatccttcaggaggcagacagtccaagcccggggcccaggcaaggcaaaaactaaacctgcttccagatctgggatatgaccccaccacaggggcacatctggctttgccaaccatcccatcagcactgcttacaaggcaccctgagaatcagtgataggccaggcttcccagcagggaaggccagcagctccagcctccttactctacaggtgaggaaggagagcttagcggtcctctccccatcacacagccagggctgctgtcttggctatgaagggcgctttcattcttgtgttcttgtgcttctctcccctaagtcccagctcctgttcttcagggcatagcacagtgccctacgtgccatgttgggtgataatccttagctgtgagtgtccttttagaaccagctttctgttgtgctaaatgccgaggaaccaggctctctccccttttacacccgagtcaaaaaacccctaaaacttgaggcctttcacaactcctttatgaccttcaaaatgtccttttcctggtcacccttaaaagtgagagagtgaatcagtgtccttaaaaatatcacatagcatatgatgtcttgtgctcgtaataataatttttcttatggcaacatttccttttatctccgggtttataagtgttccatttgtatgaatgaataatattacattggactataatgggctttgagcctttaatgttcttgtgagtctgaaagttttaagagagataggagggatttggtgggtggcctgtggaaagacggcgaaggctgactccagcgtagtcaggatgaaagaagcatttctcttcttgcagtgatcaaatgctcagctacaaccttggcagaaggctcccagctgaccaygtgagtgggtacctccagtttaaagtggaggttacgtcttctgttcatgaaggtgagatataaatatatctgtatgaatacattgctataggaaaaacttgttaaacctaactcgattgtcagtttgcttctgaacagaattgaattcatgttctgttttgaaagtaaaatagctgtcaaataattacctgctgaaattttctaagcaagtaggaaaggctgtttgcccaaaaatgtctcttagattgatgcctgcattttgaaactgggctgtagagttttcagccatgctaacatacatagctcctgtgccaagctgactagcagtctcctcatttagtagtgagtggtgaatcttagcaagtcagtagaaagccctcagaatgactgatttctttgaacttattggtggcaaagcaaataagtcataaaacgttcacttattatttctggttaattttttagaaatgctgttttctcattcagatgcctctccagaagctgttggcacaatacttggagtcaattctgtgaatggagacttaggtagcccttccgatgacgaggacatgccagggagccatcacgacagccaggtgtgctctaatgggccagtttctgaggacagtgctgccgatggaacccccaagcattcattcaggactagctccactctggaaatagacacagaggaattaacctctacgtcttcaaggacctcacctcccagaggacgtcaggattcactcaatgattacttagatgctatcgaacacaatggccactccaggccrgggacagcgacctgctctgagaggtccatgggtgcctctccgaaactgaggagtagttttcccactgacacaagactcaatgccatgcttcatattgattcagatgaagaagatcacgagttccagcaagacctgggttacccatcttccttggaggaggagggaggcctgatcatgtttagcagggcatccagagctgatgatggaagcctgacatctcagacaaagctggaggacaaccctgttgagaatgaggaagcctccacacacgaagctgcttcctttgaggataagccagaaaatcttccagagcttgcagagagctccttacctgcaggcccagccccagaggaaggtgaaggcggcccagagcctcaacccagtgctgaccagggcagtgctgaactgtgtggctctcaagaggtagatcagcccacaagtggcgcagacacagggacttccgaygcatcaggaggaagccgaagagccgtcagtgagaccgagtctctcgatcagggctctgagccttcccaggtgtcctctgaaacagaacccagtgatcctgccaggacagagagtgtgagcgaagccagcaccaggcctgagggagagagtgacctggaatgcgctgacagctcctgcaatgagagtgtgaccacgcagctgtcctctgtggacacacggtgctcctctcttgagagcgcacggtttcctgaaaccccagccttttcttctcaggaggaggaagacggagcctgtgcagcagagcccaccagcagtggccctgccgaagggtcgcaggaatccgtgtgcactgctggttctttacctgtggtacaggtgcccagtggggaggatgaagggccaggggcagaatcggccactgtacctgaccaggaggagctgggggaggtctggcagcggagggggagcctggagggagctgcagctgctgccgagagcccaccgcaagaagaaggcagtgctggggaggcccaaggcacctgtgaaggggcaactgcccaggaggagggcgctactggaggtaggatatggacaccactgtggctcttggctcgagcgtagctgtgcagagagaagttctgtagttttcccctcaatgtaaataaggctgcaggttacatatgacctgaattcctcaccttgaggttcagcaggcaagaagagaggcaagattgaaaacagggccaggaagagaaggaaacaggtaacaaatgagtgggcagctgaaacccttcctctagattaggcctcctgtttctgagcggggagaccttgggayttaatcacatagctaggaagaaggcagcatggtttgcatccagatgggcttgagttcaaattcagtgctcttttaaaaaatggctcttctgctgctgaagtaacaggcctgttaaacagcaatcttcaaacttaaataatgggtctctattggaacckgggtttgtagatacacaaccaaacaggctggmagcttcaaccttagtgtaatctgcaaaggttatgagaaacacctagccactcttcctttctaaaatttcacagtggaagattaatgtatgctatgcatcaaaggtagtgtttttgtcttctacaatttaggaatgtcaaytaagttaggtgatgtcttctgacttggagaataagctgtttttgtatccaaggacacaaatttacacctgaaatttgtattacgctcagtgaatgcagctctctagaatgattcctttaatatgccctgtaaggatgcattaaaaatcaaagagcaatttcatatgtctggctggcataactcagaaataggaatkattttctttttctgtaatgtatttttctacctacatgatccccttcttttcttcctcctcctttttttttttaaattttgtttccttcattatattgtagccaccatgtgaccctaaagcattagcgcatgaccaggacagaggccgttatgggtgagggatgaggcaggggaagctgcaggagcgggggatwcatgcagaggacatttcttcaggaagccctcttctaagcattcacctcctattctcttcttttgtttctaggtcctcatatgggaaatgagactaaacagagaaaagaaactagccttgggaattatgttaggttttttgtatagagtctgttttgatactgaaagagaaaacaatacctggtaactttctacctttaatcctaggttctcaagccaacggccaccagccactgcgatcactaccttcagtgcgccaggatgttagccggtaccagagggtggacgaggctctcccaccaagtgaggacctgttagttaaaagggcccaccttaatcaaacggtgaaaggtgacaggcagacccattcccatgagtctcaaaagatggatacatggtcttcaagcggaaggaatctgggggttgccacttgacatagcaggtgtagtccgggacgtgctaggccaatgactcttctctggcaccattatgctgaaagaaagggcagctgtaaatcctgtgttgcccatggggtaaataataatggaggtagatccagatattttgggaaattgggtgcataatagaattgttttaaattatgcctaaccacagcatgaatgttctttcagctaatagacaaattggtacactctcttagaaaaacctcactctatgtaatatactgcctttttgttcacttacagcatttaaaatcattaagcacaaggttctgattttttttcttagggatatgcgagaagtattgttaatttcagaaattagtctactagttatttgggataggacaattagctggggacttgaaagacatttcatttatttcactttcagaaaacacttagcacttaaggagaaatggtggaggattagggatgctgggatatagttacataatctgtattcaaaggtatgagtgatacccttagccaatcataatccaaatgaagtgtaaactctatttaaatttcgacagtcctttaaagagatgtagctctatgagagcaatgcattttgatgaatattgataaagcctggtaaacattgctttaaaaaaaacactggaaggtatacccttttgccttaccgctttcccttcttgctcaccccctccacttacccatcttatatgtgaccatgacaacaggctgatgctttggttcctctgttttaaaaatggtggaacataaagaagggaggggacgcgtttaaagggttacaattctgagtgattagtctggcaagtagtgacaaaagagctgaatggtactatgaagagtttatcaaaatatcagcttaatccttttgaaattcttttgggcacagatctttcccttgtttgtttatttggataactaagggccgtgactcataacaaacatattttaagcagtttaaaataaaatggactgagagattaattaaccttgtatcatcttaagcaggtagaggggcccagggacccgagagggccacagaaaacttccttattgataaaacaattggtaaacctttagagaaaagatgagtcaaaaaaggaaaatgtttctggaagatatttaggtataattggagcaaaacaaattcagaacactaggagagagttctgggagagctttatttttatgtatatacagattaatagtcatttagagtttcagagggttggacaggagcattgcagaagtgtgttgataaatcacgtcttcctagccacatccaattgctgtaatttttgctgtatacaagtttggtctcctgattgtatttaataaagacagatactttcctgctgaaattatgaccgtaattcataaatgacataagatgtttgtgacatctcaatgtattgtttaaatattggtgtttgcattacacccgtagatacatcttgggaaattttttttacaattggcagttccttttaatgagttgatgtatttgcaaaagtaaaggcaacttagtgactcatggtatttaatcagtgactgacaaacaggagaaaaattcttaagaagtgttccctcttattcagaggttttcagtgatggcagggggtgcctcccactacacgatgtttagagttgaggtggggtggcctttcagtataacagtggttgaagggtgctactggcatttagtgggtggggggccagtgtatcaaacatcctgcaatggggagacagtctgatacaactaagaattgtcccacccaaaattcaacagtgtgcactctaagaaacacttatctgtgctaatttatttaatacttggtaaataacttttttttgtaaaatataaacagaatttttatattttaaaaactcagaagtgaagatgcctccctctaaaaatataagttatgcacacacacacacacacacacacacacacacacacacactcatacactcgtgctgtaggaccaagcaacttgcaaatctggggatgtgtattctcatggataggttgtggattgtgatctgagcatacctgattgctgttcagctctgtctcccattcccatgtgtgtctcatccttgtgacagtgttaatcgcttggctgcccttgctacttgtctgtcctcacctcagctggatccctgccctccttttctaactggacaactttgctaccacctctggtcatgcgtctgacttacagctgtggcatctacactctgtggtgtcttgtggcttctgggctcagcttggggtgtctggctggatcgtgcagattggcccatctcttaaatgacctgattgaattttaaggctaacagttgtgatttttaacactgttagttattataacttcatttttgcggtgatttacactttacaaagcacacttttgcatgctttcctttattttttgttctttcaataattttgtgaggtaggtgaagcaggtcttgtctgtaattaataggttgttgcacagaagtcagctaatctgattcttttattttatagttgcagaaactgaagcccagataaattaagtaatttgtttaagatttcatgcaagtaaaagttgacacagagtctcaaatattccctctcctctatcaggtattctgatctgagattggaagggaagggcctattgtgtgggtagatgaatgtaaattctgaaagtctggtttgaggcagagggtggcttacacggtgatatgttatttattgggcaccaccaatgcctcacatcagagggtttgggggtttcactgaaacttcaatatattgcagtgctttgaggtcagacccaccaggaagactcaaaaggtgctcagctttctcttcttctgggatagagttatgcaaagaggccctccccaaggaggcccctcacctattagggaagtggctgcaggggtttgagccaacatcatgtggtccagatagatgtgctctattcagcatctgtattagacccagcagcacctttcctctctgtgcaggtcactctctttctaccctagggacaagctactgaagcagtgtagtttgagctttgatggccaccatgtggcatgatcatggtgcactgcggcctcaaactcmtgggctcaagtgaagctcctgcctcggcctcctgagtagctgggactataggcaagcatgatcatgcctggctggtttttttgtgtttttattttttgtagagacaggggtctaactatgttgccagggctggccttgaactcctggcctcaagcaatcctcccaccttggcctcccaaagtgctgggattataggtgcgagccactgtgtctggctttgattcttttttctttctctttatcattattattgttgttcttgttattttagcaccttttcatcatattttcagggatttacttgtttgctttcttcttttttcattcttatttctcccatctcaagaagggaacagatcttggacttagtactaagtttgatcagtggtgatggtgatctaccaattggttctcaaaatcttactcttgccttagaccacacagagtgcactgtggccttggtggcttgtgtaactccagctctggttgagagatattctaatgattcgtaaaaaataagaaagttccaggccttggagtcagcatgacactgttgagagcctcccagggaagtagcttggactcaattatgcccagaatgccttaagaattttctgtatcttctcattctgatgttactgatggtcctgtcagctagaggtagttgagggctaaagccctctaaaatattatcggtgtgacaaatgttggtctttttagcattaagatgagtgaaaaaasaatcgccagcccagcccctctgaaaaactattttctttttctcttattgattccagtgtaattgtgacttaacccattgctgcattggagacaatatggaattgttgtataaacgtttttcccccaaaatggtagtttttctaggaataggcctagattcaagatgaacagtctgggttagtggactctgataggatcccaggatgttgcatattgttaggactcgtctattacttatgtgaggggttcaaactatgggggaacatttatcatttttgtggttgtatactttcattattaaagtattttttaaaatgaaggcctaaaaccatgcagtgaatctgaaaagtataattaatctaaacttagaatttctactatgtttagggttagggactcttattctctaaggttacaactttgttttgaggaaaaaatggatacttttaaactaaaaagctaccttattaaaaattgaagattaaagtgccaaatatgcaactacttgactttttaaaaaactttttgttcaaataaaatagcagaaaagagcacatatggcctcccgaattctttctactaaacatacatggcaggccacgccatcagcattctagaagtcccctttgtaccccctttcaatcactgaccgcaactccgtatggggaaatggacctaccgtcctgattcctaaagtcatagataagtttagcctacttttgtactttatacaaatggaattttacttccttgagtgttcaaataagaaaaaaatatttttaaacactgtcatctgtcatttatcacaaagcttataattttccttgaaagtacctttagttcattagaacttaatcatctcrccattttggtgatgatacctgtggttattatagttttttatagtggatttatacatttatttcacaacaatcaggtgcttgattttactaaatccaatgataaccaattcaaaaccctacccatagcacccccccacccatccctgatacgttgtaattcatgctgtttagttgttaacttctcaatatcagcatccactgagatgtattcacacctcatccgatcataagccaagtggtccagtggagaccgaggtctgatttgaagggagtgggaaaggatgatgagatgagcagagggatcacagaaacaaccctgcgcccttcccacatatgttgattttaaaaactgtaaactctgaagaccttacgttctacctgcctctgttccctgctgaggagaccagtgctgtgacagtaaccttggagtagttttacccactttctaattctccgactttcccttcatgtccagccactgaaaagcgcctatttatatttaagtcttagggtgtctaagagtctacttgcacctggattttaggcaaggtttagggttttgtttgtttgttgttgttgttgttttgagatggaatccaactctgttacccaggctggagtgcagtggcgtgatctcagctcactacagcctctgcctcctgggttcaagtgattctcctgtctcagcctcctgagtagctgggattacaggcatgcaccaccacccctggctgaattttgtatttttagtagagacagagtttcacctagttggccaggctggtctcaaactcctggcctcaggtgatctgcccgccttgccctcccaaagtgctgggattacaggtgtgagccaccgcacccggccgctgaggtttagtttcttgtgagcccccatttcatggtctctgagaaatctagcatttgcctcatgggtttgttcagcaaactagctactgttttaagttcttattaatttgtgtcagtgttgctcaaattttagtgtgtctaggaataagccgagaaggttgttaaaagtgtagataactgagccctagcttcagatagtctgattctgaagacctggggtgcatcataggaatctgcatttttattgatcctcaragtgattctggcacatgttgtcagagtccacctgccttgagaaacatttctgtaggtaatagttttcaaaccttattattgtcatgaagctatttatgcaaatgaaatattatgtggaacaccaatatacacagcaataacattggagctgtcatggctaaaataggattgtcaggtgtttgtggagccctgtccctcagggactcaaatctcctggccctgtaaggctagcctagacataaaatgttactaggttcttgctgaacttaatataataaaatgggcataattttatagattcctagaatactagaactggaagagacctttgcaattgtttgattgtgtcctctaatttttcaaaactgtgattcataggggtgtagtgactttttttaaggtcttgtagtgaaagtgtgtcaagccacagccagaaatcaggccttctacctcccaattcagtgcaaaacacacacacacacacacacacaaatcgttgctctcgttttcactgcaccctgattatataacatatttgacaatgtggcaagacaaggaagtaaatgttaagtcctcagycttctaactctgcctatctcattttagcattgtctatctgaaagaaactttgatgctatgaaatgagttttcatatgctttcttataccaaaaacaaaccaggcccaatataaagacatataagatgttggagcagttgtacccagcaaagtaactttgatagatacaacagagagctaaccttcctgcaggcacctctgctgcctttgcctgggtagaatgatattgacagcgtgggtagaagtggatatgtagttcatggataaaccaatagcataacagcccttcctgattcagagccaagcattcacttgaaattggcactatagaatttgtctttatggggtcttgagtaattacatcagtgtgaagatacagtatttgatrgggataattttaatatgtgttcagtgttccatgaccttagaaagcaaatttttggtccttgttttcttattctccccattgcacattgaaaggtctttattgaactataaattaaggctattactggcctttgtagaagatgaatacaagaatcattcttttttgtggctttgtgtcattttaaattattttttcatttattacatgctatgtgcaagacacattaatttggctgttctctcttccacctagccattttgctatacatatagacctcaagcaagccatagtcatatttcacttggtaaattcctactttgttagttccaggaaaaaattccatctttgagaatttctttcactgtttttgtcagaaaatggaaagtatgcaacaatrtgttttcttttctgccataactgccagaaaattaagagccaaattttagtaataatctaatcttgggagtttggcagcatcttctctctctgtttcctttagctggtctagttggtctctatttttttatcctgaattgacctattctacatttttaaaattgggrctactgtaaacattctttggagaagaattggtcatttcttttcatgtgtatttgatttgatgtctaygtgcctgaattaccctgactccgatgagaaaggaatgagataggggtaattggttcccaaaatcttttgagatggaaaagcatgcaaggagcagagcaaaacagtgaaataaatcaaagtgttttgaaaaatggttcctgaagatgctttaatgtacttgctatttgtgagcatatcaacaggctgggcgtgaggtcttttgaaaatgtcttattgatgggactgcagtgcccaaagaattcagatttggcagggtgtttcatggtagagtctgtgttaccttggaacatgaatggcattgagttgtttgctgtctgtgtggtgcttttgttcagcccaattcctctttcttttgccatttgtcataaattacaatgtgctgagatcaacaaaagatgtctttctgctcctagctgaggtgatggccttcagcaatggtctggtgcaggctgagctctaccatgcaggtctttccaaccctaaggactctgttgggatacttaccctgttcccttacagagcaaatgccataggtggtcaggagaaaatatgccctccttctggtctccaggattagccccactgtgtctgttgataagcatgtgatcayatggacagttttgggatagttgaatgtgtcaggagaaaaatgcttattaatttcaaaaaataacttacacaaaaatataaatgcacaaagaattttcctggttaaagaatagatttctgctgttttcatgtttcctgtgcaaattacccttcacacttgtaataagtttcaaaattttgccttttgaaaagatcagctcatgctctgtggatttcagtaggtgaatggccttttagagagtcacaaaggtggggtgtctgactctgaagaccaatctgccttctgaacattcacttgtatatctctctagaaagatttaacacacttaaaaataaaattaatcttttaaaacgttatgtttatttgaggttgggaagcaagaaattgcccttgctctgaaaatgtagtcatctttggaaaagtgcaaatagaagtttgtagataatgatactgtttcatcactaggcgagcatagttattttagttatttttttctgaggactaaatttactacaattgtgcatgaatatgcgtgtggaagtctccagctatgaggctttcattgaagctagaaaagwcatggagaaatcaggtttttttggtgaaaataaacatcaatacccattttgacgtgaatatctraagtgttatgaaaccaactacatatatttttaaaatgctggggctcatacgtgaagggtgagcactgtgggcaaatttggaaagattctctacatttaaagattatttaagggactggtattatatgcacaggataggctaaataatcagtcacaacagattctggagtgaactggggagaagtatgggatagtgcagtgagatgtatgttattagtctcagattatagcatgtcagagaaagaaaacacatgccaaacttaatgaaccctattaatcawctcagctcctcctcctaattcctttcggtgcctcactgcnatttagactgggaggcacgcattgacagccacggcaggatcttctacgtggatcacgtaaacagaaccacgacgtggcagcgaccgacagctcccccagccccgcaggtgctgcagagatctaactccatacagcaaatggagcagctgaaccggcggtgaggatgaacattttgctgtgactgttgtattttgtggttgggctaatttttacttggcacaaagtagaagacatggttgtctctttgatctttgtgtgtcctgtcgttaaagtgtagytgttaccgcttttgattcccagacttcaattggacttctcttgattaaaaaaaaataataatactcacccacatatataccttgtttggaaactagagaacaaataaataaatgtgacccctttagtcagcmcaagcattgatgtttactaaagcagaacatatacatttgttatttaaagccaaacatcttttctagtctctagaatctttatttgtggcttctcattattatcaacctaagctttttagatgagtcattctttttcaagaattaattgctgtggaacataaagttttttttcctttaacaatataggaatttacttttctttagttaagggccacagaatttttttagtgttattaatttgccaggaagatgttccccaaacaatggacagaagaaatttaatgcagtgtaatttaaacagcaggtggccaagaagtccagggaatgggggttggaggaggaaatagttgaagctgagaagatagtgaaaagttctagactcttggggagcagttgagtcccatctcttaaatgctgctggaatgtaactctaggctcatgattttagatatcagagtatccgcagaaccatgaccaatgagaggcctgaggaaaataccaatgctattgatggggcaggggaggaagctgactttcaccaagccagtgcaggtaagagctttgggctttgtttttgtaatttcataaaagtggaaaaagaagcaaataaggattcccaacaagtaaggcttttcttttggagaacttttgctcttcaataagatctggtaatccaactcaaaaaacagaattcaccagaaacctcttctaatcctcaatgtttaattaatataaagaaaggaatcacaaaacccaagtagaatataaatttctttaatttcttgatctgtgggatactggaaaaagaatcagatcatttaaaatacgtaagaatgcattaaaatgttcatagtaactagaaatattacttaactgaattttagtgtaattaagaacagccatgttttatgtatgaatttacagcaaagaaaaaagcattgggggattaaaatgatgacacatgatgtaggtatcctatgattcttttgaaatgcagactgaagtgagtagatagttttcacatcatagaaagatttccctgaccgcctctgtggtctgccccatctagatttccgacgggagarcatcctgcctcactctacctccagatccaggatcacgttgctgttacagtctccccccgtgaagttcctcatcagcccagagttcttcaccgtgctgcattctaaccctgtgagtagcgaatctgaaagagtgtgaargaaaacarcaggccaaagcaaatgatcgttgtttctgtagtaatagcaggaatgataatggcgaatgtttccagagcatttagtgtgttccaagctttgtgttgagcactgtacactttaaccggtttagtccaaagaaaccgtttgagttcattgggctgctataacaaagcactgtaagctgggtggcctataagcaacagaaatttatttctcatgattctggagctgtgaaggccaagattgaggcactggcagatatggtgtctgatgacagtccatttccttgtgtgtagatagcatcttctccctccatcttcatatggtctaagggckgagggtgcttgctctctcaggcttcttttataagggtattaattcctaattacctcttaggtcacctcctgcccccatctcctaatactattatattggtgattaggtttcaacatatgaactctgggggacacaaacatcggacycataacaggaggatttaaaggattattccacgagtctccgagggctgagggagtggcttactgaagatagtaattaaaggaaggtcattttaactgcacatgaagtgatttagaatgagggaaacattggccatagaagtctagcaggatataatccattcatcatggcatgtgttgataggaacctgtactaggatataagaaaatagacaaaaaggattcagcatgagaggaatcgcagacagggagttgacaagatttggtgggtaagtaggcagaatagaaactgaagaagttgaccttgagtattaataataataatacataaataatgaacaatacataattaataatactaggaaaattcgaatgagggacttgttaaaggaattgaaggagaacatattgaatttaacaagacatatcmtacactttcagaaaaacagagtagatcatagagaaaaataaaagtcaacatagtcctatcaccaggagtatgtggtgaggtaattagtatatattaatacatatttayttatgttaatatttttctgccttctttagctttgctttacaagtataaacatctgtctgcctttcctcatcattgtctcctggtttacaggtttagcttggagcagagaagacttgggaggagagtaagcaacgaataacatgctagctatcctcatatattatgagagaggggttagatttactgagcactcagcttcgcaagtttgttgatgattatgtgctaggcactgagctaagacctagggatacagagatgacagcaactgtgggccctggcatcccagacttgagagcaattataatgtcataaccagaattacaagtgcaataatggatggctatagaagatacactgctggagtggacgattaactccaaagggaaggcacatggaaggggccatagacaggttyggatttgagattagttttaaaggctgattaagagcttktcccagaaacaagatgggcaggagtactctaggtagaagaagcatcatttgcaaaacaatcgattcgtgaagctgcaagtctgtcttgataattactgcagaagttctaaaactggattattagtattgtaagcaattcggtgttgctggtgtattgagaacataggacactagtgaaagtcagatttgagcctgggaagggatacagaagctaggctacacaaacctaaactcatatatgggacaattctaggaggtgacaggctttcatgcaaggcagaatgggctaacatttagagttgtcactgtaacacagaaaaaaatcatgctttaataggaagagactcagacttggagtcagaaggcacaagctcccctttgttttttgttcatttgttcatgccttcatttaatcagtatttattaaatgcctgtgatttgcctggtacattctagactctgggaatagagtggtaaataagacagagtagaatatagttaacagactagtgaataaaaaagrtaatgcaggtactgtagtgtggtgtgaggcaactgaaaccacacactgggatagagttacttggggatgaggtggaggaggcactattttattttattttattttttaatctcaaaatctcacaaggaggcactattttagatcaggtggacaggaaggcctttccaagggagccacattcaagccgtcataaaatgcccagaagccgataaggtaaatgtctgagaacagaacctgccttgccaaggaagtgcagagactcaggggtaggaatgagttttctgtggcacataatatggtcagggaagcgtgcagggctacagaaggttgggcttgcatgatctggcaaggtatttgggctttattctgaaagggttttctatatgggagtaatttagagttttttaagttccttctagctgttatgcaaagaatgggttttagagggcaagcttggcatcagggagactaagtgaaaagctactgtggtaaggcatggaagtggcttgggctaacgcagttagcagtagagacggtgacaaatggatgaatattggatatattttgaagacagagatgacattcttgctaatagattggaatatgggataggagaaaaaagggcttcaagaaggagcaactgtagctagactaataaagtagaaaagagataagactcaaataaacacaatcagaaatgataagggacagattaccactgaccccacagaaatacaaacaaccgtgtcagagaatactataaacacctctatgtacataaactagaaaatctagaagaaatagataagttcctggacacatacaccctcccaagactgaaccaggatgaaattgaatctatgaatagaccaataatgagttctgaaattgaggcagcaataaatggtctaccaaccaaaaaaagcccgggatcagatggattgacagctgaatactactagagatacaaaaaagagctggtaccatttctactgaaatgactccaaaaaattgaaaaggaaggactcctccctaactcattctatgaggccagcatcatcttgataccaaaacttggcagagatataacagaaaaagaaaacttcaggccaatatccttgatgagcattgatgcaaaaattctcaataaaatactggaatccagcagcacatcaaaaaagttatccaccacaatcaaattgactttatccccaggatgcagggttggttcaacatatgcaaatcaatacatrtgattcatcacataaacagaactaaagacagaaaccacatgattatttcaatagacgcagaaaaggccttcgataaaattcaacatcgcttcatgttaaaaactctcaatcaactaggtattgaaggaacatacctcaaagtaataagagccatatatggcaaaccaacatccagtgtcatgctgaatgggcaaaagctggaarcattccccttgaaatccagcacaaggcaaggatgctctctgccaccactcctattcaacatagtattggaagttctggccagggcaatcagtcaaaagaaagaaataaaaggtattcagctaggaagaaaggaagtcaaattatctttgtttgcagatgacatgattctacatctagaaaacccagtcctctcagcccaraagattcttaagctgataagcaacttcagtctcagaatacaaaatcagtgtgcaaaaattgctagcattcctatacaccaacaacaggcmagcagagagccaaatcatgaatkaactcccattcacaattgctacaaaaaggataaaatacctaggaatacagctaacaagggaaatgaaggacttcttcaaggaaaactacaaaccactgctcaaaaagaaatcagagaagacacaaacaaaaggaaaaacattccatcctcatggataggaagaatcaatatcatgaaaatggccatattgaccaaagtaatttatagattcagtgctgttcccattaaactaccattgacattcttcacagaattagaaaaaactattttaaaattcatatagaaccaaaaaagagcctgaatagtcaagacaatcctaaacaacaagaacaaagctggaggcatcacacttcctgacttacagctatactagtaatttctaactatactagtaacttacaactatactagtaaccaaaacaacatggtactgatacaaaaacagacacatagaccaatggaacagaatagaaaactcagaaataagactgcacacctacaaccatttgaccttcagcaaacytgacaaaaacaggcattggggaaaggattgattccctatttaataagtggtggtgggagaactggctagccatatgcagaaaattgaaactggaccctttccttacattatatacaaaaattaactcaagatggactaaagacttcaatgtaaagctgaaagctataaaaaccctacaaaaaaatctaggcaatactattcaggacataggcacaagcaaagatttcatgacaaaagtaccaaaagcaattgcaacaaaagcaaaaactgacacatgggatctaattaaactraagagcttctacacagcaaaagaaactatcatcagagtgaacagacaacctacagaatgggagaaaatttktgtagtctgtccatgtgacaaaggtctaatgtccagagtctacaaagaacttaaacacatctacaagaaaaaaaaaaaaaaaacaatcccattaaaaagtgggcagaggatatgaatagacatttctcaaaagaagacatacacgtggcctacaaacacatgaaaaaaagctcaacattactggtcattatagaaatgcaaatcaaaaccacaatgagatgtcatctcatgccagtcagaatggccattatgaaaaagtaagaacacaacagatgctggcgaagttacagagataaagaaatgcttctgcactttcggtgggagtgtaaattagttcaaccattgtgaaagacagtgtggcgattccctaaagatctagaaccagaaataccacttgacccagcaatcccatcactggttatataactaaaggaatataaatcattctattataaagatacgtgaacatgtatgttcattgcggcactattcacaatatcaaagacatggaatcaacccaaatgcccatcaatgatagactggataaagaaaatgtggtacatatataccatggaatactgtgcagtcataaaaaggaatgcaatcatgtcctttccagaggcatggatggagttggaagctattattctcagcaaactaaaacacaaacagaaaaccaaacaccacatgttctcacttgtaagtgggagctgaatgatgagaacccatggacactggcggggaacaacacacactggtgcctgtcgggggtggggtagggagagggcgagcatcagggataatagttaatggatgctgggcctaatacctaggtgataggatgatctgtgcagcaaaccaccatggcacacatttgtctatgtaacaaacctgcacaacctgcacacatacccctgaacttaaaagatgaagaaaaaaaaagagcaactgattgcatggtagtgttcatgagttttctagtatatgtttaaccactggctttctggagaaaaaagtgtgtgtatatttgtgtgtatgtaggctgtgtttatacacacacatatatgtctgtgtataaatatatgcatgtgagatatatgtatatatgtgtatagatatagatatagatatatatgtatagatggaggcatcacacttcctgacttataatttacaaataatagtaaaagagacactgaatgcttttgttgatttttgctacctacagtggtaattgaagaacaagtataattccaacaagaatattttcatttgcattaacaagtaaagacaacagtgtaaaagggagacatgttggagtttcatattcctttgtcaatagtttttgaatattagacttacatttcttcatgttatgtgtgtttgtgctatttgcaatgtaacagcacaatttgaagtttcatctgcattytaattttctccattaatttcttaagtctggaccttaagtaaagaaaaaggcagtaaacttttcctataaagggccagagagtaaatattttagggttttggcccaaagacaacatgtaagcaaatggccctggctgagttccaatgaagctttgtttacaaacacagacagctagccattgggcctgtagattgcccacccctagtctagacagcctacagaacaataaatcaagccctgatattgcatttcctgatttctgtagtgttaatacgcccactatggccaatgtcaaaccaccaatgacatcatgaagcacagagttctaacttctctcttygggctgccgtcttcatacaagttcctcatcgctgcattgtttcaagtagagactggataaatagtcaytgagttgtggtataaggctgygggaatttttttttttttttgagacagagtttcgctctgtcgcccaggctggagtgcagtggcgccatctcggctcactgcaagctccacctcctgggttcacrccattctcctgcctcagcctcccgggtagctgggaccaaagatgcccrccaccacgcccggctaattttttgtatttttagtagagacggggtttcaccatgttagccaggatggtctcgatctcctgacctcatgatccgccgacctcggcctmccaaagtgctgggattacaggcgtgagccactgcgccaggcccaaggctgtggtttttaaacttggtgactttaaaaaataaaatgcatattcttggtacccagatcttagagattctggttcagtaggtctggagtgggtcccagcagtctgtttttattttgctttgttttgttttaggccccttaagtgattctgatacaactgtggcctgtagtctgggaactcctaggataaagagattttgcattaaatgtccttaccgtgtttgttacaactataactctcctggacttttgacaactaacatgttttaacagtatgaaaatactaagcagcttacaggctttttttttttttaacttattttgttttcgtgtttttatcgtgtttcctttttctttagttgggcatgattttagaatttattttgctggatagtctatcttgatttcaaagtattctttctaaagcattttaatttttttcttcctcttatgaactgcatttatattagctaaaaagatgatccatgctgtacatttatacatttctgtaagacttaaattctgtgggtttaggaagtattattttcctgacttatatatggcaaatattgaagtagctgaatttgtcttgctagaagtctcaaggtatgaattaatggagataactcagacaattttttctaaagggcattacttgctggaatgttttcttttttcctagattaacagaaaatgttataaaataaacttttatttgatttctgtattttaagatttattgtctagggttttttgctagaattgtttatgatctatacctctttcagttacttccctgttcgtattattgaaaatgttcaatatgcaaaaggaatgtatttaataattttcctaactatttttttatgacttgaaggtatcagtttatgttgaaagaaagtcatgaaaaataggtgggaattgaacaatgagaagaacacttggacacaggaaggggaacatcacacaccggggcctgtcatggggtaggcggagtggggagggatagcattaggagatatacctaatgtaaatgacgagttaatgggtgcagcacaccaacatggcacatgtatacatatgtaacaaacctgcacgttgtgcacatgtacccgagaacttraagtataagaaaaaaataataaatgtaaaaaaaaagaaaaatagattacgtgtagttgtaatacctagtaatccttactggaaagaaaagtgttaaatagatatatggttgtcataacactaaagtaaaacttgagaaagaaaattttgtgggttttttctttctttttttgcattgtggttgctttaggaattattctactgccctctaatggttgtgatcagatttctttcaaaattgtcctgacaaacgatttctcttgttaattcaagatttagttattagtgccatgtcttttatagctgatgtgcctatatttgtctaattaatgtcatacataaatatatttcattatattcaactgaataattttccaacatacgtgccaaataattactactgtggcttttaatgagctctaaaaatacattaattctagcgyttaagtttcttagtacttaatgaagaaaaatactgttccaaaatccatacgtatattcttaaaacttgggaattcctgctattgcaaaatagatgaattgatcatttgtagatagttttgttaatgtgaaaattcccttccattttactctagctagatgagaacaatgtaaatcctgtaaaattaaaaatattatgaagacagactgtataaaacaggactgttttgatatctctgcatacatattatgcaaacatttcttgattttgtatatattaaattttgtttagtgaataatgtatacaagtgctcaaatctgctcccttgtgaatatgagagatgtttgctatagatttggtgacgtgcttttccaaacctgaattcagaatgcctattcttgatgaaggctttctgaaatatgaaagaaagactttatttatcagtaatgtacttaactatgttttgaaaacaacagaattaggtgaaattaggactgggccaggtaatctaggacatttggtcatcataacactaaggaaaacctgcaaaaaaaggagaggggattgattattatttccattgtggttgacaaraactaagtatttgcatgtaattttcttattctgctgccaaatggcaatgacatttacttctacaacctcaaacaaacatgtaaccaaacaaaaacacatttaagttctaaggagtgttatttaacaaaactccactcaagaaattcagttgatcattcactcaaccatcaagtgcttatttcttgctaggacgatgagaaacaaccaggagggaagttggaacagggatttttggaattgagaaggaataactaaaaagaatagttaaattatgtcaaaggaaaacaaagtgttgtttcctttagagatcatttaaaggggctttgtctactattaacaattaccaattcctcttaactactcgagtccacgtgcagtggcttcccaggtgaattctgttcattatcatgagactatgttatgaaataggtatcatgggctctcctctaacctacttttgtttcaagtaaaatatcagattcatttactgcatctttttctgtaagataagcaagcaaacaaacaaacatagaaaaggatccttacctagttagaaccactaaaccccaggagaacaaaggaaaatattttctcttaacccacagctttgttaatatcagcttcatgaagactaaactctgtcaacctaatcctatctgtttagtgtttttggctctttggactgctcccattcttacctctgttcattctgtccgtgtgtttcagtattttcacgactgtcgtggcctttgtttttccaactctttctgcctctggtgaatctcttccttccacctccccctataattctccttcttcatccttttgartgatcaggccttgctcatctctgtatcctcagggtttagcacagggcttagcacatggcttagcacataattaatgaagcttaggasacccttgttcagtttatagaatgtgggatgctgggccaggatcttcaaagactaaaagtggtgaacaattttgccactttctttatctgttataacacaggtatgatagatgtaatcccctatatatttttacttacttatagcctgtattcttaaagtgattttgaccttttcaaattactttaccatcctttgtcccactggatttgaatctcacgtgcctatggagaaagcaagggagttwttattatcccatattacagttaagcaaattgagacagagattaagtagttttctttgtctctatgagtgacagagctgagactagaatctgcactgtagttctatatgaagtggagtataaatatccttcccaaactatagatatataaattacatatatatatacacacacataaactatatatacatatctatacacacacagtttttgcataaacatatgaagttattcaaacatagttttttttatagaaacatagcagtctagaagtatgttcctgtttggcttaagagttttgtatagaccctaacagtcatgtacttactattcagacttgaaaaggctgtggatctaaagattgtttactagttactgagagaaatctcctgcattgaattactttggtagatgctctttgcaagatcagatgtgtttggcaccatactacatgtttcattgagtggagaggaggaagatgaaatgacataattaattataagaccagccttaagatttctgtgcttaaagagctattcagccccagggaattacttcaggtctgaggctgggatgagtttcttaacttaattgccactgcttcttgccctaatgaagttcttttttaacaaagtgaggagcatttctggtgctctagataagaaatcagaatgtggcctatttagttattttagtgagaagagggagcagtgaaggcgataaagaggtatayctatttagaacaatgggtaatgtaatgatttatccgacagaattatcccccaaataatttgtccctgaagagacttaatatttgttttactcttaggtagtaagacctgaaagctcattatgatccctacacaaactagtgtggtctcaggactctaacttgcaatgacttatgtgaaaatatatcagcaacactgagccaaatgcagaaaacagttgccttgctgattgtatttaaaactcaaagcagagtcagccaatagagccaaaactgttacttagctgaagttaggttttttctgacactgcccaacttctgttatttccttctctgctttcatggtatcactttcctatcctctcatgctctctaattgcccagagcccatgcataggcctgcctgcattgacagtactctctgctctgaaccacacaactgctcacagccatcaaaacctcctcttatttagcctgtcggttgaaatatgactcaaaagtattttatactcaagtgtactgaggaattaaggttcaaggatggttcattgtggtcttctttcttcttcccttcctcctcccttcctttcttctttcctttaatttgttttgatagggaacaagtatttaatgacggtaaatcaatcagaataatttaggttatacttcaataataatgaccaacaaatctcagtggcttaagctaacaaaggattacttctcattccaagtcaggttatcagggtccctgtggtcactcagggacccagagagccaggctggggagcatccctgttcaaacattgccacttgctgtgtcaaagggaagaaagctctagagggactcacatcagcaataaatgctttgacctggacatgacacatcttgagggatcctagaaagactggagcaatgttgactgtcttcacactcattcttctttgatccctaataacgaacacagtactgggtacagcaaagacaataaatgtttattaaaatgaaatcatttccagagactctagagtccttggggtttgccttgggctgtcttagactaaaatagataacaacccataaagtttagactaaaatagataacagaacccatacgatttagactaaaatagataacagaacccataaagctggaagaggtccagactcagtctagtgtccctgagacactaaagataaaacgaatccaaagccctttgaatcagtctgagaagaatagagttccagggtgatcattcacggcctggtcagtttcatgaatatcatattccctctgatgattcaaggaaacagctgccatacagttattcctcttctgctgttttgtgcatggtattatgcaataaatatttattgactgactcatatgtggacaatcatgacatartcagtttgtggaatcttctttaaatatcatagaaatgaagactgtaaggttttggacaaaacaatcacttttctgtgtggtggtatagtggagtttttttaaacttgcatttcattcatatacatccaaccaaatatacacagggaaaaagagaaaaaaagaaaaaagaatgagatgtacagcccaggcacctcagcctgctattccattcaccaagcttatatgcctctatgaagggtgagattctaaaacctcagtctattgtgatctcagttgagtgtgatrgtcagtgagagcaactcattccattgcatgtccttctagtatagaaatgtatggcaagcatttttccatgcaacttggcccttaagtgtatactagttgtgtcatctggcactcactcagagagccaataacctagtccaatactgrgggagaaactggctatgtcagggctctctgtaaggtggcatattcatcgccagtgtggtataattttgactgtgtgtttctttcctaaaaccagcttcaggatttaatggcccatgtgcagtgagactccacaacatgtttgttctttagtaaattagttcaaccattgtggaaaacagtgtggagattcctcaaagatctagaaccagaaataccatttgacccagcaatcccattactaggtatttacccaaaggaatataaatcattctattacaaagatacctgcacatatatgttcattgcagcatcattcacaatagcaaagacatggaatcaacccaaatatccatcaatgatagactggataaagaaaatgtagcatatatataccatggaatgctatgcagccacgaaaaggaatgagataatgtcctttgcaggaacgtggatggaactggaagccattatcctcagcaaactaacacaggaacagaaarccaaacaccacatgttctcacttataagtgggagctgaaaaatgasaacacatggacacagagaggggaacaacacacactggggcctgtttcagagtaggactgggggagggagagaattagggaaaaatagctaatgcgtgctgggcttaatacctgggtgatgggttgataggtacagcaaaccaccatggcacacgtttacctatttaacaaacgtgctcttcttgcacatgtaccccagaacttcaaatacaaataaaagttaaaaaaagagaactagacaccagctgtggatactgccttaccttctgtagtctttatgtttcattttgttcaagatattttgctctgtctgctgtttccatacatgggtctagagttctgtcaaagcttatatatgcatttcattacttattggaagattagccatacccatgtgtagtatttctggtgcttctgcatgtcacaagtgggttaacattggttctccattcttttctttagagtgcctaccgcatgtttacaaacaacacrtgtttgaagcacatgatcaccaaagtccggagggacacccaccactttgaacgctaccagcataaccgcgaccttgtgggattcctcaacatgttcgcgaacaaacagctagagctgccgcggggatgggaaatgaaacatgatcaccagggcaaggtaacacgagggagatgcctcagggagtgccaaatgcctgtgggctgcttgtggcttcgacacttggccctacccttcaagtgagggccaaggctctttgtgaggtgaaacattccaccttctgttcaagtgaaacctggacagcaggttgtttgtgaccacaaacagtgactgtgccattctgaagtcgtggagggagcggagggagggctgtgacgctggcaaagcattcacttctccctggaaactctcctacctgtcatctctctctatgctctgctgattagagaaaagggttctcaggcagtgcttccttatccctagtgatacagcttgtgttgtaggtatttgaataaaaagttgtggtattatttggagaaggtggctaggaggtcactaagcaagcaactacatgaggtgtgtctttgtgacactgtctgggcttgggcttcagtcttactggttcagaactgtgattttgttagcacattaaccaaaactcactgattgattaatttatgacaagaaatatgtaactgtgcaacacaggccagaatagctacatccgtacttcctctgtaggtggatgaaccagaaagcctggttacaatcaggaagtcattctatgagtaagaaatcagaatgagaaaattagtgcttgttataaggtgaccctcagctaagatttaatttttatttaactcttatgtagtacctactatgagccatgaactgtttaagctcttaaggtcctcaccacaactttgataaagcagtactattattattgccatgtacagataagcagctccatgtgcagaatggttcagtgacttrcctgacatcacagagacaggcagtggctgagccacgctgtaggccagccaggctggttccaggaaccatgctcttaaccatgacattatgctctgcaagtattgagtaaccaacctcagtttctctgtctataaaaagtctgggaatatgtgacttgaagggtagggaaaattaaaatgacatatttaaagtatttaacaacccttggagtgtttgttcaacaaatatttrttgagcgcctaagcaaaacaggtaagccaactactttgtagaactgtcattctcatgaatgcagcattcatgtctcagagacaggcaatagacaaataaataaacatactattctttgtakgccaagagctgattaatgctatgatgaaaaataacgcaacaaatgaggtctagtgaaagacaggaatggagaatgttatttcatagagggtggttggggargatgtcacagataaggccataggtgagcagatacctgaaagaagtaaggagtaaagtatatcaacattcaaggcaaatggaacacgtaaagtactcagtaaatgccatttaccccccaaagttccctctagcagagggaactttaccacaatagcctcttacttatcctgaactcagcttccagcaatattacctgagaatctatgagtagtcaaaatggttgttacaaaatgcatgtattttaatgcatgggagaagcccttaaactctcattgaaactactgacttgatttctgcaagtgtttttaataaamctctaattcccagccaagagaagattagaagtggcaagcatgaagtttaggagagatgaaagagaattgggcttgtgattatgtccctggaccacaggtaaaatgacactgaattagagtcagatgggcgtgacagagaagcctttccagaacactgagctggaagcagggacaccaggggaagatatggctttgctggtactatatttggttcaacagcctgagagcccagtgcctgtaaatattccattggatggaagggcacagatggtccaagtaaggactttgaaaaatactggtagtattatacctgggtataaaagagtagtagcccaccaagagttcatctgttttcagctctgacaagattttacctggaatcatgaatgaggagctgtgttcattagagaatcagaggtccagggaaaacccaagttaagataatggataatgctgcatctgtttctgctctgtgttgagatttaacttgttaaggcaggggttggtcccttcttgccagtcataacttgccagacacactttaggagagaggttcttttactaacccctgaaccttgaaaaaagtttcaattacatataggatactattgaagaagagttgtaatgtattcttaagaacaagttctgtctcatagcttttataaaagttttggtggttaaacaggagtaaacattatctcaaccatgttcataacatgactatacaaaacatcctattttctggggatgtttttactaatctgggtcttacaacttgaagttggcattgtagagaaccctgagtgtaggctggtagagagctgacctcacaatctgctgctggcttttacattagaatcctgtttggggtgaaagatttgaaggacccctgccttgtggacaagacagattaacaggcagacccaaaagcttatcactttagcctgatctctctctgtcatgcattaagactttaataagatttttagctaagctggacaccttaactaaagcagatttatctccatgcgattctcccatgtaagtttctttccaagtgaccagcttccagtagattaaaataacttaaaggagcattcagggaggctggtgctcggtctctgtttggctactctgctttgggctgcatgttaggagtcctgtctcctgtcttatgaataggcagctaataggttttctgtcaaccctggaattttagccccttttaattgaatttaataatatttattttaagagacaggatcttgctatgttgcccaggctggagtacagtggctgttcacagatatgatcccactactgatcagcatgggagtttcaacctgtgccatttctaacctgggctggttcctcctaccttaggcaacctggtgatctccaactcctcggagttcaccatattgttggggaacttagtgtggacacctgaytggcatagcacactgtagtccagaactcctgggctcaagcagtcctcccacttcagcctcccaagtagctggaactataggcacgtgccaccctgcctgccttgacccttttaaaaatgagttgctgtgcttctagaacatttgaagggagaaaacatttttcgtgtaatgcaacatcaaarctattaactattatgaagttattttcccacagtgatgactgatttctagagttgatatgaaacaggatgtccatatcctcatctgcatgaaaggaaatggttcttaacagaaatgttctcaggctaaaatttgcctccatctcctcttctctagtgtaacatcttcctttcgtgttttcacttatttagtcattcagcaacacttctgaggtgtgtaccattgtgctaacaatgataaaaatttaccacttagtgtagtattctggagtatgtagcattgcccctgggccagacactagttcatttagtgctcacagcagcctggagatgggtgctatttttatccacattatatagaagaggaaactgaggcacagcatgattacgtgaattgaccaaggtcccacaattcgtaagtggtggaattggatttgcacccaggcagtccagctccagagtctgtgctcttctcctgcctctcaccagtaaggagggtgaagggatatcttcagcaattatcatgaagatagcaagggcttggcaggatgctgtgggagcctcctgataatttataaggtaggtattattatcattcataatttactgaaatttagaggtagaagtagggatctatataraatagtaaccaaaaaatctcatcagtttggcatttcatgaaaataatacagatttgttaattgatgaatctttactcttataggaaatgcatgatgacttataagggatatactgtaggattcatgtcagcatcctattcctcctcttaaggaayggctggtctcccttaaccatggtggtctgagagaatggcattttcacagcagggtttctttttggtgttacagttctttgctgtccatgttgttcttgatcactgcagggtagtctgacctgggctgtttgctcctgccttacacctgtataatgacatggaatgttctctgtttctgtatgatgcatgctctgatactgtggtgtctgagtggatttgttctcttgctgtatcagtggaattctgctctggtggttgtattctccgtcagccatgatcatgaaactagggttttagaaacatccttgaaagccaagtaatttagaactggaactgaaatcagatcgacacattggcacaaaatcatgtacttcctgtgtaaagccactaaccatccctttcctagacattgctcttttaccctaaatgcctcttctttgaattataaaagaatgcgtgcctgtacacatatgtaacaaacctgcacgttgtgcacatgtaccctaaaacttaaagtataataaaaaaaaaagataaaaaaaaaaaaggatgtgtgccttagcactggtatgtgctatgcaagggtccactgtagaatgacttatttatggcatgagatacctggaaagttttcatagtaacagcagtgtttgaggtgagccttaaatgatgggttgaagtttggttaaaagagattttggaggagagagaaaataggaatggggtggggaaaacacccaaaggaaaggcacagagacaggaaagcaccaggtgggtatttctggttcctgtgaagaaataatgagtgaatttcaagagacacatatgaattacatgaaatcagtggatgctgtactgcagagagtcaaactgagagaatgctacaagatgacttggataatgagaaaacaaaaccgtgaaagttgttatttctcaagtttacataatgggattatttgatttaatttttagaaaaaaaagtctctttttttaaaatttcctttaagatgttaaatacggactatttccccctgcctctttgctttagactctcaaacaatattaacccagggttttttcccccagattattctctttgggcctaaatcaagatgcgaagaaactttgaactttataagtgacatatcataaatgtcatgagattttaaaaaataaaaatatacaatgggaaccatcttcttatttaaagtgaaatatctttcccatagtttgttgtgtttttccttacagaaatcatgtgttacaatatctcccagctaaattggcttccattgctatgtccaagctttgtaactctagaggttttgactttgggtgtcagattgggagtttaagtatcagaatggtccaaatactcatctttgagaaccacagcaaatagcagttatggttatgaggacagattttagaacagaacaaatatttgtagggtagaaagtaccacaggstgagcctatttgagaattctcattttaccagaccctaatagcctgtgtggctacagttgtttcagtaatgacccagaccctggtttcaatcttgcatgaaactgatggcaactatttactgggtcaagtcctatttatctcagtgagtaaagtgcaacttaatatttggaggccacaacttattataatttcaaaagtctcttagcaagataagtgctacattttgaaaaatatgttgtctacttgaccaccacatttgttacttttgtgacacatttttaattgcttagaaacaactgatacctcttgtggtgggtatctggtttaattaccttaagttatgcagcaatctagctgttgatggaattaaactataaaatgatagatagcacatggtttttaaggacttcttgtctattttaaaaggtaaaaatatgttagaaagaattaatgcgtaagtgtacatagaaggcagatggcaaaaataaactgtctaggggttgtgtacctttttgaatgagaaaatagagcagagatcggttttatgaataaatttctgagtaaaacagtagactcatggaatcttgaaggaattgcctaagtacagagatggtctttgccttttcttttttaacagttgtctttatgacctgcatggatttaaatatatatatatatgacctccatcttaaaatatatatatatgaatatatgatttcaacatttcatggtaatgcacttctactccacctaaaatgtggtaatttggataactttattcccactcttccacagctgtaagttgggaaatgttgaacaatcagctctctgtggcaggtggagaggagggctgatttgtagcacttgccagttttgatggtgtaaattctcccaacatggtcaattacatgctgtcagcatcacatcaacctgctcacagaattccttaaaattacagtcygctctcacaagctggtacaagccatctccaacataacactggctcccctcttacaggttgaacgcctaaatactgtcactcccaacatataaaataccactcccttagctaacattttacatcaaagtgttgtacttatattgtgcttgtccacatctactaaccgactgtttttgggactctggcccaagtaccacaaatccctgtttcctctcctagcacctttagagctgcagtcatagcagttaaacgtaatacttttctataagcttttttgtgactgatacagatgtcatgaaataattgggactactgattccttcaaaagaaccaagttagcatgacgatttttttactgaggataaactgtatcattcagcccttttcatctccactatttgtgacaaagagtctgtctaagacataaagaaaataatagcatgtttattccttataactgggggaatcttgggggaaggagccaggagctgagaagagagttataatttggaaggaagagaatgggtaagtaaatacaatctttaaaaaatgaaagtagattacaatgagcctttttttgagcacttccaagactttgtaggctaagacaccagaatttacagcagatacaatacatagtgcttctggcttatcaattattgtcctttcactgtttacataactctttacagaaagaaaaatggaagatcggatgttctgtctttctgtagcgttctgtagcatagttacaagcactttttgttttattttgtttatatagccttttaatatgtattccttagtggcaaaatagtaactggaaacgatttcaaacttctttaacttagatttgttgagcctgaggttggtatttcttcataaatagtgatggctttttcttttcttaaaataatagaagtttttttaaaaaaagaaaaaagaaagaattgtgtaaagaaagaaatgtattttgtttggcttcactaaaataccacttggctccaactagcccatatttcctgactctgactatgccctgaagcagtgaaagggtagatgtttttaaaaatgagattcgagtttgtgtatttgcattcctttcagtttttgagttgttagttggcccagcactgtaaagcttgagtgaatttccttaatgaaacttagcattagggaatcaatattgttcaaaatttgctttgctagtagccaatgtgaaaaggatctatttttccatatgwtttcttttttcatgcctgcattctcgacatactctactctagacagcatttattaatatgtgatagatacttacataaataattgcaggctrttcaaaaactgtgacataaagtgatccaaatgtactaggtcagcttcattgctggcttgaactaggtagcatttcctgtgggaaagtgatccattttcctgacataattgatatgtgtgtcacaaatagaaatggcatgcttggactttgcatgctcttctcttcattttaaagtagaatctatttttcacaattcagctgtgacctgagtaatttcctttatgtgaataaagcaaagcactaaggaaacctgtccaaggtcacacagtgggcccagagcagagccaaaactcacaccaagggattgctccttagaagtgctatattcagtcagtgccctagctgtgtggctttgatggaggtcttaattgagacttttcccctaagtacttggcagatgtaaaaaacatgtgtaaacaatatacacattccatttgactctgaaatagagccccttgtgggatacaaataggacctattctccacccatggccatccttccaacagattagcgatgagaattggacgcagtatgtagagcatgctgtctgggatcagtagcagtctttccacttgaaactttgcagtgttgaaactggtgaggccaagcactgtgagtggctgttaccgtcagcctcattcaatacataatgaaatgttttcctaaaataaagtatgatataaggtgtgaggggagtgggaagaacataaaaaggaaaagatggtaggcagaaagcagaatggaaaaaaggagatgatgtatgaaaagcagagaggtggggaaaaagatattgctcattgggctttggggtcagacagaaacatgggttcaaatcccagcttggtaagttccaactgtacatttcacttaaattgggaattgtattctggctgtattaaaggtgaatgatagatatatcattattcaccaaatagggaaaatccctacatataatggtggtttctgattttacttttagagagactgtctttcctctgcagtgtggaaacttcactgtttccagtgggatttgatttgactgtattgtagtggaaaacccatatacgttttaacatacaagactgtattctcaccaggcatggtggcttacgcctgtaattccgacactttggagaggccaaagcaggtggatcacctgaggtcaggagttcaacaccagcctggccaacgtgatgaaaccccgtctctattaaaaatacaaaaaattaggtgtggtagcgtggtggtgcgtgcctgtaattccagctacttgggaggtggaggcaggagagtcacttgaacctgggaggcagaggttgcagggagccaagattgtgccactgcactccagcctgggcaacagagcaagactccatctcaaaaaaaaaaaaaaaagtgtattctctcacataaagaagttgagaggtaggcagtctagggttgaccagggagttcatcatgttgcaagagcccccatctccttccaacttttttttttttttttttttttgagatggagtcttgctctgtcacccaggctggagtgcagtggtgcgatctctgctgactgcaacctctgcctcccgggttcacgccattctcctacctcagcctcccgagtagctgggactacaggtgcccgccaccacgcccagctaactttttgtatatttttagtagagacgaggtttcatcatgttagccaggacggtctccctctcctgacctcatgatccgcctgccttggcctcccaaagtgctgggattacaggtgtgagccaccacacctagccgctccttccaactttttgctcagccatccttcattttgtaaaccaaaaataaaattctaaacccctcaaccgtctgaatggacccctcctctcagccaaggacattccaaagttaacctaaaaaagctagttcaggccatgatggaaagtggggggttggatatgccttgcagctgaccagcattaacaccaacacagagaccttaagactgatagaacagagcctttgagtctgataagaaatatttacagtctattctctctgaagcctgctacctggaggcttcatctgcatgataaaaccttggtctccacaatcgttatcataacccagacattcctttctattgattccagatctttagataataaccaattgccaaacagaaaatctttgaatctccctatgacctagaaccgcccccacccctgcttccagttgtctcgcctttccagactgaactaacatatatcttgcatgtgtttttggtgtcttagccctctctaaaatgtataaaaccaagtccaccttgggtagacattctcaggatctcttgagggctgtgtcacaagccattggccactcatgcttggctcagaataaatctcttcaaatattttacagagtttgactcttttcctcaacaatcaccatggttcagtatggctactggagctccactattaaatttgtgtttcagagggtaggatgggtgaaggacagaacgaaggatcatctgtcccttatcagatttcccagaagtactatgttttacatcttactggtcagaacttagtctcggccacacatacttacaaggagcctgttaacaaacacagttttcactggtcctcctttttttgagccttgtgtatgggctttagcaagaaacactgtgatccttaggaaactgtttcagaaaagaaaactattatttgtgaaaataataggacctcatatttgacgtgtcacaggcagcatgctcaaaaattcatatgaactatctcagttaaccttcctttaatgtagttatgatccccatttaacaggaaaagaaactgaggtttaaaaattttaactaatttgcccaaggtgacattgctagtgagtagcaaactagagctcagaaccaggcttgtctttttccaaattcaaagcatttaatcattatgttgcctcccacttctcaatttttaaactggtacatttacaatgggatttttaaaatcttctgtttgtggttttagggtctttagcttccctcatttttttcccccaaatcttaagtatttcggtaaaagaacacgctttttttttttttttttttttttttttgagacggggtctcactctgtcacctacccaggctggagtgcagtggtgcaatcttggctcactgcaatcaccacctcccaggctcaaatgatcctctcacttcagcctcccaagtagctgggactacaggtgtctgccaccacatgcccggataatttttgaatattttgtagagacagggttttgccatgttgcccaggctggccttgaacttctgagctcaagcgatccacctacctcagccttccaaagtgctgggattacaggtgtgagccatcgcgcctggcccaagaacatgctttttagcacttggttagttaattgttagttgtctccttgtattttggttggaaattcaagtttttggcaatttgtttttatctgagcaccctctttctcccaggcacagccctaaaagctattggggataacagagtgactaagatacagtcactactgcaaggcttttgcagtatagttcttttgagaatggattttagacaagcctcttaacatcacattaggctatgacactacatacaaatcatagttgacctacatgtagacacccatttgtctttataattacaagtgcatcattgtaccgttaatgaccacccatcccttcaaaacattcctaagaaattaggtaaataggccattctaatttatgctctttgtatttttcccttaaacaagatggttaataggattgtgttagtaataaaagcttgttactctccatttacatacagaggatatgggtttggttctaatatgtattatttaaaaataggtattagccacatccattggtgcaaaatagtttaattgctattttatgacattttgagtagtggcagaaatagtggacaattgtattagaagcacaaaccaaatgggaccaatgtgacatttggggtcagaacctgtcaatgcaagtccacacaggttttatcactggagtactttttacaagacctgagaagaaggatgtttcactcaaggttagtgaagaggaaacattacccaggatgtgaggctgatgacaaaatctcacacaaaacctttatttttttgtacccagaattggatagtaagagaaaggactgggaaagattcctgttctgtccatttttctgctttgttttctggtacatccattgcttaaagttatttctttataaagatgtaaaaatgttttctatatgggacctgccccatttcttgatgatgtacatagagttccatatgaaacattctgttccataatgggaaaataggtttctaaataggcataaatatactatctgcctctggcatttgcctagataccttcatctctaggtgttaaggtactttgttaactgagctccattggtttgaaaggtcagttcttttttgcctgttatttggcatacatcatgtgccttgatacttggtttataggtactgagtctcctggctctcctaatagcctctttcatctttgatgacctaattaactatctgatcatggaaaacttacaatttctaattgyacttaagataatgggtttcattattaccttgagtcaatttyactttgaaaacttacaacattgggcccctaaggataatgatagatagcacttgtatagttttagaattaaacaaacagaccaaaaaatgctttgctacattgtagtccatcttactgcaatgctgaggtaaatggtttatgctcattcatgatttcatgttatcagagattctgcagtgatcatgacagacatggcttccattcttctaacacattatgggggagaaatgtcaggaatgaaggagacatgtttttgtaagaaacatatagctcagagaacttaagtgacttacccaaagttctagacggtatgtgatgagtttgtatgggtgtgtaatgggcgactaaactggaaaggcatgtaggcagactgttaaagagtaatgaaaaactgaccaaagagtgggaatgtcttttctgtggacaatggatagccatgagaagctttgtattggggtggtgatgtaattgaagtgtttagamagaatattcttatagtaacgggccagttaaatgactatggtgatagagatgtggagcagctgagaagccaccagcacttacacacataaaataaagtcccaaaataatggggtggtgttcaggctgggaggggacaaatagaggacactacagtgagaaaatgagaaggattttgtggcttactgtataggagaaggaagaaagaagagaagtcaatgatgtttaaaagtttcggccaggcgcggtggctcacgcctgtaatcccagcactttgggaggccaaggcaggcagatcacgaggtcaggagatcgagactatcctggctaacacagtgaaaccccgtctctactaaatacacaaaaaattagccgggcgtggtggtgggcgcctgtagtcccagctactcgggaggctgaggcaggagaatggcatgaacctgggaggtggagcttgcagtgagctgagatcgcgccactgcactccagcctgggtgacagagcgagactccgtctcaaaaaaaaaaatttttttttttaagtttcaaggtggtaagaactttataataaccacatatgacagtaagagctcaaagaccatcagttaagagaagcctaaatgtccattcttctggcttccttcttggatcatgtctttggtgactatctcgtggagcatttcctaaaaccaggcataatgttccttcctgctctcttcgttctggatctcatctaagcttggctttctctaatctgatctgtcctgtgtgggtaaggagaaatttccccaaagattgaaaattatgagaaaatagagctaagattgtgactcagaagtkagtcttttcctgaccgtctgatgttataagtcagctaagacatgtgagcggcatgtatttgactcagtgtattgtatcctaggcattctttgtggaccacaactcccgcaccaccactttcattgatccccggctcccacttcagagcagtagacccacaagtgcgctggttcatcggcaacacctgacaaggcaacgcagccacagtgcgggtgaggtgagtcatgcgttttgggsactgacctgttggttgatagaagcttctagtatgtgatggtttgaggaatttgactgatttttttaaagcattttttcttttttttttttttgagtttgatttagaggctgaaaagctttcgaatgttgacagggcttctctggaaatacatacagcctaaatcacaaatttaaaaaggtaggatatatgaggcaaaactgamgaaatttaagattttttgactcagaggaaggtgagagggtgttgataatgtactaaaatgttcgagacaggaagatgataagcccatttgcacacccattttcagcctcacaggaagaaatgaatataacttggttaaatgtggaatttctttatatatatatatatatattttttaattatactttaagttctagggtacacgtgcacaatgtgcaggtttgttacatttgtatacatgtgccatgttggtgtgctgcacccattaactcatcatttacattaggtatatctcctaatgctatccctcccccctccccccaccccataacaggccccggtgtgtgatgttccccttcctgtgtccaagtgttctcactgttcaattcccacctatgagtgagaatatgcggtgtttggttttttgttcttgtgatagtttgctgagaatgatggtttccagcttcacccatgtccctacaaaggacatgaactcatcattttttatggctgcgtagtattccatggtgtatatatgtgccacgttttcttaatccagtctatcattgttggacatttggattggttccaagtctttgctattgtgagtagtgccacagtaaacatacgtgtgcatgtgtctttatagcagcatgatttatagtcctttgggtatatacccagtaatgggatggctgggtcaaatggtatttctagttctagatccctgaggaatcgccacactgtcttccacaatggttgagctaatttacagtcccaccaacagtgtaaaagtgttcctatttctccacatcctctccagcacctattgtttcctgactttttaatgattgccattctaactggtatgagatgatagaatttcttaagtgaagttttctatattacattaaaatatccatccagggatatgggattatggaatcctcactagtattctttaaaattaggatatttttgagagagttgatttatatactttatgtgcctggagaaaaagggctgaactaagaattactaaaaactgctctactttaccgatttgcagggaccaatggtaaccacacgagggccctctaatatcctaaccaaaaaaaagaacaaaccttgtttcagttcttccttttgcagcttcaatatataaaagaaatgtcttaagtcaagttttcttctccttcatatgggcttatgatttgattatataccatcacttgatttacattgtttctgaaaattcccttagacaatagaatttggatcctttacccacctttacatgccttttctgtgtctatgtgcatgtcatattttcagtattatattgtacatcaaatatctttgtagccatatattttgtataagaaaaaatatgaatacaataaataactggatctgattcatcaaaattctactcttggaatttcccctcgtgatttatatacttgctccaatgcatcatgtgtttgctggttgtaagtgcagatatagaagggtgcacatgagragctcatataaaaatgatatacaaatatattacaggatgaggtatgtgcaaaaatttttctgttttatgagtagctaataaatctttaccttgctgtcatgtaacccattagtggtgaactgaatggcactaacaacattcatcttaaaagcagaacagacctctcacctttggaccttgtgtgcgatgtgtagcacaattagggctctgtctgatattttattgcatagcccrtgccctttaaccactcaccttatcatgacttcacagtatgaagctggctgtttggtctagttaggactatttttctgggaaaacatgcatgagattaatagctatactttcattttctttcaacccctctaccttaaaacatgaatattttcatggtctagtagtagtagcctttatgagagagggaccctaagggatacattaagacttttcctcctatggctggaaactgagcagtggcccagagataagtccatacagactgagtgtccagccctccacattgttaaaccttccgggggagtgtcctttctgacacagctgttggaagcatgcacatcctgaagtgctgcccatcagagggattgcccactgtccgctggtctggttgcaaagactgaggtcttagggagaagacctttggcttttctgggaaatgatgagacatggcaacatactgtgaggagagaaagtatatattggagtgttgaaatgataagttatctgactaacaatctgtacttagtgatcagatctccccagagartagctgtattcattcctcaaagccagtaactcaagagaagcaggatgagaagacttctagttacatacatgagtcatttgagccactgtcttatattccttcagcaaatattccattcagtagaaatattgatgtcttttccatctaacaarttaacaccaaacacctgctacaatgaagaaacatagtggttgctgttatgagggatgcaaataaataacacatttcctgcattctttttttttttttaagacagagtcttgctttgtcgccaggcaggagtgcagtggtgcgatctttgctcactgcaaccaccacctcccgggttcaagagattctcctgcctcagcctcccgagtagctgggactacaggcacctgccaccgcgcccggctaatttttgtatttttagtagagatggggtttcaccatgttggccaggmtggtctcgatctgttgaccttgtratccgcccgccttggccacccaaagtgctgggattataggtgtragccaccgtgcctggcccacacatttcccgcattcttaataggaaaggaaaatatgaaaccctactacaaatgaataaaaatatgaaygaaaaatgctttgtaaattttcttttttaatagttgggaaagaaaaatayacctttagataatcatgttttcttctttttatttatatctttccagctttagtgaggtataattgacaaataatataaactgttcacaatggcagctgcttgttctgtttgttctgtgggagctcagaggaggttgtatttaacttgggcttgaaggagagggaagaccttgtcgaggaggggctgtttgaactacgctttgaagaatgagtgagagcattcttgaaggacaagcaagcggtggagggtggggaggatatttccagcattagagtctttagaaaaatcctcagcaaatacccaagtgatgcaacatgataaaagggctgcaaatggttgtgggtggaataaaactctcttttcaaaatcccagtttataaatccagtacagkgtgttattttttcttattctctcttatactgctgttctgctattgkctcaaaagatttctgtaatatgggggaaaatgctaaagcagaagcaaaaacaacattagagttttctggtaaggctgttaatgggtatttttggttatctacttgtgtgtatgagtttctaaatctatattaggtgcaataaataattctggttaggacaaccctatttagctcctccacacctgctcctattagcaccctggtgtgggaggctcaaaccagaaagatctgttgtaccaggtgttctaataggcatggagaattgctcctgaggagataatacactaactcgaaaccccacatgaagattgctgctcttcaacccctcctctgctgagccagggaattccctggcctgccttagccaaaagaagaaatatcttggcactgccccaaaacatttataccactcagtcttccctttgattgtgttgttgcagactgtgctctgtcaatgcagaagttagtcctgatgaacaagtctgctgtttagctgctgcagcctcagtaattataagcagattgaactacttctgtgccacttggtaaagagtcactgccccagcccctctcaagaatrtggatgcctcaactccccccaccatttagccactaaaacaaggctttcaataactaagaaccctgcttcagccccacagctggtatctgttctgatcaagtggtacttcactatgctcattgttaatattttgaacaacttggtttgggatgctgatatagagcattctggctcttggtgcagaacataaatgatgcttctgtttgcaggtaggagaagattctcgacatgcaggaccaccagttcttcccaggccatccagtacattcaatacagtcagtaggccacagtaccaggacatggttccagtgggtatgtcatccctttccagaaatcatctgtccttttgtgccattatctgtaccatgtacactgtgctgatacttcccctgttgttagcctkytactttttgccctatattgagaaattgctgcattatccttaagaaatgtataacaaaatcctacagacttgagtctcaaagggcttctgtcttgtaatatcctaaaggatgagattgttttttaataccaccctacctttcctgagtagaggtatcatattagattattgaagttaaggaaaaataatttattaaggtaatacattatgcaatcattataaattaagaatttggactagcatatacttagtatatatttaaggccaagacagaatttaaatggtgtgtgaatctgtagcagcctcacaaaataaacaatcaaagagagcacattcttaagggcttttgtcacaaatagaaggcagcaagaacctctaaaatagtaaaataaaaataaatgagtgtgggagaaaggcctgaaaaacaacttgagttgttattaaaaggatgaggttgaagtagatcagtggttgccaaacctggagcgcctraggcaggtggagtggacagactggtgggaggccatatgggctccgtgctccgtcttaaattagactaggttggctgggcgcagtggctcacgcctgtaaccccagcactttgggaggccgagatgggcagatcacaaggtcgacagatcragaccatcctggctaacacggtgaaacccygtctctactaaaaatacaaaaaattagccaggcatggtggcacgcacctgtaggcccagttactctggaggctgagacaggagaatcacttgaacctgggaggcagaggttccagtgagccgagattgcaccactgcactccagcctagggacagagcaagacccaatctcaaaaaaaaaaaaaaaaattagaccagctctccatttatctttgttttaaaacgtcttctttaaattaaaaaaaaaatgtcgtgaaattcaatrtaatgcccatgacctaagaagcttgacctctggataagaagaaatctagggttgaagtctaacagtctaggtttttttttatgttattactaatatgacactaaatactgcacatggaattttaaagcactataaarttgttgcttagacagttatgtgggctctgagctcagacgcactataaaccccgattcaataattatccaagtgtcttcattattcatatatagtgaaacgtgcacttagggaacatttgagttgacaatggtattccattttagcaggtagtatttctttaaaattgttattgtatatataaatatacataactaaaatagatatgttataggcaatatgatgcaggtaagattggaaatggcagatctctacagaattattatacttcttttgtttaattatttgttaaagaaaggcatgtatcttgataatatcctataccagaatctctgatgtttaagaatttagacactctgtcctagttctgtgaatttaaatatatttgtgcctatttatgattatcaacaaatataatcaagatgaatcatcttaagtaaacaaattcattttcttgacaaaagagtattaacggtatccttaataaattttaattaactatttttaagtttctttagccaaccttgactgggatttagatttttctaaacacattttgttcatggttcgtgatgatgattgtgttgtagctgttggtatagttggtttggtaaagagctatttgtggcttaatggcatttatttccacgtagagttttagaatagtttgtcctctgcattttggtcctagttgttgctgccaactagtacattttggcaaattgagttctgcctctttacctccctggctggctgctaatcaatcagaagatggtttttcatttctgacttgtcatwtctgtgaggctgattttcgtaagtttaaatgatcaagatctagaatctcgttggtgacctcatcttgccatttgataataaatatggcttgtcaaatgagtttactaagaatgtttaactaagccacagctaacagacctaagtccaataatcatataaaaggttagatacaaattggaatgtaagcacctatagtggtgggcacagtctagttccaaactataactttgagtataagtaatattagccagaaaaacagatttcatttatttattttttgttgttgttgttgtttttcaatagaaacragttctcactatgttgcccaggctggtcttaatctcctgagctcaagtgatcctcccaactcagactctgaaagtrctggggttacaggcgtgagctaccatgcctggctgaaaaacagatgattttgaaaagtttggatttataggccgggcacagtggcttacacctgtaatcctagcactttgggaggccaaggcaggtggatcaactgaggtcaggagtttgagatcagcctggccaacatggcaaaaccccatccctactaaaaatacaaaaaaaaaattagctgagcatggtggcaggcacctataatcccagctacttgcaagcctgaggcaggaaaattgcttgaacccggtggggcacacaggtttggatttatatacataaaactaaaaatagattcttttttaaattgttgtcttttctgatttttttttcagcttacaatgacaagattgttgcatttctacgtcaacccaatatctttgaaattctacaggagcgtcaacctgatcttaccaggaatcactcactcaggtaacaataatattggtatttggttcaagttgcataagcacaaaccattaaatcttagttttactgatagttgtcttggaaatttattctttctttctgacatcctttgcraaacatcttgtatgcaaatattttgtcatcatcaccaggtattgtagtgctggcttctctctattaagtataaaagttgaataaaatcggccgggcacggcgactcacgcctgtaatctcagcacttggggaggccgaggcaggcagatcacgaggtcaagagatcaagaccatcctgcccaacatggtgaaaccccgtctctactaaaaatacaaaaactagctgagcatggtggtgtgtgcctgtagctactcgggaggctaaggcaggagaatcgcttgaacctgggaggtggaggttgcagtgagctgagatttgcaccactgcactccagcctggcgacagagtgagactttgtctcaaaaaaaaaataaataaaggtgaataaaatcaactaaacaacccagaaccctatttaaaaaacgaaatatgaaaaaaaaatttaagccaagcgtttatcctagaagtgcagattataatgaaattaatgacataactttttgagtgtaacttgagtaagcaaaagtagcatacagtttattgaactgagatatatagagttccagacttggtattcacatttttccataataaaaacagattagaacctaagtagggaatctgatattctctaaaactgagcctcaccttgcatgagccctctcttctaaacaacttttcaaaacatcatttctcaagcccagttttactttcctgaatacatgctgttccccttccctggcaagcttttctctccttctaagtttgggaagcaagatttttccactaaaacccagcagaagctttccctccttgaaatctttcaactccactgtggactctcactttcatgatctaggctagtatttctctatctaagtgtgctaggcatcagtgggaataggaaaagaagagtttctgctgaaaatctttcttaaccccaagtccagttgtcacctttactggtagaagtatatttgcctggtggtaccatcctggcccacagcagtgattyccaaatactgatccactaagttgtgccaaactgttttcatcagtatcacctgggaagctttatataatacaaaatgccaggtcatgcctcctccaattcctctcccttctcagaatttatacccctgttctcccatgccctacccagaaatttaattcaagaggtctggggtagagcctaagaattattttttcaaaacctctctgtataattctgatggcacagttggctgcaataacctttggtcttgacactattttgatcatgagtcatgaaatgtatcacattgtcctttgtactggtttgactttatgacttttgtgttttgatttgacttttcaagtccttatgcgttattttccaattagattttaagagccttgcaaatagggatcttatccaactcatcattatttttcctccttactgttcaaatatctagaatagcattttgcacatactgaatgtaaaaatatatatgtatatagttgtcgatttgaaaataaattaccaaatatactcacgatattcttggtctcatgtctttttttttttttttttttttttttggaggtagggggagacggagtcccactcttgtcgcccaggctggagtgcagtggtgcgatctcggttcactgcaacctctgccttccgggttcaagcgattctcctgcttcagcctcccgagtagctgggatgacaggtgcccaccgcaacacccagctaatttttgtatttttagtagagacaggatttcaccatgttagtcaggctggtattgaatgcctgacctcaggtgatccgcccgcctcggcctcccgaagtgctgggattacaggcatgagtcactgtgcctgaccttggtctcatgtctttaaagttgtcattaccttctaaagtttgtaaaggctaaagctacaaaaaatttcaagtattatactataaacactgtgtatataaaaatcccagtttcacctggtttcacatggttaataacatttgactcaactcttagtgccttccccaacataagcatgctgttcttaaccacggaaaaattataataattatgcaagtgaagattttgcatgtttgtttattatggcatccactcagtaatccacgttcccctagagaatcttgtgtaagaagttttagttctaaaaaattgcagaaacaagcccctcagtgatctaattagaaatgttagcaatcctagacctcaaagcaaaacaaacaaaattcttcctcttttgctaatcacaaaataaagggaactctattttctctstcttctaccacttccaaccaacacaygccactagttaatatctgttcctctaagtgtaccccatcccccacaaaacaggaaactcaagaagtttttcactttttctctgcgttccacattagtgtgtratacgaattaacatatctttaaatctccaccatcagagagattaggtgatctaatctacctggacagggcatttgtcattagtctttaatgacttgacagaatcttaacagatcctaacagagggaaaagctgcaggcccaagttggtagcttcaagttttgttttgttttctttctgctttttagagtctgaaaagtctctaatctcctaaagatgttgaagatttttttttagtggcatctagagtcctcagttaagcataatctttcttctaacataggattcacatggtaatctatttttatgcaattatttgataggctatgaaatatatttccatctttacagaatgtgaccatgggaagcagatgctgtcatgataagtaaaagtaaatcaatgagataataccactcctcctatccagagtgtgtgtcacactgcactttcattttctgtcaagtttttgggagttaaatattttgcttatcataacatcgtaaaggggaagtttgtatatctaagagaacattctgttttatatagttgtgaggagcattcccacaaacacaggggtgggaaataggctgaacttctttaatttcctatttcaatgatatttttgataacagatttatacatggaatggagccactcagtaatctatgtgtcaaagttcactgtggaccttatattcatacctggagcaaggattcccagtaccaacatagcttkgcatatgtcctttctcatctgtggcacaccacttaagataaatattccttcttatttttcccataatataatgataaaagtggtagcccttgagagattgaagtaggtatacctctttactttgtgttttcttggtttgcttgtgattcatcctaagccagaggatagcaggcaattcatttagtttgcatctatgtatagttttctcttccctgagacttcactggtgtgtcttcctgtctatgtggctatggttttccatgcattgtgatatggcttttactttcaactgctgtatttaaatcactgctccctataaattcatttatcacgcaaatgtgaatggtactaagttgctgtcctttttttttttaaacaaacctcaggagatgtttatttcccctgttagaaaaatcagcttccaaacgtcagtaccacatctgtaaaatgggtagtgtccccatggcattattatatgctactactggttctcactgaaagaagatgtttrtatgctatgacactaaaataaaagctgaaaaaaagttctaacattttatacgaatacaaatatattcattagaaaacaacctttaacagtattttataggtgaatgtaatgcacatttaaaaattcwataaaatttttagtattggtgtttgtatagcactatgtaatgagaaaggccatgaacctgagttaagagttgagaatttcccctctaatatgattattaagtccagccagtaaatctgttccctactagtccagctctccccaggcaccagtgattatttttggcagcaggctgtttcctccttgagtgcttcctatataactcccctcaccatgaggacatgatctgtgataattttttcattctgggtagattagatcattccatattttatgttatcaggaaatcagtaacttgggagtcaagaaattctgaaccacaaaaggcaaatggatatgtgtctcaggattcaccagactagaggcaaatgcagacttgaaccttctatttcctttcattatcctatttgaagagccctggggttttgttagagtttaattttactcttaatttttttattttaaaaataatggcccattttgaagtttatcaaacaatacagaattttagttaataaaaagttaaagtttcaaaagctatctttcttaagataaaccctagtgttcaaaattgctaacctatttcttttctagctttgtggcaaatgaatttttctgcatataatattagactggaaatgttagtcttggttaacaactgaagtacttggtgaaaatagcatgaatttacttctgatgatccatatgcattttcctgttaagacctgcctagctctctcccttagtcctctcctgatttgtttacttatcactcagatgtctggaccaacatggcaaacttctgatctttgctgtaccaaacttaaataatagcaaatctggactgagactattattttcctacagacagtttacatagggataattattgaatttttaaagacacctttttttttttcttttgaggcagggggtctcactctgttgcccaggctgcagtgtagtgtcgcgatcacagctgactgcagcatcaacctcctgggctcaagccatcctcctgcctcagccttccaagtagctgggactacaggagcacaccaccttgccccgctaattgttttgtgtttttttttttttttttttaatagagatggagtcttgctatgttgtacaggttcattttgaatacctgggcttaagagatcctcctgcttcagcctcccaaagtgctgggataacaggcatgagccactgtgcctggacacctgattaaaataatttattgacaccacatagtaatggtcattgggaagtcctaatagtagactctgtctcactgggagagcagcagtaatggctcttagaaggtagttgagtatagctcttaagattttgttcaggtttggagccagaaaggcctaggtttgaattctggctctgcaatttacccaccaggtgacttcgaatgagacattaaacaacctccaagttgtcatcctcgtctgtaaaatggggatcggaatttctaacttccagcatctttttgaagattaaatgaaataatatatgtataaaccatttgatactgtgtaagcatagtaagcatatagtaaatttaaatcaatattatattagtagtgtgcccttcacttctttgttctatcagaaggactcagtttaaagtaatttgcccctaaacttactctaattctaaaaaccactattcctgaaattaatcatgcatataaatggaccagtgtgattctgtggatataatttaaatgcaactaggatctaggatctcttttccttttgggggtggggagcggacagagtctcactctgtcacccaggctggagtgcagtgggcacaatctcggctcactgcaacctctgcctcccgggttcaagcaattcttgtacctcagcctcctgagtagccagaactacagcaatgcactaccatgcccggctaatttttgtattttcagtagagatggggtttcaccatgttggccaggccagtcttgaactcctggcctcaagtgatctgccttcctgggcctcccaaagtgttgggattataggcgtgagccaccctgcctggccatctttaattcaactattaatttgtttataggagggctttttagtggtgctgtcacattgtttcctacagggagcgttactctaaaatrttttacatttacacaataaaaccagccttgactgctccatgcctagactgaggactgagccttctggctcraggtttagctggaaattactgagggccaaaatatcatggcaatatcattaagataacgttttagaagccatccaaaggtatattaaaatacctttccaaggaactaattatcttgtaggcctattaagagattagagactttcttcttcagggcagtaaggaacacagattcttagaacctgtcatctattctatgacttctgcaaaaggaataagtgctagtcatgttttatttgaatggatgtactaatttatagatctgcatatgcttttgaattgtatatcaygtatatatctaattttcacatttttgatgcatggaatctcttttaactattaatgtcaacttgaagacaactggacagtcaatcacctaaaatttaaaaggcccaaaacaggaactccaatagccaaaattagtttaggttcttttcatagtatcactctcagatatttgttaaattattttctgataaacattgttctctgatgtaactttsaaagattccccaaattatacatgcattcatccactggatatttctccaaagtattgtgtttttttgctaataagtggttcaatcatgattttcaagatggttttcttacatgaggaataataatattttaggtacatctgttttactgttgatttttcctacattctgttatatttatgaagaaaacagttcagtaaaatgtcattttcctttagtaactcattagacttggactgtctgtggaccaaagcaaaatatcagtgctgaaaccagtctcagtgccttccccaaccccaaaagaataataaatccacttctgaatcacagagaacaatgagttatttatgatagcacaaagtagtttttaataaaatctgctttttacttatatttaaataaattgcccagttactgaatcagaagcatttcttacaaagcaaacaaaataagcatcccttctatgttaataacatgttaatagtatgttggcaagttgatttagaacaacttgccaacaatacaaacagaaaaaggagtgggtcaaagaaatctagtttggctttattttcaatagatcatactgtctgttgaaaaaggaataaataattatggagcctatctaataatatactcaatagtttgaaattattgagtgcttcctatataataggctccaggctaagtatttcatttgcattctataattatgtttatattaacatgaggaaacagagttaagtaactaagttcttagcatgcagataacttatatctatttatgacaaactttgtccctacacatgtggctgattaatttcatatctctgggtccataagaatcgtatgaccataatggacttaaattcccataaccttttaactgctcggctgtatctgtcaagtcagacagtgccctgtgactgtaataatgagtatgaatgatcagtgctsgtcttcctttcttgacattataccattaggcaagtcaaagcatttctctagaactgcctgagggcagtttttgaaaacgtttatttgtgaatgtgccactgaactgtatctagaggaaccaggatgtgcagagtcggcaatccagagttttgtggttttgagcattgctgcttctggttgtctccgaacacatgcccttctttaacttcaccagaatattgggtggtttcatgagaatgttttctgtgggaattcagtcttgagactttgttcattgtcctcaaatgatctagtagagttgatcttctggggtgattccgtgcagaggaggaagtggttacacatactgtgagagtctgagagacagcagtagctggagactttttcctgagtttgtcgctgtatagtttaggttctcattttacagttgtgagttttcatgttaagagattgcctttttacctgcctttgcatttctctccagtggattctgttttagtaaataattggacattggctttccaattctttttttatttctctgccacaggaaaaaaagaaaaaaaaaagatagcaagattgtttattccaaacaccgggtggaaattgttaggagccacatacgttattttggcctaaattaatcatgtccctgctttgtattttactaagcacttatcaggtagacagaaaagtgttttgtacttggggaacacaaagataaaggaggacgggctgagcaccatagctcgtgcctgtaatcccagctactttgggaggccgaggtgggtggatcacttgaggtcaggagttcacctggccaacatatgaaaccctatttccgctaaaaatacaaaaattagccagacatggtggcgcattcctgtaatcctaactacactggaggctgaggcaggagaatcacttgaacccgggaggcagaggttgcagtgagtcgagattgggtctcttcactccagcctgggtgacacagtgagactccatctcaaaaaaaaaaagataaaggagcaagggcttttgccctgaagaaacttatgtttcaaaargaatttaagttgtacctcactagccaaatcagaaggtgtacccataaaagtgctagaatgtactctaaggggcacagagagataaacgtacccatgtagagagagccaaatgataatactttgtattagtataaccttaatcttcattatattaccactgaggttgaattgaatttctttgttaagaagaagccaggctgatgcagtaagtagctcactcctataatcctagtagtttgggaggctgaggcaggaggatcacttgaggccaggagttcaagaccagcccagacaacatagcaagaccctgtctctacaaaaatgtttaaaaattagctgggtgtggtggtacatacctgtagtcccacctactcaggagactgaggcaagaggatcacctgagcccaggagtttgaagctatagtgagctatgattgtaccactgcactctagactgggcaacagagaggactgccacagattccttctaactgtatacattaataaacttgaataaatatattaaagtaattttcaaacattcctctaatcatgatcagttgtctttaacaacatttctcaaacttgttatgttattccaaacgctgggtggactcatgaaaatttgtaagagtcacatctgttatttttccactctaaaaggaaaaagaaatattgcggacctataatgttgacgttagtcacttttattttaaacttaaatgtgtacaaatataaaatatgtataaacctcttatgcttacagcttttataaactacaaaaccaaaagacatacaaattaagttaaaaactagaaaaaatcaataacatttgaattaatgctattaatatgaggatactttgtttttcagaagccaaatcaccaaygttgagaccattatcggtggaaagacacatttgcacctttctgtgcttgtgtttgacttgattcttttgattttttgcatctctggcctagcatgtgcctccttggaattatcagtcatcatttttccttcttaacaaaaagcttatttttatctactgattcattggtttgataagccaattcatttaatagtgtaacctgaaatacaatactgaaggataaaacatatcattgaatgtgccttgggatgagtggattctaccaccacttttctatttgcaaactattgcagagcttttgttcttagaataagccaggatatcttttatgcattatttagcatgaatgcataattttctttttaaatccatctcttttattttctctttagcctgtggtaatttacatatacattacttaaccccacttgatcattttcatgatgcaagttaatactgtaagagaaaaggtttttttaattgctaagcgaagtgtgcgtaagtggcagatggggactggtgttattatcatattgaacatcaaggccctgacagcctaagggcagccaggtgtgttcgccgtccctttaaaagctcacctctgatcactttgcaccaagtgccctataaatacaaacatgggacccgaagtcatatggcaagattcagtcataaatgtcatccatctcatctaaaatattattatattgtttcatgtgctttgatcatcgaagtgaagacacaaaatttaaaaattcttgcagagcttgagcttatgtatgcaaatttctagtagaccaaggatgccagtttgagaatcactggtctatagcatattgggcaaatacctggtaaccaagaagtggttcctttgtttttctcagaaaagattggtgacatttccaggacgtctgctgacttctgtctgttcctcagccttgatctgctctctttacaggcagtaaactaatgccttctttgtttctacgtgaaaggactttataaagaactgtttagaccgggagaaggtataaagcctaaccacgcttcaattaagtgaacagaagaatttaaatattttcacatcaaatgagaattaccttttaactttctctcttccactgcactgtaagctccttgaaaagggactttctcttactccccattggattcccagcgtgtggtaccatgactggcacacaataggcacgcrgaaaatgttcactgaaagaatgactcaatatcaacataagaaagtacttactggtgtgatgtacatcagacgacatgttccagtgtctggttcctgaaagcatatgacccatagcttgtcattgtgatgaattagctggcctggtagaaaattggtctcagcctgcctctcatatgttcttacctgaaaaatcagaccagttgccttcacagactgctagtttttatctggaaagtgatgaaaagtttcccatttggcatacctcctctggtgcmtttgtcctttctttttctcatcctatcatccttgtgactcaagaagcgatgatgtttttcttattcacaggaaacttccaagccgcagaccagggcctgatatctaccatcactcaactccttctgtgtagctccagttaaggaaggaggggagagtgctcagcctgtttgttttttgtcttgttctgtttgcctggattcactgtgttgatagacaaaagagataagctgcatatttgtgggagatagcttttgattcttcaagatcaaagcatggtgttactgacccttataagagtagttctttggttaagttattattcatttttcttcaagataactttcctctgatttagcttttatcagccaacatttacatctcttatcagaaaaaccattcaccagataatgggcctgggtttccatcacgtgtttcagatgtatgattccaaaacttgagggaaaatgttctgcctggttcaagccttcactgaaataaccttaagcagagagaggctggcsttctgagcaactcctttacgtacatgcctaccactaatttctaatagtctttaaaaaaaaaatagtagttagctgctggcaataaagtacagaaaggaaagtttggcaaatactaaagattagctgcttcatctatcatataaaatggatctagccagaagaaaccaaggactgaactctgtttgtcatacctcataagctgtgtggctaagggcaaatccattgacttttctatgcattagggaatttttcatgtgaacatgaaaccttgccttccacctcagtgccttcaagtcagcaagcaatcttaagaaaaatatttcaaatttgggaatataaaaatcagtgcaacttggccaggcatggtggcttacgcctataatcccagcatttgagaggccaaggcaggcagctcacatgaggccaggagtttgagaccagcatggcgaacatggcraaaccccatctccaccaaaagtacaaaaattagctgggcgtggtgacacatgcctataatcccagctactcaaatgtctgaggcaggagaatcatttgaacccaggaggcagaggttgcagtgagccaagatcatgccacagcactctggcctggacgacagagtaaggccctgtctcaaaacaaacaaacaaaaaaatcagtggaactttgtgaaaatatcaagtagaaaaacaagttgcttgtagataagaactaaatctaaataaatacttgtatcagtgattggtattttactttatggtataggaatcagaatatattgtccatagcactcagaataaaattgcatatttgcattatcctgtatattccaatgaaatagaatgattttagtaccataatttgtgtttttatatttttcttcatcttataaaagttaatatggtgtgctttgaaatagcatgatgtaaataagggaagaaagcaactaggaaaaaaattattaaaattgtattcatataacaaattgaaaatagtgacatgatgatgactcatcaaacaaaaaagaaaaaagctggtatcacatttacctataacaaaataatggtagaaataactcaccttgtgtttgatatgtatatgtatatatacatttgcacaggtatgcacacaatctatttcaccaactgttgtagcaaagtatttcagttttttctttatttaaaaaaggcatatgcttttacactgaatatatacatatgcttttacactgaatatataatgcatagatactatctgcttccaattaggaatgagctcatcacatgcaacttaaaggtatrgcctcaggaaaatagatgactctcccaacacaatccctttttggaacagcagggcatcagcgtaagactatatcgctaaaattcaggcccacagtcagctttaactcaaagcagacactgattttattggttgaatagtatactatttatagtacttgggcagcaaaatgatgaagccagtgaaagaatctttctccccacaacattagaactgggaggtgttgatgcttacaagatccccccccttgaaggcaaagaccatgtctctcttggatgtgtattcctagggtattacacagtagctgccacataataggtaccaaaaaacatcatgactattataaaaaatgctcttyactactgagttatagcctaaaggtctaccatrtacattttgtgctgtttcttttcttgattagggagaagatccaatttatccgaactgaagggactccaggattggtgcgcctttcaagcgatgcagaccttgttatgttgctgaggtacatacgtaacactcactcttgaagcagaaggtctcttgtcatcagatatcmtggaacattgtagaaaataatatgccaatattcatagcctaaaaattgttcttattctttagacttgtggaaatattttgaagatttagggtgctgattgagtgatcattcacttcacgttgccatttgttacactgagatctgtttaattttgttttcaccctgctggcaagggagatggtattggaaaagggaaaggttgtaatgaatagaatctcccactcacagaatggaacagaagggtatctgaacaaggcatccaccgtttacccctcagtgtttaccctttcagtttaatattctttcaaatgtttttctcaaaatatgttttgttccccttttgctgactcaaggcattatttatttaccttgtggttttgagrgtgtacgtttgggaaatcagatcagaaagttgacatttggtctatgctactcattgccaacttgatagcccttcataaaactgaccaattattttcacccccgcccctcaccctccaatggttaaatcagctttggttttaaattttagagtagtttagaaaggaaactggcaagttttcaaaagactttctcatttttttattatccctcaaatgtaggcaagccatagtaaaataatgctttgctctacccagtggttgggacgctcatccctgtaacctccagagaattaaaaggaacakcatactgagcctttcaggcaaggttttgtttatccctgagtgctaataacctcattcaagtattcatgatgatcttgaccctgaccatttctaattctccattccatagttgccatatttgttgccatatttctgacctcccatgtgattgttgtcagaaaattatttttctttrtgtgtagtcaaagcataaytcaaagggatatattcactttctatagatacttcacttcagttgactctgaataggacctatggtgggggtagcttctcaacctaatgggtggcctctctcctgtggtattgagccagttgtgaaaccagcatatagtatgctaggtggtcaggaagactactggtcaattaacgttagagtgtgatgtttctatcatggtttggttggtgataaaatagttgaagtttctgttaacagaattctggccaggatatgctctttttcttcactatagaaagctaaggtttttttcttttaaactaagaattctgctttgggaatkagtaaaaacagaagtcataattatcattcacctatccatagttaaataatatttagatggtatagtcttaaatttattttactatagcttataatatttgtactttgataacacaacagtttgcatgagtttctatgtgttaagtagtagaattcaaatgtatttgaattcaaataattcagaactcattcatacataaagagcaaggctgcattttctcctctttgggaaaataagcaggttctgtaaagctaatgggcctttggagaagtgtgagaaattttcttacatataatagttctataattattgtatacaaatgatgtcattaaattctaggcttttcatgtgggtgatcacatgtgtttattattttaataatagtaaacaacacaatgtattatatgtacatgcttaataagtaatataattagtgattattgaaaaatttggggttttattcatgtcctcaattatttatttatttatttttgaggtgcagtctcgctctgttgcccaggctggagtgcagtggtgagatctcatctcattgcaacctccaccctctgagttcaagtaattctcctgcctcagcctcctgagtagctgggagtacaggtgcaagccaccacgcccggctaattttttgtattttaatagagacggggtttcaccgtgttgcccaggctggacamgaactcctgagctcaggcaatccgccctcctcggcctcccaaagtgctaggattacaggtgtgagccacagcgctcagccctttattttttatttcactttggaattggaatgatttgaattggtgactacaaacttcagtcagcatacttgtcacttacataatggaagcctttgtgtctattttaatgttttgtctratttcttaaaaaggaaaaatcactcctggtacaaattgacttatcagtaagctgcaatgtagagatagtgttgctctaggacattattcaattcagaataaacgcatgtaaagttattttccaatagggctattttaaaacccaataatttttaaatgaccttgtttaatttgttattgatttttgtrtttcatgtatcttttcactaactcaattcatgtaaaaaatatacctctatcagagctcatacaagaaatgattgataaatttggctacataaatatttttaaatggatataatgaaagataccacatataaaggcataaagaaagataatcaactggaagaatagatttacaacatgtaaaacaaagagatcagccaggcgcagtggctcacgcctgtaatcccagcactttgggatgccgaggcaggcggatcatgatgaggtcaggagatcgagaccaacctggccaacatggtgaaaccccatctctactaaaaaaaaaaaaaaaaaaaaaaaaatagaaaaattagctgaacgtggtgactcgcacctgtagtcccagctactcaagaggctgaggcaggagaatcacttgaacccaggaagcagaggttgcagtgagccaacattgtgccactgygctccagccatgcaacagagctagactctgtctcagaaaaaaaaaaaaaaaggaaaccagattgtggatacataaagaaggcctttaaaagaagagaacccaatagaaaaatggataaaggttatgaaaaggcatagaaatggaagtatgaatagccaataaacccatggaaagatgctagtaatgtaagtgtagtttcaaataatgagataccatttcacagtattagatttgtaagagtccaaaagtctgaatacctaatgatacataagaactctcatattgtctgggcttagtggcattgcagtttctacagtcttattggagtacaaactgacactgtcttgtacagctgaaaagagctcaggtctctggttactctcttttaggagaatatcagaaacagacatttcagtatggagaagaaagaagacattaaatggtctaagatccaaatcctsacatgtgaaaaatagtagccagggtaaacaagggagctaattattttgtgattgtagttatttaagaggtgttttgttttattttgcttttaattatcaaattaaatcctaagcccttcgaaggctgagaccctattgtttatttcttggaatgaggatatagaacatactttgtatatttatgatgggttctcaataaacattttctmttttgtgttggaatcctgtttccaaatctgaaaacccaggtatgattttcaaacaaacatgtacactcaaactcatatgttgaaatagtaaaataaagtcacgttgtccaaagttggtaggaaaacagggaaatagccacagggttcacaaaaagcaccacagccagccattttgtaccaagaattacctgcaagagaaagggggcggatgctctctttgggatataaaccggatcttggatggaatattctactcctttgggatttaggcttttccccactactttggctgaagtgcccgttttgtttcttgtctttccccagcttatttgaagaagagataatgtcrtatgtgcctccacatgccttactccaccccagctactgtcagtccccacgtggctctcccgtgtcatctcctcagaactcgccaggtgagtccacctgctgctcacagtgaattctctgaggagwgaaccttcaagccagatgttctatcctccctaaagacagaacagtaagggaacacttcaggtacatctttggtgttagcacagatacmcgtgtgcatttcctgtctcgtaagagtggcttatttccatgaggattcattttgacaaacataatgaataggaggattagtggtatgacatactcagatatagaatttacttttcatgatgttatatcatacaatatcaggacacaaaatattaggttgctttttgactttagaaagttctagtgaagagaacttttttgatacacaatgaagataaagtctctactctcaagaaataatatggaattgaaattgttcagtttaatggacttggacattcctgcaattcattaattgcattagatagaacagaaatggattggcagatagaagatgttgataggtaamctgaaatgtgtacattcaatctctttwtgaaagagataggcctgaatgaaagagtgagtgggtggatgaatgggtggatgagcaaatggtaggaaatgcagcttggcaaatgagctttgaaaatgaaggcagtcatgatgttgacrgaatagcagatgtatataggtccttattataggcagtgcattgttcacactttaacagctgtcagaactgaaaatgatttcagtagaagtgcaaactccatatgtgtcactaagctgctgtatgttctttggtatataacatgtgttttcacatactgcaatgataatgaagatgcagcctaattggatactgcaaacaggaaaagatgtattaatatgttcatttaacacagatttatggagcatccaactatgatccaagcactgaattagactctaggactacagagatgaataatacagtttcttcctttgaagaattcatggtgtggcagtgagtcaacaaataactctgtgaagctctgtagttagttctgtaatgaagaaatgtatgagaacacagctgtgggaacaattattctttcagggctggggatggggtatttggggaaatatgaagtggaaccttgaagaatgatgaataggagtttaccaggtggaccaaagaaagaaggacattctagtgaagggagtgatgtgttaggccattcttgtgtaactataaagaaaacctgaggctgggtaatttataaagaaaggtttcactggcttatggttttgcagactgtacaatcatggtaccagcatttgcttggcttctgttgagggcctcaggaaacttctactcatgtcagaaggtgatggagagccagcatgtcacatggtgagagtgggagccagagagagcaggggggaggtaccacacacctttaaacaatcagatctcctgtgaggtcactcatcaccaagggagtggtgcgaaaccattcatgagggatctgcacttatgatccaaacacccccsacaaggccctacctctgacactggggattatatttaaacatgagatttagagggaacaaacatccaaaaaaaccatatcaggtagcataagctaagccacagaagcatgaaagtagtgtaggaaatagatacaagtaagttaatagatacaagggaagggaagttctcaaagctcaggttggaaaggtaggctagggctggttggtcattgaagcmttattattattattattattattattattattattattattttgaatcggagtcacacttcttcgcccaggctggagtgcagtggcgtgatctcccaggttcaagtaattctcctgcctcagcctccccagtagctaggataacagatacgtgccaccatgcccagcaaatttttgtatttttagtagagactgggtttcatcatgttggccaggctggtctcaaactcctaacttcaaatgatctgcctgcctcggcctcccaaagtgctggtattacaggtgtgagttgccacgcccagccagccctattctattgtccatgtgaagccactgaaaatgtataagcagaggaataccaataatatcctgcttttcaaagatcagtctggtggcaattgggaggataaattagaaaatgagagactagagacagtttctcagagaggccattgcattagccagagtaacatgatgaaagactggactaggcagtggagatggggaccagggaacaaattgaagggatatgtaggatgcagagacatcaggactttgagtagaggtagggaagagtcaaggaagattcaaaggccctcactacctaggctaccaggcagatggtagcaccctctgccaagaatgggaaatggttagactcaaattggaagattgagtgagtttggtgttggacaagttttattgagaaatctttgggccatcaatgggagattcccaaagacagctggaaatggcagccatggcgcacaggagaggttgaaagcaargagttcagtgtactggtggcaactggaacctagagtatagactaaagcaactggggagaaagtcattgaaaaggagaggaaatagaggatgatgtcatgagaaacctcaatatttaagggatgagctgagacagagaagcaagtgaaagaaagagagccaacagattttgaatagagttaggaaagtcttttcaggggagccgggtttcacagaggagtggtcaatagagccacatgctcaaagggctcaggaagtcccagctactcacgggggctgaggtgggagggttacttgggctcagaaggtcaagcctgcagggagccatgatcatgccactgcactccagcctgggcaacagagtgagaccctgtctcaaaasggggatagggcatcaagaaggatgagatctgaaaagaggcctcatttagatttgmaaatcatgacattatcaatggtctttgccaaagcaggttctgtgaagtaataggttataaaccggatcatgattggtgacagaatgatacaggatctgaagcagaagtcaaatgctcttttcacgaaatctggaggtaaaaagaaagcaaaatagaacagtagttaggagaagagagagggaaggaattttaggatgggaagttgagcatacatgtgcagaggacacaggacgtgagtggaaggaaagtggtttgtggaataaggcaggctcatgggcagcacgacactgaaggmagaaacacaggccaactttggaacaaaatagggacacctattttgatgacacaggctgaaagaagtgtatgacactacaggtaagtttaaaggtttaggggaaaacttcatgaaattcccaactgggaatttcattcttttagcaactgtctgactttaggcagggtacctccttccctgagcctgaatctctttttctataaaatagagataacaataattacctcacctctcacgattatttttggagaacactttgcttggtgcttggaacataacaagtagccaataaaggttaatgtgtcgctttttctttctttctttctggaaatttgattctgagaagtagtttgttcacatttgaaccattaacaactggaacatacgaaccctgatttgcagagctgtctgcttagatatttaatcatgcagagtggactttatcttagtaagagcctatgctggggtttaaagtggaccatccctttacctgtgttttatggttaaagacatgaagccatgtggattgttgctcgtgccagtcaaggctgtccttttccaggccttttgtgtggcctctcctccctgaggaaaaggtaaattgccaaatgctgccccttccgtgctctttaaaggcatgcacttgaagactgcacacattcttcaagactgyatgagcactctaaatgtggctgagttcacttcctcatttagcatcgcaaatgcwcatgagtaatcattggtgacaataaaatccattctagaaacttacatttagagttaaacattttccaaagacctgtgtaacccaaatatatctaaattgctagcagtgtttgtggtggttttaattttcaggaagaatcatctccatatttctggcctactctgtttcagtgggctttgtttgatcttgaaactgggttgtacagcctgatatcaatggaagtcactataacaaattccacatgataccagggcaggactacctaacctcatttcccctctggaggaatcttctgttcctttgaataaaatagcttctccttctaccaggattcctgaaggttttgtgaaagcaacatttcaaacagatttttttaagtggtctgatcctccttgtgactataatttcaccccttttagtggtgtgagaataatatcttgaaaattatgacagtaataaattttaatgatcttcattgagaattcctaggaacctggtaaactttccccgcttttcctcattccaagcacrttgacatgtattttcaagtgcagaagagagaggggctttggaaactttgactcactgctttttgcagctgttagagtgctcaccaaaatttgtcaaaattttggaatgtgaaggtttgtttttctaggaccattataatgccaatcccaacctcagtgatgccagaaggaaaagatctttccaaacaccatgtggcttattatgccaaatatgggacccagaagtttatttaagctgcacatttctaggaaattaaatgcaataacacctaatttatctgatattattggagatgtgctctcttaygtggattttccaggtaaccaaagctatgattttaactgtatgagaatttgtttgaccccctatttgctgaaactctttcataaatatattatatttctctttactttcctatacactgcacattgaggatatttcatggtttggggggatcattgtgcctatgaatyatgatgcagagctcttgttacttgactagagctggactccctggaaactagcaccagcagaaagtcaccttcaacagaagtaaaacactcagagagcacagaagagccctgtgggtctttactaaagattgtcttgaggggatgggttgtgagagggaattatttctcccaccacattgtgtgcccttaatgatcttcgttttctttctcccaccacaaagtcttagcattttaccagctgtttatgtcatcttctcttttcacaaacagttcctcttctctgctcattctctctctccttttcttccttcctccctctctattcctctctgtctctctctgtgtgtgtgtgtgtgtgtgtgtgtgtgtgtgtgtgtgtgtctgtctgtctctctctctctctctcatctgtccctctccctttccccacctttcctacagtccctgaagtagctttagagttgtttttagaaaaggtgtttgatcccttcccttgactcagccctacaaagatgatctaggaaccaaattgcacaaatgaaggatgctccctgggtgggtagggatggggaagttgtgatcccagagaccaaaagaaagccacagacactgtctctctcatagtatagagacttaactttttgtgttgttagtctcccttgtcctcacccatagagctatcagagggtgcctgctattggcagaccctttacatttccctttaataaatcacttccctgccaagatctctgtcaaggtttgagaagtcagagcattaagttattttcaataaatggtatgtacatgaacatcagcaagctccaagaaatgactcgagggccttttactactcagagaataaagcaaaaatgccaggttttcagtgcttgtgctttgtgccagggatttggacgtgttttttgttaagttccagcgttgagctatgttccagaagatggagccttccagaaattattgtagtgcttgatgttttgttttcattcactcacagggcatttgttttaaatgtcatagggattttttgaaagtgaaccaggaaagagatgagcgtctgagctgtcccaggacagaggcatggagccatgctggatcaggctaagatccagcccctgtccaatacggagaaccagtgctagtcatcagaacagtccaggttctgggtcacacacccagaatcaaaaaagactgagactgcccgggagttggatgccaagctatttctagtgtcttctgaaatattttgtcagatagaattctttagtttgtatatgattatgcaattttgtaacagtatatgaaaatagggtaacacaatatagaagttctttagacctgcctagcartgacaaagcaaaaactccctagtgtctgttactgaaattttttcctgcacagtattagcaaaatgctgactatccatgaagtcagcccttcatttgatgtaacattgatcttttgtacctgattttctttaagactgtaaagaccataaaattcctctgtctacaaagtattatgacctagaacttcacttgtagttctcacacaattttattagcgcaatcttccaagaacattttgtatttccaaagtggaagtaacatcattcctgctctggaatttcttggcaattatacctcacttgtattaagaatttgacaaaggccaacagcataatttactgtaattttatttatttatttatttattttgagacagagcctcactctgttgccaggctggagtgcagtggtgcgatgtcggctcgctgcaacctccgcctcctgggttcaagtgattctcctgcctcagccccccaagtagctgggactacaagcacacccagctaatttttgtgtttttagtagagacggggtttcaccatgttggccaggatggtctcgatctcctgacctcatgatccaccgacctcagcctcccaaagtgatgggattacaggcgtgagccaccgtacccagccaatttactataattttaaaatgaaataatgtgtaaatgacttctttcatgatggaactatgagcaaaagaatttttgcatttaacaattgctgtctcagagtttttataattaaatccctttacctagagtataaacagaatcagagctaatttttattgtgtctgtattgatattgatggaatgcattatggcatttcccacgtccttttaagcatctcaaattatataggagtagttagtgtctgtgctgttttttaaagtaatcagctcttaaaaaaacatgtttcttggcagggcacagtggctcatgcctgtaatcccaccactttgggaggctgaggggggtggatcacaaggtcaggagatcgagatcatcctggctaacatggtgaaaccccgtctctactaaaaaaatacaaaaaaataattagccgggcgtggtggcagacgcctgtagtccaagctactcaggaggctgaggcaggagaatggcatgaacccgggaggtggagcttgcagtgcccgagatcgtgccactgcactccagcctgggcgacagagtgagactccgtctaaagaaaaaaaaaaagtttcttttgtgtcttaaaagattttcrttcagttccttgttcttcatttttctctctcttatcaatgattttgctcttgaaagttgattcattacagctgcrttctgccctgtctgggttttctagtctgcagtttctcagactggagcactgacactgattgtgccacccttgagtggacttgaactgcacggtcctatccctcattcatctaggagagcagccttgtgttcatggagataatgttccttcgtgttgcaaattatgcctttcggtacacaggaaacatttgccctgtgttagtccctggatgctgcccatgtgtttcactggtgatgtttgaccttcttataagggaatagtggttctcagccatagctacacattacacattggaatcatctggacagttgtatttaacactcatgcctgggtcccaccccacattctgggtctttacacattttgttgtaatgcatcttgggtgtggcctgaacattggaatttttaaaagyttcctaagtgattctaatgtgcagtcaagattgagaacccctgcctaggagtctcttctgcttcccagatctttaaagtcaagtttattcacttgctttatgacataactcagctctttgcccagctatacaaacagatctccagacagattattggtcaatagccagttttgtacaaattcattagtaaaatctcaattcatttccctgtctttagtattcacctctatgcagataacaacagctaacacttacgtgggatctcttatgcaacagtcactgcataaagtgccataaacacrctaactcagctcatccacacgtgtggccctgagctctcaccccaattccagccctgtatttttcagtctctagggcatttggttagctgtcatatccaagtcaatatgtatraagtttcacatgcccttgtccacctgcatcacttcccacactcttcatagcatcaggtagatagacttggctcaaatcccaaatctactgtcactggaatatgacttggacaggaaactgcaccttcattttccttagttgcaaagtggtgtgtgatggtcctagtaatacccgcttcgtagacttgtgaggatttctcaagatcccctgtgtaacgtgcatcatctgtaatgtacagcaggcgcttaacaagtaagacctgttgttattgtttaaatacactttatattctcatcatgcttcccattcttctttcttgcttatctattcttttcccagtgcatatttcacattgtagatgtttctctgagtcactcactccagtctagtccttatcccctcaggcttcaattactgcaacaactcctaactggggctctttcctcttgcccacccttaatttactcaacacactctgaaaataatttcttaaataaaacaccatttgtatgttattcttctgctcaagaacctataaaggcactgttcactgcatcatgcccaaactcctctgctaggttttaaaaattcttgtcataatttggctccaacccttctgatcaatttcatttcccatttactcccagcactcctcctccactctaggctagcttggttctcttggygtcttctgaacacacatgcagtgctcatgccagctgttgctgctgtgttccactttaggatataaattctccttcttttgcaaggtgtggttccaattaagcttcctccctaaggccttttccactttgatctctacttatactcatttcttttttataacattactattacttttgtgtaacactgatcttaacaaatgcttgcggggcttggggggcaggcagccatgtcaytgagtggctgccgcaaagtggtgagctcatgcctcgtctaacagagtagctgcagctgcccgctggatccccaaggaaatgcaagccagtcattgcaagatttcccaaataattttcaagagaaaaatctggaatttttaaatttgaaatttaatttgtaaatgttggcaattaatttaaaatattcaaaaaagattatggggcaagcaactgggatctataggactaggtatagccccaggggtatagctttgtttcctctgctttctagtctgtatacctagttcaggacttaattattctctaattgtttgatgttttatttctgtttccccaacccactccagcaaccccaccttactcattttggacatccattggtgaacctaacatagtattcccaatgaataacaactatttagttcactcatttgttagagacatttttaatgaacttacatggtatgtaatgaacaagacttcccagcttttgttttctggtttctttcattggttgggaaatatttagtggaaatatccagtgtttttgtcatggctctgtgtctgatttccatattcatcatcagttttctatcccaacctgctgcttgtgttacccagtgacacaaaaccagatttttctatggaaagaggaacaattggctgggcatggtggctcacgcctgtaatcccagcactttggaaggccgaggtgggcggatcacctgaggtcaggagttcgagaccagcctgaccaacatggagaaaccacgtccctgctaaaaatacaaaattagctgggcgtggaggtgcaagactgtagtcccagctactcgggaggctgaggcaggagaatcgcttgaactcaggagacagaggttgggttagccgagatcacaccattgcactccagcctgggcaacaagagcaaaactccgtgtcaaaaaaaaggaaagagaaacaatgttacttttacatattattagtgataattaccattgaataacgtataaaatatgcttatataatctagatattctcagtacttggcacatgttaagaatgcaataaatggtctggcgcagtggctcacaccagtaatcccagcactttgggaggccaaggcaggtggattacctgaggtcgggagttcaagaccagcctgaccaacatggagaaaccatgaccctactaaaaatacaaaattagtcgggcgtggtggcacatgcctgcaatcccagctactcagtaggctgaggcagracaatcacttgaacccgggagatggaggtkgcggtgagctgagattgtgccattgcactccagcctgggcaacaagagcgaaactccrtctcaaaaaaaaaaaaaagaatccaataaatattaatattatttattctttgtgcaagtgcgcactttgtgcaagtgagacaggtgccttttgcaattatgtgttatattaagattttaccctkcaatatgagatttatgtaattatgtgtctaaaatcattcttggtgatagtgcatatctaaaagaagttttgtaggccaggtgcggtggctcacacctgtaatcccagcaatttgggaggctgaggtgggtggatcacctgaggtcaggagttccagaccagcctggccaacatggcaaaaccctgtctctactaaaaatacaaaaattagctgggcatggtggcaggcacctgtaatctcagctatttgggaggctgaaacaggagaatcacttgaacccaggaggcggagggtgcagtgagccaagattgcaccactgcactccagcctgctgggtgacagagtaagactccgtctcaaaaaaaaaaaaaaaaaaaaaaaaagtttcatgaggagtyttttggtgaggaatttagagtgaatgattaaaacctcactcttggtgccacttacttatataccatgtactttccattgcaacttcctgtctaattgccatgatatcatttcagcagcaagcaaagacatttcatcctaacagttactactagacatgagtaactctgtttgactcatattagtttygactgaaaaggggaacatacttgagaaacacatgggcaccattgtaactattcaaacagaatttttattctcaaccaaaatgccacaaagaggacgtcacttaagaccttggttgaggtttgytatatccttcaacttgcagaaatcaaaaatgcagaagttaagacagttgcctcatttgacttgttgattgtgatagcttttgtccatggtgatgtgatgaacataaggacgaggcacaaatccagattgtcctctcttygtggtttgctgcaggtacccagcgtgccaatgcccgggctccagccccttacaagcgggatttcgaagccaaactgaggaacttttacaggaagttagagactaaaggatatggacaaggcccagggaagttaaagtaagtcaaagtgacacaaaccacataatgtatagatggtgaaaggagngggcacagttgggcctctaggaaattgattgtkatttgggatgactagccttcattttagtcggcataattattttggaatttgtaaattataggatcatctaaaacatagtcctggaatgaaacatgattaagcttaacattttaaaacaaatagtgaagacactgccacttttcatgcaaaaataaaggcaaaataaaaggctgatttatttttttcctctgaaaagtatgtctttgttggtgcatagtatattcattagctataaagctatcccaatgtcctccactgcaagtttctgtctcctgaactgacctgagtgtaggaatagtgctcagctctgttcagttctgtgaaacaaacttcacagcagaacatgtcatgaatgttgtttcggcctttcttcatccatctcctcctttcaaatggggaaactgaaacatcatcatgttgtttggcctagaattgtttccattccctacttacccttctttctctcctccctgccttcacccctgtcccacgtccccactggagatcagtctgccactgagagaggacagaggagggacggtctccactggagcacccctgtgaccctgggtgcctgagagacggtccagagaccagaccaacagcagccccatggctcactgccccacctgcaggaaggcttgcttgattaaaatccaccttcattgccctaaaaaatcatcwgcctgcccaaacaccatacttctctgagctttacttttctcacacttaacttacaaaggtctaggatgatccagctgtcatgcattcagcctccctatcatctctctgcccattaccatttacattaagagcaaattgatatctatggaaggatgactttaattggcatcatcacaagtagattaacctgccacactcatcattcatttgtatctgtcccttagggactgtcaagattcacttaatttaacaattaacaattggaaactcctctgctttggaggataytgagaatttttttttttcctctttgttctcacagtcatcttgctgggcacttaataattgaattccttgtctacgtgcattgagacttaaaacawtgcctcatagagttgttcttgctttactaaacaaaatgtatgggcggggggcggtgtgtgtggtgtgtgtggtgttgttttatgatcattttttttctgggataaactgatttgaccatttagataggattctccagttgttttcactggtcataggtagggtactctatttaccaatgattctctcatgtaacttttgctaatgctattaagagttcaagacaaatgtgtactttattgcagacagcaatgatattaagtaacattcttcttacctagttaattgtggcaaatggaaatgttctagaaagataagtaaattatctttaatagtatagtaataatttgtattttctaaattgtctctttatggacaggttaattatccgaagagatcacttactagaagatgcttttaatcagattatgggctactccagaaaagacctgcagagaaataagctatatgtcaccttcgttggggaggaagggtgagtagaacagagaagtggcctgtggaacataggctgtggccacaaggcggatgtttctccacgtcgctgtggttgcctgaaacaggaaatccttctgccaggaagtgctgttctcatacacttaaacctttgggctttttttttttttaaaggtctcctctggcttttaaatcacttgacatagaaatcctttagtaaaaacttgtagctttagatcatttttgagaacagaagcctagtttagtttcttctctccggacctctctttctcttaaagggaaaaagtaaggctttacaaggaaaaaaaacaaggaattgcatttatgcaattcctttgtgatctgtgatcttattttctaccctgcagggctaggtagaacgtgcttcctctattaaataagttcagtttcagaaacatgaattagaatcttgctgttctacccagaagcctccacagaagtaactcttgggccttggctcttatttctctgcctccagtttttctcttcccttgggaaggcagcacacctaccaacattactacctaacataaacaaacatgtcccgccttccatgactcttccatgagtgtgctcgtyaagataagggttaggaaatgaagcggggaagactcctacacagtgtctgttgtgcccaaatagacataactgttattacacatcacattagaagaggccagctgtcatccctcccagaccccttcttcctcatttcaggtctgggttcaagtctcaacatcttcttcataactcagcagctgctagagggaatttttctaataccatacaattgtctgrttgtgttctctgtggctcttgttgatttggatcattttaaggctatccctctcagtcatgcctgggaataaagtatattagattatggaatcatattagtgatattgaacaaattcagccattcagtacacagtggatgaaataatgactccaaactataaaataatttgcatctgctgatggaastagggaatagaaaaatcaggattcaaattcaggccgtttgtctttcatctggtactcttggactagctctgggacctaagcaaaactcctgcactccagcccatctgaattttttcctatctctggacattttgcccattccagctaatgactgataacttccgctcttgtcacatgcagtgctgtgtagtctcccagctattcctacattaaggtaaagtartatgtgcaaacacactatgacatgacaaaatttgtacagaagtttgcatgagacctgagcctttcattgctgatgtgcataagtggacttctcacttgtgttagttggcttaaagatgaaggtgcacagttgaaaatgaaggcaaatgttagcctaatcaccagtatgcatgagattccaagtatttccttacataatcagtctggtttggatgagaatacttttcctcccccagaactccagctgcctcccttcattgttggaccagagtttgttgagatctcaaagatatagggaagagtctttggaagcactgatatttaagtttgaatagaacagacgtttatcatgactggttttcctaaagcagtctcctcatggtgtggattaatgacattagttcctaggaggaggtccagggtgagtggggcttgatgcctctgtatttgattacattacattgatgtccaaatgcttcctgcctccatcatctgtctccttcctgtgacatcggagggaaaacaagggagaggatgttctaagctgtgagctcagttagcagggacaatttcttaatctgttcactctgcatatggtttattgaagctggatttctggactcatgactttgtcaggtcagtatcataaattattagatatagactttaatttrctattgaggtaccgaggatacatatgctgtttttgagagatgaaaacagtaattgtgctggaaaaatagaaagctaaaaaaawkaaagaaagaaagaaagaarccttgagctacataaaagtaaggagctcttttagcctttgccaccttctcaaacacactgactctatcacatgaaaatgaacaaccctaactttttttctggattataatacatacccaaagggaagagcgacccaaattttccattgaactataaaaatggagctggaggttttctgtttttttgttttgttttgttttgttttttgagacagagtctaactctgctgcccaggctggagtgcagtggcatgatcttggctcactgcagcctccgcctcctgggttcaagtgattctcctgcctcagcctcctgagtagctggaactacaggcacatgccaccacgcccagctaatttgttttgtatggaggttttctgttactttctctttaccaattctaatcccctcaaaatgtatcattttgtaagttcttcatgtctgggtctagtaatgagcatttaaaaacacatgtatctggcacccagatctaagaatcaaggtttttagagaaatggctgattctaacactaagcaggaaatatacaagatgcagcccgaagcatcttttggtgtctgccagagattaaagaaatcctcaaaaatcccagtcatggggtatgttgaaaaaacccaggagccaactgaaagagttcccaatggacaaagctgagataatttgagcaacaaaataaatacaaggctattgattataaaccaaagtataaaataaataaccatactgatataaatacatggttgaatacataaataaatggggaagaatagaaaagtagaaaaatatcttttgcaaaatatggaaccagcccaaaagtccatcaatcaatgagtggatagagccaacatggtatatatatacaccatggaatactactcaaccataaaaaggaacgaaataatgacattcacagcaacctggatggaattggagaccattattctaagtgaagtaactcaagaatggaaaaccaaatatcttacattctcactcatatgtaggagctaagctatgaggacacaaaagcataagaatgatacattgaacttttgggacttgggggaaagagttgggggtggcaagggataaaagactacacattggatacagtgtacactgctcaggtgatggtgcaccaaaatctcagaaatcaccactaaagaacttactcrtataaccaaacaccacctgttccccamaaatctattgaaataaacaagaataacaatttaaaaaaaaagaatcactgctctcaaggtagatatcaatttgtttaaggcaaacagtagaaaatatgcccttcagaaactgctgtaggtctggggtaggcacatgatgtaatttggcccaattagactgaaagaaactctgttatgttgtagytggtgaaaggtktcactaaaaaagaaaaaatctattttgcagaatatttccatacaatcagcataactctctactctaggtatggaatgtgcatagtgactttattccaaatagtatagtatggaaagagggggaacaaagtaacttcacagtagagaaacctgacaaacactatggcagtcaggtgatcaaggtcaacatcaatagccacaagtcatgttgataatatgtaccctcggtatgatgcgtgagggtggcactttacctctgtggtcttcctcccgaacacataatgctmgtccaaccatgagaaaaatgttagacaaaatcccaactgagagacattgtacaagataccttaccagtactctttaatactcccaaggtcatcaaagaccagaggagcctgagaaactgtcatagccaagagggagacatgacaattaaatgtaatgtggtttcctgtatgggatcatggaacagataagggacattaggtagaaactagggaaatgtagataaagtatggattttagctaataatagtgtatcaatattggtttattaattataacaaatrtattatactaatgtaagatgttaatctgtgtgtgaggtgtacaagaactctctgttttatccttgcaatctttctgtaagttaaaacctattctaaaacaaaacatttattaaaagaaaatatgcagtcaggattcggggagatttaggaaatgtttccctggacaatttgtttccttgttatctgataaatgacagcccccagggtaaattttggtatgtatatgcctctgtctgcacttgaggtcattagagtaataagtgtatatatggggttaattctgtgggaagtccaaattagtagtggcattggtatatataaagtattattttgtgttgcttatgtcaactgtgttgtctatgagggactaatactttgcaattcatattgatatcatttcagtgattatattttacctgtcaccatcaaagtctttatttacagtagattagctaaagcataaagaaaagggagtttattttaaagaataacgcatcggccgggcacagtggctcatgcctgtaatgccagcaccttgggaggccaaggcgagcagatcacaggtcagaagatcgagaccatcctggctagcacggtgaaaccccatctctactaaaaatacaaaaaaaattagccaggcatggtggcgggtgcctgtagtccccagctactcgggaggctgaggcaggagaatggcgtgaacccaggaggcggagcttgcagtgagccgagatcacgccactgcactccagccagggcgacagagcgagactccatctcaaaaaaaaaaaaaaaaaaaaaaaaagaataatgcatctacctgtgctccaaaaaaggtgtgaatgagcagagagatttcagctccactttctttatttgcatacatctgaaacatgatatataaattgttcctaaaatagaatagttgagtcaagagaaatgatgggaaaatttatagtcagaaatttacaggatggctgcaaattccatgcaaggtagaattagccccacaatactagagatgtatgtattcaatttagaaatacaaaaataaggccaggcgtggtggctcacacctgtaatcccagcactttgggaggctgaggcaggcagatcacgaggtcaggagattgagaccatcctggctaactcatggtgaaaccccgtctctaataaaaatacaaaaaaattagctgggcatggtggtgagtgcctgtactcccagcttctagggtggctgaggcaggagaattgcttgaacctgggaggcagagcttgcagtgagctgagatcacaccactgcactccagcctgggcgacagagcgagactcggtctaaaaaaaaaaaaaaaaatacaaaaataatcctagagtctataaatacaaatactttagttgattagttcatcaccaactaagatcacattttatattatgctttggctttttacaaaaagtaggtagtttctaagccctatcttgtaactagtgatttaatttggttagagctggaggttttgctttagtcatgaaaatttccacacaacttaatctggttatctgcctttgcaaagttgtggggaagggagatcggcagtggtggagtggctgaaaactgagtcatcttgactgaatgtggcgtgaaattgcacgcaggggttgcctatttctgctgggcatcagtctactaagaagttgcttctctagggttgaggtcaatgaaatactacatattctccagtgaattattctacgtattttccagctctattattatactgcacattctccagtgtattattttcttttgaattaaaagtcctagcaactaaagttatatgatttaaaaagttacctagatgctaggcatggtggctcatacctataatcccagcactttgggaggccaaggtgggagtattgcttcaggcgaggagttccaaactagattgggcaacatagtgagaccccatttctataaaaaataaataaataaataattagctggttgtgatggcttgtgtctgtagtcctagatacttgggaggctgaggcaggaggatcgcttgagtccaggagctcaaggttacagtgagctacgattgtgccactgtactccagcctgggtgacagagcaaaaccctgtcaccctgtctctttaaaaaaaaaaaaaaactggattagactgttgtgttctgataaggcgtggggccactaatttcttaatacccaaaacattaaagaaatagtggcctgcgtaaagagaggaggtttacactgtgattgccctgcctctttttctccatggccaaccctgtaaaaggcacctttcttaagaaagaatgagtttattatgtgtgaggtgccatcaatatgacatcaatcatgtcttgcagagccacactttgactggggtggagatgtgtacaagcagttttagtttgggagtttaagaacttcctgtaatatcttccttttgagctttctgtaactcccctgagacaggcaaatgaaagcaactagggaggatgagatctgaaggagttttcttcagtctctgcttataaagtaaccaaccagttcttacatatgactggtcagatcctcactagaagctgtttgaggccctgagcttggtcattaatttctcagaaatctgtgaagcttcaaggtacactttatggtgttccctttttttcttccaaaaagagacattcacaggataacctaaattacccaaacctttctaaagaagggtgcttctgtatctaggctttggtttggtagcacctggtaagactttgtttatcatatcaaaataccttactcacctaccaggctttcttaattggctcaagaactaacaccttgctgctataaatatctgagggtgaatcagaaggtgtgtaggccatgtgtgcctgaaccaacttgtaggaaatggtgtgacttcccaaggccatcatcttctttcattttatagtctgctttcattagaatacttagttttcagtaattcttagttgaaaataaagaatgggagaataaaatttgttattttaacaaattttgggtgccactgacaacttgggtggagtgccaacccagccatgtgatgatatttaaaatgctctatcagcacttggggctccagrctacatggccaccctggagacatctgtgcttattcggaaatgccctcagatgcagctgttgtgcggctacacayccgtcgtccagagtttttatatttccgtgccaagcctttagctgtggaaccaacctaactggcaaaacaggaatgtaacagacaatccctgtgatatgagtcatattaactatttatatgaaagaagttgctaagacattacaggaagcaaaggcatgatgtacccygctgtgacatgttttactgagttagctaggcttatttataaattgtaatctacaacctgctctcagataggcagttctaagctttggattataatcaaatcaaagtttaagactattttggctttagaggkgactccatcagtgcttctagagttaaaagtcagcagataaaaacttgaccagttgaagacacattttctcctagaggaactaactgttagctctgtttttgcttgggaaaacaagacttttcattttcagtttaattcctcagggaacattcatctcatcttcagccagattcagctatcatcataaaaagggaactaatcagtgaggtcagtctttgttgttttagcaaactttaccacctgagaagatattacatgttaaactttctaagcataatttacttgatgatttctgacaatgttttcaaattgagcaacctttcagggattggtataacctgttcatgtcattgaatcaatataccactcaaaggcaaatgtgcaaatctgctagataccaaataacaatgtaagcaatgttgatttttctttagaaagcatcaaagagctccactcattgattcaacaatatatattgagcccccactgtgtatcaggctaggtacagatataaaaatgagtaaaacatggtccctgccccagtgtagttacagactagtatgtatgtataggggaggcaggcacatagacagataattgtaatgcactctataagtgcagtattattaaaatactcagaggtaaagcttaaagaaaccctgatacttctaactgaatgccacagtttaattttaagcaggcaaaatcccattttacttttaccagttgtctgtaagaaaactgactcctgaagtatttgcctcatgtttcagctgtctctgaccttatccattgtatgctctattgtgtctgaaagcctcacagagaatgaccatggctgacgggtgctcactctgtgcctcacacttagtattctacccactccttgaggttgcgtacaccctaggatattgtaagctagattttttttttatttgatacaaagtctctctcactgtcacccaggctggagtgcagtggcgcgatctctgctcactgcaagctctgcctcctgggttcacgccattctcctgcctcagcctcccaagtagctgggactacaggcgcccaccaccacattctgctaattttttgtatttttagtagagacggggtttcaccatgttagccaggatggtctcgatgtcctgaccttgtgatccgtctgcctcagcctcccaaagtgctgggattacaggcgtgagccactgcccccgcccataagctagatattttaacaagtagtattttcctcctattttctttcttttgtaacagaggttagcaaaattttcctgtaaagggctaggtggtaaatatttgggatttcaccagtcaaacctctatggcacctactcaactctgcccttgtagcaggaaagcggacaacatcaatacataaatgggcacagctgtgttccagtaacactttatttacaaaccagagggtggggcagattggacctgcaggtttgccaaccgctactctattagcagtatttttttagtcttgatgaacatttaaaattggctgaagggtaggctgtaagaagtaacaagcattaaacttggggtcagggcacctgcctgaagaccccaaggcctgctggttcttccatttgcagttttcatgtgatacaagtcagtgatctctttcggccttagtcgtctctataaaatgatggcattggacaaaatgacttctaagatgactttgaccacgggcatgctctgtttctaaaagacacaggggactaagyctcaaaaagtgaaattttaatcgggaaaagtatggtctagtgttaaggccttttttttttttttttttttttttttgagacggagtcctgctctgtcgccaggctggagtgcagaggcgccatctgcaacctctgactccctggttcaagtgattctcctgcctcagcctctcgagtagctgggattacaggcatgcgccaccacacccagctaattttttgtatttttagtagagacggggtttcaccatgttggccaggatggtctcaatctcctgacctcgtgatccrcctgcctcagcttcccaaagtgctgggattacaggcgtgagccatggcacccagccatattaaggcttttaaaagatgcagctacatgcagacaggatgggggagtcctgggttaaagcagtttagatgaaaggtttcgggctttagctgatgactagcactttrtaagtcaacaaagtaaagtggttgctccaaaggcaggataagtttaacctgcatcgccggagaaaagtgtcgaggagtttctaagctctgtgctgagaagacctcacctggagtgttacgatcaagtctttaatgccaccagggtagagaaggaattctcacccctgccctgagagaaggttgaaggaagtggccatgctcaggagtgggaaagggagagaaggaggctgggaccaggagatggaaactgctaaacctaaagttccaatggaaaatgactttgaaaacgttttatatcttcaggatctagattagcaccccatatgtaatcagcacacagacttttgttgaaagaaagcttctgagtatgtaaagaacgttcaagtggaagaaatattctatttgttcctggcggcgtcacaggccagaagtaggtcagcgggaggaagccgcaaaggctgccttcgtcacagcataaggagggacaggtagtctgtgcatccctgcatggaggaggcagccagggtactgctttgggagtcctcagagtaacctgagggtagtcccaccgatcctgggagccacctgttagcatgttatattcagctgccccagagggcaggtccattgtgtcacctacagcctctttggctctgggagtctgctgtttgcatttttctttacatataggttccctgtcagcacagtatgggtgtgaggatttttaataccactggtgatgtgttaaatgattttagctactacaaagactgacttttttattttaatattcatgtattcattttaaggtacattgggaaacaatagagctagcacatcaaaactttataaagattgtgtaagacaaagttctattaaaaagcaaatagatttaaagttgatttaatgaaaaatattaataatggtacatatatattcagatataacaaaaattgggaaagtagtatgaataattgaagtctgttctgtgtaaaccatttttatttatcttctgcctataggatcctttttgttgctgctgttctttctccatcacctgggctggagtgcagtggcgtgatcatagctcacgcagcctcaaactcttgggctcaagagatgctcctgcctcagcctcccaagtagctgggactactggcacatgccaccacacctggctaattttttcttattttttgtagagacgggggtctcactgtgtcactctctcaaactccttgcccaggcttatctcaaactccttgactcaatggatcttcccgccttggcttcccaaagtgctgggattacaggcatgagccaacatgccctgcctaggatctgttttttcctccttcacacaatcctatcactgaacaagactcagatttttttttcattaaaaaaatgcaatgatgcccacaaaaaaaaaattcaaaaagaagaaaaaataagatagagggagaaaagaggaagaaggagaagaaaagtctttcacaatccctcctccaccccagcttctcagttgccttcattcccttttcagcattccttccctatctttgagcccacgtgtatactttttatcatagggtcgatgtactttatatttttcattttaaatttagcacatcacattgctttactgcaaactcctccttactttgcattttttactctcgtcatttttggccacttgtcattcctcagacctaacacaatcttttcttacacttcagtttgaccctgacatctttgtaagtaaagtagaatttatactgtagctcaggtgttagagtttcagcctctttctccaaatgccttccttaggaagctttaggcaccctcatttttcttgtctgtaattttcctttgtgttttatcatttaaaacatttgcaccttatcactccattttttgctactgagctccctaatgggacttgtatctgtaatgtcttaatcttgaattcatggaagtatctttcttctcccatttaaaaatatttcagatatccatgaggactccatgtcctgtgagcatatgtaactgattccccctggttttaccctgtttaaataaagctttctcgttgtgctccctttttgtataagcttgctcctgacattcgaaagatttacctctttatacatgtttacataatcaaaatattagcatattgcctattgtatgtattagaatgttgcctattgtatgcctgttgtatgatgtgtggcttagttttaggtatgctccacataaatgtccattttactaatctgggtcaagacacaatgagatcagaaactatgatcattcagtttgttttggayagctctggcatgtggacaattagatttgtaatgagcatcctatggaaacttgagctctggagaaaaactgcccaatatctagaaaaaaagtaacagatkattctttttgtgsatttttgttacaggctggattacagtgggccttctagagagtttttcttcctggtatccagagaactctttaacccatattatggcttatttgaatattcagccaatgacacatacacagtacaaataagtcctatgtctgcttttgtagacaatcaccatgaatggtaagtattttttccccaacacttttcttcaggcgatttyctatgatattagttttttyatagaacccacatttaaacattaaaacattttttcccttgggcaaagtcatattttcagttaaatacctcatttgactcttgtttttattgtcaaatttaaatatataggcagtctccaagctaggactagatctgttgatagctgggaattgatctgctccataagatcaatttaagtgagttgggtagaattcaaaaggtatttcccattgcaagaaagagatgatgcgttcctggtgagatccctatattcctctctgtacctttgggtgcctatgagctctaagctgaggtggggatgaggaggggaagggcctgacccagagatcagacagcttctagagcagcccttggggcagtggctgccatgggaggaggagacagggcagctggaactctggctggggctctgactctcaactctggtaatgatggtgctctagtgggcagtggggctggtgtagtgacctggggcattgatggtagaagggcaggagtggggagtcacaagcagtggccacttaccgtattagccatttgaagtttgtaaccaggtgttgcctccctctttcctaatttctcacacaaaatcaaggaaactgatttaggattcccatctgaagattatttatgctgaaaatcccaaattgcactctttccaaatgtccttacatcttttttaaatctctgcatttatacacttcaaatatttgtataaccctgtttgcttgttcctgttcattttccctgacagcaacaaaggaaagaatatgagcaggattcatggaaaaagcttatttgaatcatgagattaatattggtgggtggagggcgttatcttttaggacttactcttcaaattaacttctgtttagctgcaatttgaagtccttcttctgtgactattacagttgtgctaaataaatggaaataaagaggaaccatactgctgaacattgttcttaaaatggctgcccaatactaaaattacaaacttactgtacgaatctcagtatggatttatacttttggaaggcatcagactttcaaagagctagaaacttgaatccttttgaaagagaaagtaagtttacatctcaggcagcaaatccagtcataacaaatatatttaataaaatttccaaagtgattcagaatagaattgagccttgaaattttagagaacagaatgtcccagaaggaaactcccccaaatgtccatgtgcacaattcttgaatggtgaaaatatcaggaatgggtcttgagagagaatagggataggaactttcttgatctgagactgggcctttcctcagaaaggaattgctactgagtttgtattagagaaattctgctaatattcatgcatacacactaggagggaatagcattttccccacctccagaggtctcatctgtcaacatctcttagaagtggtttggggaaatgtcactgaaatgctcacaggggattcatgaatgtggggtgctacattgttgatatgcagtgaaggtggagcagggtctctaaatatgagtgaaactgattcttcaacaagtaggtatgaattactggctgttttagcccattcttgcattgctataaagaaatacctgcgactggtaatttataaagaaaagaggtttaattggctcatgattctgcaggctgtacaggaagcatagcacccaaatcactgggctttggggatggtctcagggagctttttcaatcayggtggaaggcaaaggggaagcaggcacatcatatgacaaaagcaggagggagagagagagagagtgtgtgtgtgtgttggagggaggtgccacacttttatatgaccagatttcatgagaactcactatcatgaagatagcaccaagccataagggatcagcctccatgatccaaacacctcccaccaggccccacccccagcaatggggattgcaattcaacatgacatttgggcagggacaagtatacaaactgtaccactggcctgatgaagacacagcccatggtgcctacaaattctcactacctagtaggcaattaatattggaaaaatttagatggttagcgctggaaggcattctagaaagcatatggaaccacctagaaactgctccatgacatgtaagccatctcatgtgtttccttcacaggttccgattcagtggtaggatccttggtcttgcactaatacaccagtatttgttggatgccttcttcacacggcccttttataaggctcttctcagaatgtaagaatatttttattgcctgcataattagcatgtaaaatgcagtatttacttttttgaaaaaattcttctgtcaaagtcattgtttatctgttcacaatctcaaatttgttgttattaaacctaatagtggtttagatttctgaaactaatgcaatttcaaatatgattactgtgtttttcctgcctctgacctatttagcccccagatttttagttttgctctaccccccaaaatttattctcatttgttgcagcatgtgtttctttaaaacaattgtacttcaaacacagccctgggattcctgtggtattaatgcagattattaatagaattgttgtgggttagtcttagtgactcacagcccccctctcctttatgagacacattttatatttggcttgatgcatattttcaaatgcttactcctcgttcaaatcttcattttcctttgttttggttttgttttttatttgtttgtcaagggtggacagtgccatatgtttcttaaactttctctatgcccttagtaatttattatggaaaatgaaaattcagcattcacagaactttttcttcattgttaatgaaagattgcagttattgtaaaatgtagggctaattgtttctgtcctataatcagcagccatttacaaggctgaacagaagacaactgtctgtgggatagtagctcaaatttgcgatgagaatgcactgaattatcacttggctctgtccagctcataccctaactgaggccacgcacttgcttactgtaaaatggaagcctagacctcaaatgaaagcaaacaaaatgcttcttgtgggcccttgggagggtcagtagaaagacttttgccttcttctctttcagtgtcttcacagctgtagcactggggaacaggtgccgttttctgtctctttggttctttgtggcccactttgcatcttcccatttcattgccttatctcttatcttctcatttaagcttcctgaaaaactagtctatactgactgtctacacttacctcaaattcacaccctaagcacacttcagcctggtttctttcccaccagaaaacctgtggaggcatttaaagaatactgattagtccgtatcttattggatcatgctgctgcttctgacactgtgcaccacccacacccgccaccatttattcctgtgtctttccttcagagctggcatctatgacactgtactttgcgggttcttttttttaacttttctgtcccttcatgagtccctcttctgatttgcccttaagtcttggtgtacctgaagcttctatcaccaggcccctcgttttctcactcagtgtgctctcatgggggaatttcttctcctgtcttatctcctctgactcccaaatctgtactctcagtcatgatctcccttaaggtgtagcctcacatggtcaacagtccaccaaatatctycactcggatgtcttacaaggatctcagaatcaacatggttaagactaagctcatcaagtttccctacstaaaagtataccttctcccatatgcccagttacagttaatagtgccactattctcaggccactctggtcagaaattgggagtcacccttaaacagcgatgacaaatacacacggtacatgttctactcttccccatctctactctaccccatcattcccagggtagagttcacaaatcacctgtggtactttttcccactgaactcactgtggcctcagaaatctttttaacttatagtgctcaagcccagcaattaattacagttagttttgacatgagttcgtttgtcacccctgttttagatatccttctttatactcccccaataaaaccatttcctgattgctacatgtttgcctcctaaatgattttcaaattcatcttcttctctccaaccttaatagcacagccctagttagagcccttatcttattttggccatattactgtagtggtctattcattggtctctaccctctaatgataaccacccctcatcccaccccattttaaataatccttcacactgggacttccagaggagctgtttataattcacatttcacgtctgatcatgtcatgccctgtcttaaaatcttttggtagttctgaatcaccaatctccttaggatgatattaaggcctgctcccttgctggcctcattctctagaaattctgtcttaaggttaactctctcaaactgctgatatgcttggagtttcctgtacacttccatgccttgtattttgttcatgttattctctctttctcctttctctttccccttctcctccttcatgtattcctttttacgtctcttgcttttaaacatcctgaaagatttaatgtaggcatcatcttctgcaaaaagcttttcctgaatctctcagtcaaagaaaaggcccctcatgtgtgctctgacacctaaatccctatccctaccttatcttttcttaaattgaagtgtgacatagattttaaaagtacatgaattttaagtgttaccaatcttatgttatcacttatcgctttatattaacttatctgtttgtgtacttggctccccaactagcccattagctcctgggggtagtgactattcatcaagtagctattcagatgtctggtacatgcttgatgcctaatgaatgttcagattgaactgaaaaaaaatgacccttaaaattgggttaaggggagtgaaatttcaaaacagctatagcaaatcaatgactaccactgtacaactgggccatggaacagtaacttacctcatgtcgattctttctctacaattaaaaaaagtgggggaaaaatacagattgacggcaggttctgtggcttactattttcagaataagaaccatgaagaaaaagggaatgtatgtgaagatgaatcatgtctttaataaaaaataaaataaaataaatattaaaataaaaatcatgtctttcaattaaaaaaagttaaaatatagaaatatataaataatttcaaattaagataacagtattttaaggtagtataatatggccagaaagaataatggatccaagttgtcaacccgagtgccagttcctgatctggcattgatgatggatgactgcgcagatggcactcattctttgcacctccagttctgtgtctataaaggaagacgcaggctgaatgattcctgtggcatattatatatttaggactttctaattttataacaaatttctgaattatttcactggtttggtttaattactggacttggactaagaacattccagaaatcactgcctatgtagtggctcntattcttctctttaattcttagtttctttccttatgactctgggtttttgctaatagccatgcctacatatttgtttctgtctgtttgtcatcttagtctrtgtgacctgagtgacctagaataccttgatgaagagttccatcagagcctgcagtggatgaaagacaatgatatccatgacatcctagacctcacgttcactgtgaacgaagaagtatttgggcaggtgtgtgtatctgcacacctggygcctaagtgtggtaactgaaggctattgatgagtgaagaattaactccatggctaagatcagatgcttatttattcgtggtttattgggtgatttaaactcaggatcacacacagttataataaccgcagttataaagattagaattaatgtcagctgcagattaagatgctgtaaattacagatggtgataactgtttatgttgtaagcaatcttctttttatttccaactaaaatatcccccaaaatatgagaatttaccttatatagaatgcagttttttaaagtccacactacagaattttttaattggcatttatagaatggtggctgggcacggtggctcatgcctgtaatcccagcactttgggaggccaaggcaggaggatcagttgagcctagaagttcaggaccagcctaggcaacatggtgaaaccctatctctacaaaaaatacaaaaattagccaggtgtggtggcacatacctgtagtcccagctactcaggaggccaaggtgggagggtcacctgagctggagaggttgaggctgcagtgagcctggatcatgccactgcactctagcctgggggacgagagtgagaccctgtctcaaaaaagaaaagaaaaataaagagaaccaaaattgatttttttgaagctaagggaacataaacaatgttttggggaagacttaagaacagaatatattaatttttttttcaaaattggtggaagagtagggaaaacgtttcttccagaaattatataccagtttataattaatattcttatttaggcattaatctttagctgcttttctgcattccatgtgttttgaaaaagttctcaatttaacattcacttgagtgtaattctgctttaaagtaaatctttacgctagatatagtcaattctgagaaatttgtgaaaatgggttttgtcaaacattcaaatagtagcaggctagtatctgaagccgattcatcggcattttaaaacttaacctgtagtaacagcaatacatatatatactttaatcaccaaagctttcaagcaccccctcaatgcctattttttcctgagtgtgtrtgctccgtgagtgcctggggcctcactgccagcttgtgggatgtgcctagggcagggctgggacaggtagctggctgatttcagctcaatgctagtaatgttgttataacattaagagtattgctttrtagtcattctttttattttgtaatctcagataactgaacgagaattaaagccagggggtgccaatatcccagttacagagaagaacaagaaggagtacatcgagaggatggtgaagtggaggattgagaggggtgttgtacagcaaacagagagcttagtgcgtggcttctatgaggtaaagacaatcagcagtaggaggagtttgcagtctgatatcaatgatgccacagtccatcttattgtactttacatgtgtagactatttctgctgtatttactgttgctctttccatgcgaaaagttcagtattttttcccttatgtttcaagagcaccaaaagaagcttaactcactgttacgagagatcactgaaataaatgttatggactgcattcaagtagcatttgttgatttaatgaccactagtaacatttaagccatgcatcttatgcttagatatgggtaatcaaatctcatgcttgctatgtgaaataattatatctgagatcagaatragttggcatgtattgtatgtgactttttctgtagaaacactagatagtttcctaaaggtggacgggacctagattaatcagcaatcaattataaaacaaaaattctgtcaaggcaaatctcatcaaccttatactaaagaatgccttatatttgtagggagctttacaggttttcaagtgccaacacaaggtacacrcatattattcctgaaactccatgtgtccccttttctaaggcttaattatagctgatatttctccaggctcctaagccatgccttgtactctttttattccacaggtggtggatgccaggctggtatctgtttttgatgcaagagaactggaattggtcatcgcaggcacagctgaaatagacctaagtgattggagaaacaacacagaatatagaggaggtgaaatttgatttatagatggctagattttaaatttcaaattaaaggaaggcatggttcagcttgccaactgaatataggacaggcaacrgcacttggactctaatcataggtctgatgcaggctcccttgagaccttgggcaaggtacattctcttcttktcctanttacctcrtctgtcagatgggagaaggactgtttacacaccgtcaaagratgtcataactcttaattgttggtgaggaaatgtgaccgtaagaacactaattaattactttatcgtgttgtcagtgaagcaccaaggagctaacatccagctggtcaaactccacctattccattttgtttctaaaacttagaaaagcacaccctttgagcttcccaatcagcacagtttttccactgttcactacgctccttatcagttgtaattcatagtcagaacacttgaatggaataagacacagttcccaaaatacaacattattggagaagttctaaattcaagcatgaatttcaagtgaaaagaagactgtagtaagattaattaaaaactgcactatctgacacttcacaaaatgggaagctaaaaaagtgacacttctgcagatcagtacaaattattgattagtaactgggaccaaagccattgaaatttgagtgttaaaccaayactttgcaagggacctggtggtaacccagagttaaggttttattaaataattttaagcaaagaatacattttctgaaaattatcaccatgttaggaagccttcagaaattcatgacaaataccagttgttttctcctttgggttttgttttttaactcaaagtataagagattagaagtagttctgaacttggagaatgaaaactacaaacctaacatcactgaattaatcacttagcagagtaaattgagagctgaacagttctctagttatctctaagttgaagcagagattttttttaaaaaaggtagttttaaaagtttgtagtaaaaaaatgccttaacatttgctaaattgcttttggttatgcctgtgcttgcctgttccagctcatccctgcaccatgggctggccttgctcacacatttaatctgaaaggctgtatttaattgcagtttccattgcttctatttctgaagtccaattgctgaaataagtattttccagttggcccaagtataatccatgtatctctttggttattataatgttgttaacccatcratttttactgagagcacaatttctctgacatgctacataagttatattttaccataaatattattagctcattctttccttccaggagatgaattttttttttcagacagagggtgtatgccaccatacctggctaatttttgtatttttagtagagatggggtttcaccatgttggccagtctggtctcgaattcctggcctcaagcgatctcctgccttggcctcccaaagtgctgggattacatgtgtaagccaccacgcccggacccaggagattctaatagcaatgcattaatagaatcagccatttttgtattttcatggcataaaattttattcactaaatctgactaatcaaggacctatttatatggttattgtaaatcttatcaaatgaaatctttgggagggggaagaaaaatgctgagaacctcagctgccatgtttgctcacccagctacttggcactgagtaaagaagcggctgtgtggctgccacctgccatatgttcacaccccagctgctaggagagaatatgatgagacacattcactcttcttcctccaaaaggtttggcacaaatagcaaaagggaagcagaaaagggctaattcataaggtcaaaaaactttaaagctacaaagagccagtgcacttcttttgtagatgagaaactttgctcagtaccaaattgctagtcttcaccaaactctgggcatggcccatgtgtcctcatgttcaatccagttttgatcagccttctctttgatcctttttttctccaaaggggactaaacatcactgaaatggtaaacagtaaggtgagattcctcccaaatcctacaactactgaaatgtgaggaaaaatttggattaaaataatttctacccgccttctattctggactactaactcagtgcccattaactatgtctattcattggtttgaatcactaaatccttgttagccttttctctgaatttaatttttgttttcactgaaaggtttttggaatccatcatcactgcccatgaggtgattcctttgacattttcttaaattctactaaagtatggaataagagtaaaattaagttggtgattactcaggatttatttaaggaactaaaggtcacttttccctttttattagtaagtcaatgtgaaactaagttgattttaaagtatgaatattatatatagcttttaagagagcttgcagttatgtatttgtttgtataaattatttgattaatgtgtctcccctctgccagaagccctgggagggtctgttttctttgccattatgcccccaaccttggtacagtgcttggcatagaggtatttgaaaattatttcttatgtgaatgaccgaaagagttaagtatttccagtaacaactgttgtattttacagaaatgatatggttaaaataactcatttgttgttcttctctttactagtttcacttagtgaccgttaaatgaaaacagagacctcttggtttcacttaatgttgtttttgtttaacttttgacattcatatgatcatatatacagtgttattccttagtcttaaaattatagacaacttgtaaagaattcaagaggatgatttatgtctggggactcttcgtgtcacgtatcttggtggcttaatatagaagagtcaaagtaacntgggcttttatgattggtttgataggataccatgacaatcatattgtaattcggtggttctgggctgcagtggaaagattcaacaatgaacaacgactaaggttgttacaggtgagatgccattatttaatcttttaaatgtatcaatatgattattgttggaagtgtatgtttttaataactgctaactattctccataaacacataccatgtgtatctggaaatatgagatacaccatttccagactcctgattgcatggttatgtgactccatggctattcagaacttccctaagccaanttaaagcatttcatgagagtttagggaagtgtcaagtccagtccaagaatcccagtaacaacatctgccttcaggacagcttggacccttcagcaagaagsacccagggtacccaaagtgcaggccggcatccctagcagcagaaagaaatgattttaagttctttaaaaagggatgcagttagttgacagtcctttcttctctttcatctaactttccacaaatttgagaaaacagtgacattcaagaacagtgggaaaactaacttgtgttttttttttttttgcgtgtggtgtttatggtcatccaggacaattactgatcrgttgcagctatagaaataccagacacaaggaagtctctggatgctcaggcagagccttacaagtactcttagctcctttggatcttagctcctttggattaagggtctgggcctcaaaattgcaggcccagacattctcttttttaaattcacccgacattgatcaaggactgatgctaagttgactcgggttaattgatcccactttattcatctatagtgggaaatgtgcccggtttaagcttctgagctggtcagctgcatcaggtgctttattttctacaaaccctccacatcccctttccctttatcatgcacagtattctctttcttagtattatcttctggctctgtgtcagaattgtgttgtgattattccacacctgtgaagttttgtcttcagaactttcctgcctgytcttcctcaggagctctgcccgtgaatgacgtgatgcctttcctggctgttggtctctggcttcaccttctccttctgttttcttgggttgacagtttgttacaggcacatccagcattccctatgaaggatttgcttcactccgagggagtaacggcccaagaagattctgtgtggagaaatgggggaaaatcactgctcttcccaggtaaaatataaaataacatttctttactgtcacarcatttggtggagacattcatttatgtatatattgattaattactgcttttatattaaaagtttgggagagcggaaaagctcttagaatgaatttctccctgataacctttctaaacgaagaggaaaaaagatctctctggtcacacttaaaatacatacatccatatcttaaaatacaaaacacaacaaaagcaaagtatttgttagcatcagtaaagcgacrttggttatcatgcttgtggcttatgattgtggctctaatcaggtgtttccagaagcttgagttttaactttataactatttagaatcccttcagtaaaaattaccgttgtagtttctaaaggatattagataatgtggatgtgctctagatctctttagcctgtctcgtacatgtcttaattccatgctctctgcattgtattctcattcatagtaagattacatatttccttagaatagaaaaaaaatgctttgctgttgctgctaataaaagcaaaagactgatccttttgcaatttgtcagtgtgataattgggtgttcatgcacatatgtgagatgtgccaccctcaagccttattacaacgtccacacattacccatctgatatggaaaatagaagcaaggactagtacaaaaagtgtttgagattgagtggagataactggagctggagcaacagaaaaggagcatatgaacaaaagaggaatggaagaaaatttgttttagaattcctttatccaattagtagtaatactgtagcatttttgaggtaaaaaggagctgaaattkcctctaactttactaataatacaactatactctagagagattaaatgatattaggtaccccaagatgttatcctaaattgaagtatagatgactttgagaaacctattttattmgtgatattaggtgatattattgttaytatataaggtgacattaggtaccccaagatgtcatctgtttctttaagtacaagcaactgagcaatctgttatcaaagctttcttcttagcaattgaaagatgccagttcttaagaactgtattgtcagcatcaacagatgagaaaaagggtgctgaaaatacaaatggagagagcgataaagaatgactgctcaagggtttgcctgagcctycttggccaccccacacgcatcacagtctgaacaggctgtgcatccagacacctaagtattacctggcatatttgatttccaaatctgggaattcattatttgatttcattatttaaagaactagctcattttatttatgcttggataatgagttttctccccttcaacacataaatcaacagatttagcctatctgaataaggctttttactcttctgagaaactctttaagaatttgcattgaagaaggaaagggtagattaatggtcagctttttgttgaaatctatttctgtaaagccactaaagtatatggaataaagtgcaacagtaagcagatatgtccactgttcatatttaatcactgtaattttcaccaaacctgatgggtagagacaagtaatttgatatagacctggagctttagcttcagagagacctaggctgagtcccacctctgttacttacctgcagcagggtcttggtgaagttgcatgatccttctgagcctctgtttcctcatctayctggtggatttgaaattctgaggatgatgtgaaatcattcatgaaaaatacttaatactgtctctggccatgagtaagcatccagtcagtgatcgctgccattgtgatttctgtcaccatcatctgtaatacatatcaggcaggatatttgcatattggaaagagggcaggggtaggagttaaaagacctagcttctagtcccacctctgccaccagctaactctgggaccttagagaacacttcatctttgagccttgattttctcatttgtaacaggcctggaggaggtggtatattaggttgggttgagcaagaagtaacaccgaagggttgctgaagaatcttgagggtcaggctggatttgcatttctgcttccccctggagctccaggaagttcatgtgctaactcattgtaaatggtggtattcttcattattgtagcatacacacagttgggtaacaggcactgtcctttctccctgtcttcactatgacctaagtttgcttctacattcctagttttacccagattataaaacagcacaaataaagatggtcttaggcacattgagcaagcagcctcttttcataccctctccgtaacaagccccatcttttggggtctgatgagaagaaagagttacttggcttttctgcttcagagttgcagtcaccttatgtaacccaggtaacacgcakgagcacagatctaagccctatgacacactagttacatcatcctaagcaaramcctagatccatccctctaaggtaggagtaacaatgttcagagtatttttgacaattgtaagataatgtatatgaaaggcttaggaacactgtgtttactttgttcttttttaactttttatcctgacttttgtaagccactgtactactttaactattaacattggctccacaaagaataaaagtacattcrgagggaaaaaattaaaagaacttaattgcatgacagtatagttatatgagaagcaacttcttcattgacaacattgtcatcacccttaatgaaatgtggggcattacttaggtgtaaaaaaagatctgtaaaattggttctggcctaaagagattcttttatattatcaagtccatttctcctaccatcagaacagatacactgaagccatttttctgctattttttgataggcgttaagttgcacaatggaagagctggtctgtctcaagctagttggccccagtgtatttctttttcctatgagtgaaatgatgtttaacatttaaaatgtgacatggtacaaaaaaataacagatgctggtaaggttgcagagaaaagggaatgcttatacactattggtgggagtataaattagttcaaccattgtggaagacagtgtggcaactcctcaaagatctaaaaacagaaataccattcaacccagcaatctcactactgggtatatacccaagagaatataaatcattcagttataagacayatgcatgtgtatcttcattgcagctctgttcacaatagcaaagacacagaatcaacctaaatgcccatcratggtagactggataaagaaaatatggtacatatataccatggaatactatgcagccataaaaaagaatgagatcatgttctttgyaggaacmtggatggagctggaggccattatccttagcaaactaacacaggaacagaaaaccaaatactacatcttctcacaagcgggagctaaatgatgagaacacaaggacacatagaggggaataacactcactggggcctaatggagggtggagggtcagaggagggaaaggatcaggaaaaataactaatgggtactaggcttaatacctgagtgacaaaataatctgtaaaacaaacccccagtgacacaggtttacctctataacaaacttgcacaagtacccctgaacttaaaattaaaaaaaaaaattacattgcacacatgggagaaaaatggatagatgtccttcttacttaaaaaatgaatcctggctgggcatggtggctcacacctgtaatcccagcactttgggaggccaaggcggacagattgcctgaggtcaggagtttgagaccagcctggctaacatggtgaaaccctgtctctactaaaaatacaaaaattacctgggcgtggtggcatacgcctatartcccagctactcgggaggcaggagaatcgcttgaacccaggaggcagaggttgcagtgagccgagatggcaaygctgcactccagcctgggcgacagagcaagactctgtctcaaaaagaaaaaaaaagaatcctctaagaagtctggcatggtcttgtgtcgggcatgggagtttctgccctggagggttggaggggctgtaaaggatgagggcagtcctggcaaccggagcaatgagggagagaatcttagtctttctagacaaggatgatggagggcctttcaattttcaagcaggcaaatgtgagtctcattcttttctcagatttcctagtctcactttgcggtagcagtggatagcgctgctcacagtatgagtcaaggagtatataaaagtatatatggttgtctctgcagccagtgcaagttgaatccatggctcttttttcctcttgtggttatgaagtgactagagacccagatgataaataaggatgtagacagaagggtgtctccatggagacctacagcctgagcacatgactgcacttcctctgcttcgcggtcggtggttagctctgtattttgcatttctgtggaagacttcatacccctggtgctctgatggactttatgaaaagagagtacattcactttgtggcaattgctctcaaacagtccaaaaaatgcgctgctaagatgccagcctgaaaactgcagagcagtcctgtctcccaccatggtgtgagtttctgtgttcatcccccaggttcttgccaagttgggtgatgggacggaggacctgagagctgcaatcgtcatgggggtgtgttggttattgccaaagggaaaagcgttaatttttgaaaatggctgtgtctggagattattatgaatgaaatgctaactgaaattaagaaataaattgtaagagttaattatgaaatagatgtcttatggagacagttaatctaatggaatagaactttaaaagataaaattattttttaaaaacataacaactttttgtttttaaaattctgctttttggcagagtgcagtggctcacacctgaaatcccagcactttgggagtccaaggcaggcagatcacttgaggtcaggagtttgagaccaccctggccaatatggtgaaacccccatctctacttaaaaaaaaaaaaatacaaaaattagccaggcatggtggtgtgcacctgtaatcccagctactcgggaggctgaggcagaagaatcacttgaacccaggaggtggaggttgcagtgagccaagatcatgccactgcactccagcctgggtgacagagtgagactccatctcaaaagaaaaaaaaatctgctttttattctaatttataaaaagaaaattttacaaaaaattgctaagaaatatatgtatatattaaatatatattaaaatacctacatatgtatcaatccaatgtccacccaatgtccactactagctggkcatggtggtgcatgcttggagtcccaggtacttgggaggctaaggcttgagcatgggagtttgagtcaaacctgagcaacatagagagataccatttctgaaggaaaaaaaagtcaattactaagataagctctgttaacatgttagagtatgtgatttcactcatttcttcaggtacacacagrcacacagacacacacatacacacacacacacattttaaaacaacattccgtttatcacatggaacatctttccatgtcattaaatattgctctgtaatgttatcaataattcagttttccctcctccattatagggagcattgtctactgtcaaagtgaattatcagccagtataccggaaaataaccaagtcctgaaatacaatgtcactttcctcaattaaaagaaaaaccaggctgggcacrgtggctcacgcctgtaatcccagcactttgggaggccaaggtgggcagatcacgaggtcaggagatggagaccatcctggctaacatggtgaaaccccgtctctactaaaaatacaaaaagttggccgggcgtggtggtgggcgcctgtagccccatctactcgggaggcagaggcaggagaatggcgggagcccgggaggcggagcttgcagtgagccgagatcgcaccactgcgctccagcctgggcgacagagccagactccgtctcaaaaaaaaaaaaaaaagaaagaaagaaagaaaaaccatcagaacaagagatgagtactagaaggaccctttggggccatctcctttctatatttgccctgaggtgtccctcgttggtcttcctaattccctaccgcctgctgatgagctgatgtggcttttcgtgtgggagagaattgacaggagattctcatacagtggtctgctctgtagttgaacctcaggtccaagactctcttcaactcctttcccctctgccctctcactcagttctatataactgtattttaaattttcactttattctgccattgaatctgcatgtactaacaaaaacatgccagagttaacccatcacatcaccatattaaagattcttaaatgtcatataccttttggattggtctttactttgggaggtgggtaaatttatcataaaaacagattgtattaaaaaaagggactcttctgtaattaatgtaaaacgtcaagctattgaaagaatttgtgactttaatggaatgagataatcattccacttgcattccatcagcrttgttgctgctgacaacagaggacaggatagtccaagtcaaatctactaaaggtccttgagagctatttcacaagtcagattttaaagtgtctatttgtgagtgacagacattgcaacagttaaagaatgcttacccacttttccttggcctcaagagcaaaaaccagtttgggctcatttctttccaccagcctagtccatgacaccatcccccctcacctggactactgcagtagactgctggctaaatcccctgcttctcctgcatcccaccattcattcattctgcactcaacaaccactgggatctgcaaacatctcaaggtcacctccctcccttgcctacaccctctggtggcttagaataaaatccagactccttcccaaggacttcctgtggggccctggtctgcctcctcctgcaacctcaacatgtaccctctcccccaacccatgacacctaccagcctccttctgtgtattcctcaaatatgccaaactcaattatgcttcaaggctcagggaattgctgcctataacacttatctgctggtccttcatgcctggctctttcttgtccccaagactcgggttagaggtgatctcctgagaaaggcccaccaggcttctgtccttagtgcacctgtcactctttcaccccttacttccttcactaggcttgacccaattcagtcatcatgttcagttattggtttacttgttgattatctgtctcctcctctggagtataatcctgtgagaacaagtaccttatctgaattaaacatggctttgctcctagcagtgagcccagtgcttagcacatgtactccataaatattgtttttagtgaatttgaaatctttagggataactttggaccactccagacaagaaattccaaaatcataatccagactttcatatctctgtatccatatctgaaaagttgggatagaaattagcatttatattacaaagttgttttgaagattaaatgagataacatgcaaagtgcttagaataaggcctaaaacatcattcaataaatttagccattcttactattcttcctaatatctagccttcagggctggccggatactttatagtctttaggtgtgtgagaaatgtgccatattcacccagcgtgtttgtattttgtttggacttacaggggtttccattcctggaactgtccttactggactttgttctgtttggtttaaattcttacatttgaaaagtatgtaccctctttatctctccccagaggcattcacaagtgaagaaggtacctgctcagaatgcatagtttgaagagtttcttctgctagttaccccagatacaggaattcccccctatgggaatattccactttgtatttacagatccaagtgcaccttaaccaaagtgacctaatgagactttggaataagacattaattagtgaatagattaattcccctcacccgtctatagatactcctcatggctttactaagtgccgaaccttgtgggagatatacgttgaccttaaaacacagggagagaagcaatggatatttacatgaacagataaccaacatcattggtcccaaaatggaacatgaccaatgagtagttggaatagcaagcaccatagaatttctttccatgaattcacctttaccgaacacctggtgaaggtcagggcattgtgctctgctgccataagttacacacatatttgtgccctactcttaataggaatttctgctctaaacctcatggcctaagaaggtattcatgaggatattagataaattatgaatattttaaaaattctaacaagttttaccattagttgtgttaataaagctacccaggctaacaaaactataactggattcctttaatggaattcgatcactctatttaattggtaactttggatttctcatgctgatttcacgcccttgaattcatcatctgtccctctacccatttcctatattccctgccttatttaaagatacctctgccaacccacttttctttctttcatccatgaaataactggaaaaggtttttgcaagaacactcctggcttcctgatgtgtccctgcctccccatctggcctcaggtccaaccttgcctcctgtcccttaggcgcttgcccctctcaggtttcctgatgatgcaatgtcatgttccatctgctgggaacatccttctccttgttgttgattcagagaaaacctgcacacctacaaatctttcaagccttggcacagatagtgtcctctatgaaccttccttggctctgctgagcaaacttgtaactcatagtattattaactgtttgtatgcagggccactaatagcccatctttgggactaatgaaacaaaggtgtctcctagccttttggagaaatgcagcctgcagctagggctcacaatttggcaagcagagccaaaggaaggctggatttcagttcctgcttgccccagagcacaggatacacaaactttagagggtctttttgcctgtatattttgctgccacagtgtaaactccttgaggacagaaaccagacttttcatcctcatctctcagaggacagctgaatccctggcatggagtatatgcttagtaagtacttattcagcgagtgaaggaataaatgaaatataatgcaaattggaaaattaagtacattcacatacagagagagaaattaatcaacaaaccaatctatggaaatggaaatgtaactgatacttttggctcactggatttatctaattgacttgtctatctgtagggaaaaagggagggtaagcatgtgacctcctgattaacatttttgaagaatccagaaagcaccaagagatctattaagtcagaccagatgtctggagaatttttaaatcttcttaatattgatgccagcatgatttcccaaagatgggttcagacctgctttccttgagtggttctggctaaatagattaaaatgaggtaaacccattatagctttagtgtgactggctttgaaagatttgaaaaatgttcttttattgagactgaatagctggatgcacttttgctgccaacatcaacacagtccagggccctcctgttattttctgctaaagttttcttaggacatggaatggggtgggagtgggggtgtgaaaagcctccaaggattatgtgttgcttgccattttttttgtttttttcctggymttggctcatagagcaagttgatggtaaatattgggcaatttatttaaccacactattcctcaatttccttattagcaatgctgtcttgtttataaggagttttgaaatttctgcaagcacataaaacactggtgcaaatagccaatgtaggtatcatgttgctaatccacttgatgcctctccaatagtggagaccacctgcatcagactcacttggcatatttattaaaatgcatattcccccaggcccaccccaaaccttctgaattamaatcacaaggggtgcaaccaaaaatctccattgtaaaacaagctcctggagtgattttgatacactctaaagtatccttttgagtatttgccttcttctattaagcctgagattgagctagatggtatgatcacctaaaaatcccctggtatttttcagggttttctggattgactcaatctcagccattttccccagagctactgcatattgtgattgaattattcatttaaaaaatatctgaagctttattttgccaatccttgtcctcaaaatgtggataatctagtaggatgttgaggaataatagttcgtagtcagaggtaggataaaattaatactcaggcttccaaaagtaaaagaatgaagccatgagcattaatctccccgctttcagtttaatgttggactttccctaggagacccagaactgaggtccttttcttgatttggccactgactcagctttgaccttgggaaaaccatttaatctttccacacagtttccccctccacaatatatgctttccccatcatcgcgaaatattttccagaggagctgtttagtttattagaaggaaagttgtgttatggtaaccatatattatgcaaccagatgtaatttatgaagcagcaatagccttagattatggattagtaatgctgattatgtcttacgactgcagaggaacaaaaaaggttgtctagtccttccctttgccttccctttgtgttgagaactgaaaagagtatttaggcttgtggatttactggataagcttctagagtacctgcaaagatactacagaaatggcaaagagacattcaaagttcctgtttctctactcagaaacctgggagaatgaaagaactgttgccaacccctagctttgtttcaccacctgtcctggatagatgattctactgtatcacacttaacatcacatttgccaccttttcttgaactgtttcactaccttgagacctgttactggttctactgatgcaaaacaaattaccacaaatttagcagtgtaaaacaacacacatttatgatctcactgttttcatggagcaggcatccaggcacagcttagctgggtcttctgctcatggtctcacaaggctgaaatcaagctgtgggtggggctgcattctcatttggaggaccaactagggaagaatctgcttccaagttcccttgggttgttggcagcattcattccttgcagctatagaattcatagtagcttccttcttcaaattcaacaacagtgagagtctctcttgattttaataagaaatcctaaggctttaaaaggtgaatggacttcatacccattacaatagctattataaaacaaacaaacaaacaaacaaaaaacaagaaataagtgttggtgaggatgtagagaaattggaacccttgtgcactgttgatggaaatgtaaaatgttgcagccactatgaaaaatgcaatatgatgttgcacttctgtgtatatcccccaaaaaattgaaaaggaggacttaaacagataattgtacactcatgttcataggagcattatttacaatagccaaacggtaggaaaaaaactcctgttcattaatggatgaatgaataaagaaaatgtggtatatacatacaatggaacattattcagccttaaaaaggaaggaaattctgacccatgctacaacatcaaccttaaaatatgctaagtgaaataagccaatcacaaaagacaaatattttaagattccacttatatgaagtacatagggtagtgaaattcatagagacacaaagtagaatggtggtttccaggggctagggggagaggaaatgggagttactatttaatggatacagatttcagttttgcgagatgcagaagttctggagatggatagtgatgatggttgcaaaataacgtaggtgtactaatgccatggtactgtgcacttaaatatagttaaaatggtaaatgttatattatgtatattttatcacaataaaaatactgaaaagttaatcgggcaagagagatgaacatatggatcacaaaacaggaaatgtaaaaagcaagaggacatgggggaaagatgctcaaccttattggtaaccaaagaaatgaaaattgtaaaatagtattgtggtgtcatctgttagtctaataggataataaatgttatttgtctgacacacacagtttggcatagaattatattcaaaacgtattctacttttctgcttcttcctcccctacccctggaacagagataaatctttatttaatatttttattccartgtttcacagatgatagattataaaccactgctaggactctagtgtagtatacaagttgaatttttaaataagtaaaaccttttcttgaggctcaatttgcgttccagtctaaggatatcaaatgcaattctgaaatgcttattgtatcaaaaaagggtttgcctgcaaagattcattagatgatttccaccaatatatcccagagtttacagtactaggagtgggtgagtcggtactatctctataccctaaaactcatacagttggagtatccctagtcaaaaaattttaaatctaaaatgctccaaaatccaaaactttttgagtgccracatgatgccacaagtagaaaatttcacaactgacctcatatgacagggtgcagtcaaaaacgcggtcaaaactttgtttcatgaaccaaattatgtaaatatggtataaaattaccttcagtctgtgtatacaaggtgcatgtgaaacgtaaatgaatttcatgtttagacttgggtcccattccccaagatatctcattatatatatgcaaatattccaaattccaaagaaatctgaaatccaaagcacttctggtgccaagcattttggataaggaatactctatctgtattcttacaatataacagatcctgttcacattcctgtttttaataagccatgtggccacacacctgctttattatccctttattatctcatcattctcatgggtcattactatttgtggcaattcactgaaggcaattagagtcaaatcttgttgatagtaatgaaatgtagctaacaatacctctattattaattggtcaaacactatgagccagtcattctattaagcatgtttctgttatttcacttaatcctcacatccttctcagacaagttatataaccacccttttaaaggtgagaaatacgggctcagagttttaataactcactccaaatcacacacttgttgatagagctagaatccaaacccaaatatgtccaactgcaaatctctggtcttcccactacattacactgcatccaggaatattaattatatttatttcataaggaaaagggatttatcagagtaaaagtatagacatgtgactttgtagaaatagcttgttaataatcatagttcctaaaatttcttattcaggagtattttttttaagtcaaagttatgtaggtcccccaaacaagctgttgtacattcagaatagaatgtttcctatttcatgtcaaaagtgcagatttgcttcctgataagatgtactatttggagactgtctattttttattgtgattcagatgcaaataacaggaaaacatatttttttcctatcttggcaaaagaagtatttctaaaaaagaatacttaatgtaatgatttaaattgcttattttgttattgtgaattgggagaaagcaaattttagcacaggattcaaagaagtaacaatggcctactgacttagaaaagtccagccagggaatttcccaagactctaagccatgaggcaggccctcagagacactggctcctcttccctgtccaagaaaatgaaaaaatgcataactacagagtatcgaagagacacccaggcatatgccaactcaaaatgaactactttgcaaggccttatgtccgtgtattaaaaaaaaaatctagcatcaaaagagaaacaaaaaccaaacttgtctttgtaatccttagaccactcaataaatggtcatttatatgtaatatagcttttaaatggtggtgaaatgtaaataaaatatttttttaaatatcctcttttccttagagaaattcagttctgaatttttaaggtcaaaatgttttcaaagatttttcaaaaggagtgtgaaaattggcaacaaataaatttgaatgtgaaagacagtcatacacacacagacacacacacacacacaccccacacacattttcatttcactcggcctgttctaaactatgtgctgtttcttgtgttttcagagcgcatacatgttttaaccgtctggatctgcctccctacccatccttttccatgctttatgaaaaactgttgacagcagttgaagaaaccagtacttttggacttgagtgacctggaagctgaatgcccatctctgtggacaggcagtttcagaagctgccttctagaagaatgattgaacattggaagtttcaagaggatgcttcctttaggataaagctacgtgctgttgttttccaggaacaagtgctctgtcacatttggggactggagatgagtcctcttggaaggatttgggtgagcttgatgcccagggaacaacccaaccgtctttcaatcaacagttcttgactgccaaactttttccatttgttatgttccaagacaaagatgaacccatacatgatcagctccacggtaatttttagggactcaggagaatcttgaaacttacccttgaacgtggttcaagccaaactggcagcatttggcccaatctccaaattagagcaagttaaataatataataaaagtaaatatatttcctgaaagtacattcatttaagccctaagttataacagaatattcatttcttgcttatgagtgcctgcatggtgtgcaccataggtttccgctttcatgggacatgagtgaaaatgaaaccaagtcaatatgaggtacctttacagatttgcrataagatggtctgtgacaatgtatatgcaagtggtatgtgtgtaattatggctaaagacaaaccattattcagtgaattactaatgacagattttatgctttataatgcatgaaaacaattttaaaataactagcaattaatcacagcatatcaggaaaaagtacacagtgagttctgtttattttttgtaggctcattatgtttatgttctttaagatgtatataagaacctacytatcatgctgtatgtatcactcattccattttcatgttccatgcatactcgggcatcatgctaatatgtatccttttaagcactctcaaggaaacaaaagggccttttatttttataaaggtaaaaaaaattccccaaatattttgcactgaatgtaccaaaggtgaagggacattacaatatgactaacagcaactccatcacttgagaagtataatagaaaatagcttctaaatcaaacttccttcacagtgccgtgtctaccactacaaggactgtgcatctaagtaataattttttaagattcactatatgtgatagtatgatatgcatttatttaaaatgcattagactctcttccatccatcaaatactttacaggatggcatttaatacagatatttcgtatttcccccactgctttttatttgtacagcatcattaaacactaagctcagttaaggagccatcagcaacactgaagagatcagtagtaagaattccattttccctcatcagtgaagacaccacaaattgaaactcagaactatatttctaagcctgcattttcactgatgcataattttcttattaatattaagagacagtttttctatggcatctccaaaactgcatgacatcactagtcttacttctgcttaattttatgagaaggtattcttcattttaattgcttttgggattactccacatctttgtttatttcttgactaatcagattttcaatagagtgaagttaaattgggggtcataaaagcattggattgacatatggtttgccagcctatgggtttacaggcattgcccaaacatttctwtgagatctatatttataagcagccatggaattcctattatgggatgttggcaatcttacattttatagaggtcatatgcatagttttcataggtgttttgtaagaactgattgctctcctgtgagttaagctatgtttactactgggaccctcaagaggaataccacttatgttacactcctgcactaaaggcacrtactgcagtgtgaagaaatgttctgaaaaagggttatagaaatctggaaataagaaaggaagagctctctgtattctataattggaagagaaaaaaagaaaaacttttaactggaaatgttagtttgtacttattgatcatgaatacaagtatatatttaattttgcaaacttttcacttgtttgtattcttttcattataaggaaaagtagtataacacacttttttttaagtcacatatttgatggtatacaagatgtttcagggctggcattctccaagcagcagataaaggttgcatttctttcaaaaatacattcaaagaccatgttatccttcattttggtttgagacatttagttatggtatttcatattattaggtaaaagatatttgaaataaaatgtatctctttaattatttctaacaaatatatttctttattaaggcatccaactttttcccaaataacagtacactttaatgtatgtagacattcttaattagtataatcatctagttgatactgttctcagattgggaattatcaaagatgtacttatcatatcagaacaccatgctaacttatctattattctttcttagtaaaacaaaacagccagtaataactatataaaatattaaataacatttccacagaataaattagactttcatgtactctacaattagaaatatccataaatattttcttctggactgtgaacccagataactaggctttctggtcttattttaagtgatgctctttatactatagaagacactcttaatacatcatatatgtatgcagaacatctcttagatgagagaacaagcacatcattggcattccctctgtgccagtttgatgtttgtttgacgatggagctacaagagtctaaatctgcctttgaaaagctcagctcacagtgtagtagagtagactccaaggttcaaaaaagtgtttttaataaaatttggtaagttctacaatcaaggaatgaagagagaagagaacagctttttccatctgggagattcaataatggcttcatatatagatgatagtgtggctaaaaaaaattacatcaatgctgtttctattgggaagcaatggcaagtaatagtatgtcaatactggtcaagtgttgaagccaggatgcacttacacaacgagagtgtaaagtgtgtagggagctgatctgtgaaggagcaactcaaagattttgaaattatcagtgaaatgccaaaacagggaaagtttccctgtttcccttcatctattctacaatgcaccattggttttcagtgtgaaaaatcccaatccctgagcccaaaccacttctggggtcaaaacatttttcttgtgcacaaaatgaatggatcttggtcaaagaagtatggtcacaattttctagcatatattgcgtttataatttagcagaaattctgcaataaataaaggaaaatctgttttacctgtgcaacaatcagaaatggtaaaaatgcattcaagtgtttgaaagaaatggtagaatatgcttgcatagtgctttatagtttcaaagtgctgtcaggtacatcgtccgtttagctcctcacgcactttgtagggtacaagcatcatgttccatctgggttgtggctgattttcatggatggcttgtggcatcagtttcattacttcatagtcacaattctgtgtttcatcttgagaaatgtggagactaatgtttgtaccagtatattccacattcagtgaggtttccaagatgcttcctccaaactctcactttcttaaacagatacatttaaaatatggcaccttctgaaaagtccataaagaaattagtatattcatggaaaaaatttccccgtagacttatttgcatttcatgacttgacatgagaaatttaaaaaacagaaggcaaaatgtgattgcttttgatggatttatacagaatagtcatttaattttctcaagtattatttggaaacaagataatggaaaacattaatcagaagccttattttatttttaaatttttaatagggatggatctagtaagccctaatagctgagttccagtgataaaattcacaaattttatttatgattggaccacttctaacaaggcaaatatcttataatgaagataggagtctgttcaatttaaccttattcaggaaactccgtatttatgtgaaatgatgcaatgccattattaagaggtatctgtaaccctgcataataaaaacatgcataagaagaatgtggtctaatctccaaactgagtctcagtttcagggccttttgctttctttgtttgtttgtttgagacagtcaggctctgtcatccaggctggagtgcagtggcacatgagctcactgcaacctccacctcccaggctcaagcgatcctcccacctcagcctcctgagtaactgggactacaggcgcacaccaccacacctggctaatttttgtatttttgtagagacaaggcccaggcacgtctcaaactcttgagctcaagcgatccgcccgccttggcctcccaaagtgctaggagtaattataggtgtgagccaccatgctggcagttgtttttgtttatttgtgataaggtctggctgtcacccatgctggagtgcagtggcatgatcttggctcactgcaacctctgccttccaggctcaagccagcctcccacctcagcctccgagtagctaggactacaggcatgcaccaccatgcccagctaatttttttatattttttgtagacacagggttttgccacgttgcccaggctggtcttgaactcctgagctcaagcagtcctcccaccttggcctcccgaagtgctgggattacagacgtgagcctctgggccttgctctgttttgtctgctttctgatttagtaggtgagggacagcactctggaccttagccattttacttccatcttactgccgtgagtttaatgagaatgtcacttttagactctaattttcaaaaacttagtttctttcccattcatttgtgttttccaaattaatttgtttgtctagtatggatgcaaaggaatgctgaagacattaaagctttctgaattgtggcttaaggccagctactgcccactgaaaggatgataaaaataaaaaaggaggaaagaggagcccagcagttgtgccaccccgcaagaatataatgctaattattgaccaactgtcaagattcagagtggtaactgcattccgaggagctgtcaggaaggatgaccgtgtgtgtgctgtccatatcatagccatctgggtcagaaggagcgaaaggatggttaggacaggagtgtagtggagggaaagttaaaacaacggtagatggatcatcttagggcttgctggtgggggtaggaacatacttcaatttggtttcagactgagaagaagaaagctatgctccctgatgaaggcacagtttgatctactagatgggaaataccctcattttataacttcagtaatttaacattttctgtattgcaaagtggaatttagtcccaaagtattaaagctaaccatagcttgatcaggagatttgacaatttagcataaaattatgttgtggatttttttatttaagaattattgttactattattgaacaccatgtatgaaatgaaagaaagggtgcttttatttcattatacttatttggtttttttagcggacatcccttgacattagaatagcatttgagacattttcatgatttctaaagataacttaaatgctctctgttaatctggaaagtgaaatcctaagagtgaggttgcaaatggagactaaattagtgtttccaagtcaggaagttaatcaagaccggaaatagatttgcttagattttatctgcagagtcgtttatttggctttcgtaattgaacagctcagcagaataagatggccctagttgtatggtttctggggaacacaggagaattaaatttatatatgtgatttttatgtgtagtgcccttgggcaggtgatatctttctatatgacttttaagatattacaacctgaggagtgtggatagccgtgttgtgtgattcaaactgaatcagctatta

SEQ ID NO: 94935 - DNA, 68703 bp, Homo sapiens
  misc_feature (1)...(68703): n = A,T,C or G
agcctcaataaggaaaataggcctcaatcaaccatatttcttaagtgctagaggactcgttagacaataactctattacaacaataagagcacttactgagtgcttactccagggcagcacttcatattcattatattatttaattaagaagatttttacttggcattaatttaatatcactttggccctgtcagctgtggttttactcaggattttgtccaaaatctagagaaacctgattataagaaaatttaataagtcacaaaatattatattttcttttccactgcattgtcttggttattttaaaaaatggttcagaaatagtattgtaccaatgttcatatcctcattttggtcattgtactatagttatgtacggtattaaaataagtggcataaaggatatgaggcaacaatttgtactaaatttgtaattttctgtaagtctacaattagataaaaataaagctgaataatagttcatcatttctttaataaattactcattttattttattatggcaaaaagaaatacatgtttaatgtagcaaatattttatatacatataagtaaaaagaagaaaatgaaaattccctaatttaaccagctagaggtatttactataaatatctaggtatatcttcatcaagatgtgtgcatatggacatatagcatgtatgaatttcaatcactgactatatttgcaaatgtaaaactttatatttctttattgaacttaatttttcttaaaccttcattctgcctaatggcaggtaacctaatttagtcacttctgaatagttcagtcattttaagatttaaagtcatttaaattcagctttcagatttagttcccttcgtcttacccaccagggaggttatatttggactccattcatctaatgcagtcacccattgcagatgtaactcatctcacctcaccgttggggaccagcatcctgcttttgtttgctagaaccataatcctgatgatgccctccagccttcacagggctagaggctcacaaggctaccccgggtccccttaacagagccacctcagtcacctttactcctttattgccttggcacatttctagtctctgaggttctctctgagatctgcagaatactgaggccactctctgggaaatgtggcatagcttccttttcttgtgtaatctacagaaactttgctagactttctagcattctccctttgtgcagattggcccagtgtgatggtattctaggtcttctctctaagacccacttaagggatttactctgcaaaccctcctgcctgacattcttgaaaattctcctcaattgaacttttatctcctttggagtgaaagaagcgaacaaacaagcaagctcttacatcatcctactttcttcagtctatgagttatgatataagcttaaaagtttctgtattgaagccagatttctagatattcagattcttctcttaaagcccctccctgctgcctggtccctgcccccacaccaatggctttaaaattctattttgcaaagtgtaaaaaacatttttttttgagagggagtctcgctgtgtcacccaggctggagtgcagtggaacgatctcggctcgctgccatctccgcctcttgggttcaagtgcttctcctgcctcagcctcccaagtagctgggactacaggtatggcaccatcaccccctgctaatttctgtatttgtagtagagacagggtttcacaatgttgtccatgctggtcttgaactcctggcctcaagtgatctgcccacctcgggctcccagaatacatgggtaaaagcgtaattcaacacaatcaaaagtatataaggccaaagaatttttttttaaagaggaaacgtagcaggtggtaaggggaattgtttgttaggaaaaaagaggggaggggaaaaagtagagagagtaagagttaaaggaaactagagaaaaggaaagggaagaggaaaataagacataaaatacaaaggaaagagacaagaatgaaaaagggtggagcaggagggatacgagcacatcttaaatcacaaagaagaactgatacgaataagagccaaaagtcaggaatgcaaagaagaaaagaccaaagaaaaggaaagaaatatgagagaaggcaggtacggagagagaaggagggtgggagtagaaatgaaatgaatttaggatggaaagggagagaaagagtaaggagaagcggaaggggaaaggaataggggaagggaggtcgtcagaaaagcagatggcggacataaacagaaagagatagaaagagagagaagccgggtgaaatagagagagataaagaacaaaaggacaatggataagagaatagggaaaaacagatataggagaaagnnnnnnnnnnnnnnnnnnnncgatatcagttcactgcagtagttcatcacactttgcgaggcaaggcgggcagattgcttgatctcaggagttcgagaccagcctggccaatgtggcaaaaccccctgtctacaagaaatacaaaaattagcctgggggtggtggtgccatgcctgtaatcgcagctacttgggggctgaggctggagaatcgcttgagcccaggaggtcgaatcacgccactgcactccagcctgggctactggagtgagaccctgtctcaagaaaaaaaaaaattttttttttgagacaattgtgaacatttgattatgaactagttattagaagatactaagaagtgatttgttattaatttttccaggtccatggtttttagagaaattagtgaaggccattataggcagggtgggttgggaagtgacccgagaaatgaagctactgtgggaggaagagccacatatgccattcttggatttcaggctcactgaatcaaacgggagtgacatgacatgattaatttgcataaaggttctgtgtgtgtgtgtgtgtgtgtgtgtgtgtgtgtgcacgggcatgtgtgtgtgtggctaggggtgcagatgagaagtgtgtttgtgactgggaagtggctggctggagaaattttggattcctttcctttccataccattcctacctaaatttatcagtgaacattttggttctcttggcttcatcaccttccctttccaagccaccaccatctcttatctgaacacaataattttctatcagttgcttctatccttgtttcctgtaattctccacagagctgccagcatttttaaaagcctaaatcaagtcgttatcctcctgctcgaaacattcaatggctttccattgcagttaaaacacaaattttactggagactcttaagttcctatgtaacctggcccttatcttccccaccgtccttttagtgccactttccttcttactcaccagccaaaccccacaagccaccctacagttcattttccagttacaagtgttcatttttcatatctacttgtgatgctgttatcagaataaatcaagaaaaaaccaaaaaagttaatttttcagaaaacattatttagtataatagttttgaaattgtaattgctgtaacattttaatcaaactagtayaaattgtacttgatctttaaatataaaacaaagaatgattaagggaaagaatgttttactcctggttctgggatgtgaaatattgataacatagagaaaacatactgtgggaggaagagccacatatgccattcttggatttcaggctcactgaatcaaacaggggagtgacatgacatgattaatttgcataaaggttctgtgtgtgtgtgtgtgtgtgtgtgtgtgtgcgcgcgcgcgggcatgtgtgtgtgtgtggctgggggtgcagatgagaagtgtgtttgtgactgggaagtggctggatggagaaattttggattcctttcctttccataccattcctttaaatagcaaattttagttcattcaaagcacattctttaaccatgggacagtcattattcatagatcttaagtctttttatttttttgagatggagtctcgctctgttgctcaggctggagtgcagtggcttgatctcggctcactgcaacccatgtctccctggttcaagcgattctcctgcctcagcctcccaagtagctaggactacaggtgcgtgccaccacgtctgcttaatttttgtattttcttagtagagtcaggctttcaccatgttggccaggctggtctcgaactcctgacctcaggtgatccacccaactcggcctcccaaagtgctgggattataggtgtgagccattgcgcctggccagtcttaagtctgaaagagctatgttctcatatttggaattttttctttgtctagtgagcatgactttcttactcttacaaaacatcaatttgagcaatttctggcatattttccaagaatttatttaaaatctggcatactaaaagctgaactgtattgccatttgcctcaacacacttcaagaagaacatacaacaattaaaataatttgaaatgccattgtctttatcttcctcatcaactttggtcaaatgaaataatacattgtttcaaattctattgctcatccatggttcatgattagagatcactacagtttatttacgataatgaacaaatgtgtcttgaaaagctgactaccggcctggcacggtggctcatgcctgtaatcccagcactctgggaggccgaggcgggcggatcacctgaggtcaggagttcaagaccagcctggccaatatggtgaaaccccgtctctactaaaaatacaaaaattagctgggcgtggtggcgggctcctgcaatcccggctactccggaggctgaggcaggagaatcgcttgaatccgggaggcggaggttgcagtgagccaagatcacccccattgcactccagcctgggggacagagcaagactccatctcaataaaaaagaaaaaaaaaaaaaaaagaaaaaagaaaagctgaccacctaatattattgtgctgacaggcgtgtaacatggacctctctgtgacgcgcaagtattatctggcagttacatggtgccgcctgtgcagctgggcgccaccaccagcttcctgccctgtgcgattaaaaggccagcttcgggracagcagcctcctcaacgcaaagcgaccagccctgccaggcgtcggctgcagctggtccaaggttgacggtcccagggccgcattctccttccggtcacctcagactctggaaagagagccatggagggcctcagagcgcccctctgcagttccttgaggaaaacaagggcctccccctcttggctggagcagccaagtgcccacggggaaaatggtcccgtccaccatttcaggcaaacgcccccatagctgtaataaacatgtgatgggtttcctgcaccaagaaaggaaaattttccttaaaaataacaaaaagaggtggggaggggactctaagttccatttaagattttccaaactcgttgtgtctcatgcatacgctgaggcttaacatgaaaatttggagcgaaagtccccacggttcaccacagggaatgaagtaaagtatctcgccggtagctctaggtctcgtaaaccgtggagctcctttagtataaggccctattatgtgccacattagatgagaagaaaataagaggaaggatacggtagagcctttagaatggggttcagtcttaggactcgtaggataaaggaaggtcgtttccctccgtttgaggcagggaatcaaacaaaacaccggcaccgcaggcaccgcagtcgcactcctggggcctcgtggctttcccgcgcgcccgccttgggggcggggaagaacccggatggaaccacccttgcagcccggaccccccgccgtctttgaatggcagcggggcggagttgccctcccttctgtgctctgactggtttggctccgcactctcctcttcgtgattgggctttcctagtgccagtcacagagcgacgctggtctcccagattgttgcagaaggagacggcgtcgacgtctgactggactcgcggcgacttacctttcagtcgtgcgctcctgatccggcgctcggaatttgtccccggcttcagggctgcggggcctggaaggaggcgtatcgaggcggctcgaaaacgatccaggggagccgaggcgctcctcttgtcatcccactcagcgccatgtcctggatgttcaagaggtgaagggggcggagggggtggggcgctcggtctaacggcctggaggcgtccccaaatgaacctgaccttccccgcgttcctctgcgttccctgggcgatttgtgcagctgtattcgttctgttggtcgcatatgtggccgccggagaaataaatgcattgtcttcgctggcgagtaggggctcctagggcgagtcccgtgttagggacttgggaaatctctgtcaccgactgtrgggggcctggggcttaaagcatctcggccagtgctttatttaacaaaacatccattagatacccactgtgcgccaggcattgtgctcggtggagggccgagtaagacagtccttgtccccaagtggctcacagcttatctgtatgcacagacgtgcagataagtatttgcagaggcgctagtagagataygcgccacttgcaaggaaaacgcatcgcaaataagcgactgttcttaggagaatggaaactttttgcaatgctccagtagactccccttcacttttcattgtccaaattggtatttatggtcattcccgaaacagttacacctaatgggtttggggttatgcttaaaccggcgacggaaggcgggtacgggtggcttggggccaatttcccacggtggcgtggtttggataccagaataggtgttctgctcgcagggagttacagtgatggatgctggatgtattttctggaaaattataaacaacttctggtacattaatagttgtatttttataagtcttttatatagctcaatccctattgaaattttggcatatgatttcattttttaaattatttttttgacatggagtctcgctctgtcgtccaggctggagtgcagtggcacaatctcggctcgctgcaacctacgcctcccgggttcaagtgattctcctgcctcagcctcccgagtagctgggattacatatgggcgccaccacgcctggctaatttttgtatttgtagtagacagggtttcacaatgttggccaggttggtctcaaattcctgacctcaggtgatccacctgcctctgcctcccaaagtgctgggattccaggcgtgagccaccgcatccggcccataattgtagttacagacatcatatacatatcaatttagatgattttcactgggaaagaggttagtgaactctgactaggcttttcattttgaatacctagggggcaggtagaagagccaatattgaaaacaggtagagttcctagaagccttctccactcactgcaattcctgctttaacgagagtaactattaatctttaccgtgattcccatgtaagatttcatttgctgaagtaaagcatgagaaaactactcatatggtctttggaaatacttaaatattatattgtttttctttgcctttaaaaaaaaatagggatccagtttggaagtacttgcagactgtccagtatggagttcatggaaattttccacgcctctcatatccaactttctttccacgttttgaattccaagatgttatccctccagatgactttctaactagtgatgaagaagtagattccgttttatttggaagtttgagaggtcatgtggttggactacgctattacacgggagtagtgagtataatagtagataattaaattttgattatatttctggcgttaacctagaaaataagagaattcgcaggtgatgtgtgcggttaatctttattttactttaagttagttaaatatttgtacgcaaaaaataacaaataccttaagtgaccctcccacctcagcctcccagagtgttgggattacaggaatgagccaatatgcttggcctcagtgcgttatgtttggttattatgggtagcaccccacccccacaccccagcgccttgttcatgtcatcgatttgttgcaaaaaggagatcgttttgtggaatcttctggattttattctttcatttctccgtatgtttcttatgtttaagcttctcaatagggtgtctgaagcatgttcgacaggagattccttaggagtttcatgttctggatttgtttttctcctgtatttcctttacattggaacgtttcaaattgttttttgattgtctgaaatgtgttgtctaggagattccttaggaagagacaatatttcctaagtttttatattttcatamttgtggcattttatgaatgacagtttcataaaatgaaagttatgaaggacttaatgacagttgggctgaatttaaaatctttgtaatatatctttgtaataaaatctttgtaataaaatctccatatcctaatgttgcatagaattctcaggccagtgtgattttctttcacttaagtgaattggatttttttttttttctttttttttgagaccaagtttcgttttgttgcccaggctggagtgcagtggcctgatctggcctcactgcaatctctgcctcccagactcaagcaattctcccaattcagcctcctgagtagctgggactgctggcgttcaccaccatacccagctaatttttgtatttktttttttttgtatttttttttaggttttggcatgttgtccaggctgatctggaactcctgggctcaagtgatccgtccgccttggcctctccaagtgctgggatgctgcacccggcctctaattttttctaatagattcttgaactctatcagttcttatttcacatctatatattctctggctctcatatgcatttctgagcttttctgtttcagatttgtgctaatttttcaaaacttacattgctttcgataattattttataccaccatgaaatactagattatggtagttattgatcttagaacaatcagtatttttgatctgagaataatctctatgacttcggtaaactctagtgtgtgttgataaaaagtaatcatcagttttcttattttgccaaatatatatactttaaattttatttttttccaggaacactatgttgagatatcatttattttataattaaygcatgttcttttatttgtttttgttttttttttgaaacggagtcttgcttgcattgcccaggctggagtgcaatggtgcaatcttggctcactgcaacctccgcctcccaggttcaagcggttctcctgcaacagcctcctaagtagctgggattacaggcatgcgccatcatgcccagctaattttttgtatttaggagagatgaggttttgccatgttggtcaggctggtcttgaacccctgacctcaggtgatccactcacctcggccttccaaagtgctgggattacaggcatgagccaccgcgcccagccacgttcattatttttaaatggctaaaaaggcattaaatcttctgaagtctatcatccagaaccataacttatcttctacacttgtttctgtgagcatgtgcatgtaaattggaatcatattatgtattaataaaaatgagatcatattatgcctaatgtgattaggaatatcatctatattggacttataatttccttgttgatggacatttttgagttaatcactattataaaaataataaaaattgagatactatctttgcatacttgttattttaattttttttctactttattgagatgtggtttacgtatgataaaatgtacatattttaaatgtatgatcctagtgttttgacaaagatgtatacctgataactactaccccaatcaagatacagattgtatccgtctccctcaaagtatcttgtatcctattgcattcatttttccctgttcctgccctaggcagccacgagtctcatttcttttctttttttttgttttttttgagacggagtctcgctctgtttctcaggctggagcgcagtggcgsgatctcggctcattgcaagctccgcctcccaagttcatgccattctcctgcctcagcctcccaagtagctgggactacaggcgcctgccaccatgcccggctaatttttttgtatttttggtagagacggggtttcaccgtgttagccaggatggtctgtatctcctgacctcgtgatccgcccgcctcggcctcccaaagtgctgggattacaggtgtgagccactgcgcccggccacacaagtcttctatcactataaataagttttgcctattctagaacttcatatacattgaattctacagtatgtactattttaagtctggcgtttttcactcagcataatttaggtacttctttggtctattttggttagttacatttttgaagaaaagcatccattttatttagatattcaaacttattcccatagaattgtgcatagtaatcatttatccttataaaattgtaactgtaattttctggaattggggtttggtggtatgatgtgttgctcacaagtggccagaactcctattcctgaaggattttgaattggaggaacacatacttaaactcccttttatgccttggttctagttactctttccaagttgaataaccatttttttggttgttttaagttggtgctctgaaccttaaatttcagtaccctttactctgaattgtcaaattttgataaaatgtgccatttttttaatgtctgccagaacataattttatatgccttattggctccattaaactttttaaaaacttttttaaaaaggtgattatattcctgtttttattctttgtgttacacattcgtgtcttttttattgattagctatgacattatttcttttcaaggcaggctctcttgaatttttcttaatgattgtgtttcttggcttaataattactcttacattcggtttttctacttagatttattttcttttcatttctgttggacttgcgatttgagcacttaatttgagtcatttaatcttttaatctttaaacgtgttaagtattgcgttgcctttagccaccacgttttgttatgtagtagcattctttatttttaactctggtgttttcttattcttatttcatttttattttttgtttttttttttttagtgtgttttcaataagcatatggttaagtttattttttgacccatcaaaggctttattttataatgtggtttatttctttttctattttaaaatacagttatgtgttgcttaacaatgaagatactttctgagaaaagtgttaggtgatttctttgtggaaacagagtgaacaagatgttactttactgaatactgtgggcaattgtaacacatttgtgtatttaagcatatataacatgaaaaaagtacagtaaaaatattgtataaaatatgaaaaatggtacacttctatagggcagccccattataatcttgtggaacaactgttgcataatrcatgtggtctgtcattgctgaaatgttgttatgcrgggtatgactatactgttatgattaattctcattccttttgttattcttgtctttgtctttttgtttttttatatgtcctgttttttcttgctgctgggaccatgtttttgtttttatagtctccaatattttggctcatatatattttatttaaaattctagtaattacttatttgtaacgacagttaactaattgtaattaatgatagcttattatgataaattacaattatgtaataccttgagatgaaatgctcaaaaattgttagttttgtgccctgcttttttattttggttatgtattttctaggatttgcataatccggtttaaaaaagatcatcctgtaggcagtggcagaggggtggcgactgggagagaacatagctctgcctcatagataatatctctaaaagtctagagatgaatatctgtctaatactctgtttagttctggctgtaatctcttgagtcagtagacagatgctgggagaggtttgaagcagctttcttgtatattttcaaggaattttttaaaattgagatacatttattataaaatttaccattttaaagtgtacagttgagtagtttttagaatactcacaaggttgtgcaaccatccctacaatctagttccaaaacattttcattactccaaaaagaaacctcattcccatttgtagtcactcccattatctctacccctcagtccctggcaaccatgaatcagtcttcttcctgtgtatatggatttacctcctcttgacatttcacgtaaatgaaatgatacaatatgtggcatttgggtctggcctccaatactcatttttatgttaaatagatttttttttttagtgtactattttaattcccttgtttcttttactatatattttgagttacttatgattgctttagggattacaattaacaacttaatttataagaacctagtttggattagtgccaacttaacagtatataaaaaactttgtggctgggcatggggcatggtggctcacgcctgtaatcccagcgctttgggaggccaaggtgagtggatcacgaggttaggagattgagaccatcctggccaacatggtgaaaccccatctctactaaaaatacaaaaattagctgggcatggtggcacctgcctgtagtcccagctacttgggaggctgaggcaggagaatcgcatgaactagggagtcagaggttgcagtgagccgagattgtgcgactgtactccagcctggtgacagcaagactctgtctcaaaaaaacaacaacaaagaaaaccccaaaaaaacctttgctcacagctccatcctattgccttcctttgtgctgttatccaagttatatctttatatatgtagtatacctatcaacaaagatttataattatatactttttaatgagataggacaaaaattacaaaaaattatacttaaaaatttttatttttttaaataattttttttttttttttttttttttttttaaaaaactgtcgttacccttttgcccaggctggtctmaaacttyttttgacagtttgattatgatgtgaccagggggggatctctttgagtttattttagttggagttgttgagcttcttatatgtgtaragtagtggtttccatcgaattgggaaggttttggctgttatttctttaaatattttttctgcccctttctcttttctccttatggtactcttatgtatgtgtgttggtatgcttgatattacaagtttctgaggctctgttgtgtgtcatttttttgttccttagattgtataatctcaattgacctatcttcagcttcgctgatttttcttatgcctgctcaaatttgctgttgagtctctctggtgaattttttcttcagttattgtaccttttgactctagaattgctgtttggtgagacatcgtctccatgcttttagacatgcgttttcatgtcgaaagaaatgatttgctttaggtctttgaacttatttttttttttttttgagacggagtcttgctttgtcgcccaggctggagtgcagtggcacgatctcggctcactgcaagctctgcctcccaggttcacatcattctcctgtgtcagcttcccgagtaactgggactacaggcacccgccacctcgcccggctaattttttgtatttttagtagagacggggtttcactgtgttagccaggatggtctcgatctcctgacctcgtgatccgcccacctcggcctcccaaagtgctgggattacaggcgtgagccactgtgcccggccaggtctttgaactttttaattttttagagataggttcttgctctattacccaggctggagtgcagtggcgtgatcatagctcactgtaaccttgaactcctgcattcaagcagtcctcccacctcagactcctgaatagctgggactacaggcatgtaccaccatacctggctaatttttctatttttattttgtagaaatggggtcttgctatgtttcccaggctggtctcaaattcctggcctcaagagawcctcacacttcagcctcctaaagtgctgggattacaagtgtgagccaccatgcccagcccctttgaacatatttaaaataactgacttaaattctttttctactatgtcaaacatctatactttcttggggacagttgacattgattgctttttttccctgtgtatagaccatactttcttattttttttgcatgtcttgtactttttttcttgaaaaattgacattttaaataatgtggcagctctggaaatcagggtggtttgttgttgctgagttttgtaattagtgtgtgtttgttaggcttctagggtggtttgttgctgagttttgtaattagtgtgtgtttgttagtgactttcctgaattaattctgtgatgtctatcctttatcgtgtgtggtcactgaagtctgtacttggttagcttagcggtcagctgatgattgtgctggaactaataaatcgtacattctttgctgagaacttctgtatgttagggcattccttcaacactctaaggcccctgacaactctgctttagctttcacttctggcttgtttaaatgctcaagttcaggcaaaggtgagcgtttagggccttctcaggtctttcttgagaatgtgcacagccctggtcatgcataccagccctgtgcttgcttacggccttctagatatccagaaatacactggagcttttcaaagccctcacagacatctcattccctagctcttctttataagcctttttgtttttttgcttcagctgttatccactgcctcaggtagccatgaagttaaaacactttcctgtaaaattgttttgacaaacatccgcccaagggaggtttttttgtacttggtgagctcagaggttaaatacagtcagccttgcaagtggggtcttccggggaacttcaggagaataacagttctttgggaatgaatctctgaaagaactgtaactccattctctttttttctggtgactgccaggctttacctaggatcccaacaagctattattwttatttatttattwatttatttatttatttatttatttatttattttgagatgaagtctcgctctgtcaccaggctggagtgcaggggcrctatcttggctcactgcaacctctgcctgccgggttcaagtggttctcctgcctcagcctcccgagtagctaggactacaggcgcgtgccaccacacccagctaatttttgtatttttagtagagacgggggtctcaccatgttggctaggatggtcttgatctcttgacctcgtgatcttcccacctcggcctcccaaagtgctgggggcgtgagctactgtgcctggccgtgagctatttttaaaggctacaggattgctggggatgggactgaagtactgatattcagctgtttattctttttattcttgaataaatgttacccagatttctgcaagcctttgatttagttctcagtgttctgaaacatttgattctgacaaataatttatctagtttttttgttgcctttattgaggaatttttgaaagtcctcattctaccattctttattgtgttaccctccttcagtttttaaaaatatacatcataatatttaagttaaatcatacagtttttaataaagtagaatcagaatggcatgagttgaaggctggatatatttttcttacctagttccatcctgacttataaatgccttattccctgacttttatattctggagaattgaggctcaggaaccaccctgtgtgggttcagatcctagctctgctaccttttagctttgtgaccttgggcaagttacttttctgtgcttcagtttcttcatttgtaaaatgggaataatgatagtacctcccaatagagctgtgaggatttaaaaagtcagtctgtgcaatgtacttagaccaatgcttggcacatagtaagcgctcaataagggttggctatttttcagaagttatgatgttgaaaattttagataatttgaatttgctagtttacatttgactattttttaagacattaaggatttgttaacttcctaatgaatatagattagaaaaataatattaaggagtcataataatatatattaatatttctgtagtttgtgtctagaaaatatatttttcttatgtgcagtgtttagcagtagcattaaaaaatgaatggaaatcccagataaagtataacaaagttattgtctattatttataatgtaatattatytgtttatcatttttattaggttaataataatgaaatggttgcattacaacgagatcctaataacccttatgataagaatgcaattaaagtaaacaatgtgaatggaaatcaagttggccatttaaagaaagagcttgcaggtgctttggcctatatcatggacaacaaattggcacaaattgaagggtaatgtactttcagaatttagttttaataattgtgaattatagtcatctttgaacttgttagggcttcttgttagagcctataaaggtatgctaacaatttctatcactgtacttttggtacgtgttaaataaatgttttatttctccttttacatacttctactaccccagccatcaaacaattgtcctctcattttcctatggaattattaccatggagaaaatagaccttggttcaaatattaggaagtacattccatttctccaaaccttttggtacctaggtttaggaatttggaagtgtttatttgtttatttatttatttatttattttgagacgaagtctcactctgttgcccaggctgcagtgcagttgtgtgatctcggctgactgcaacctccgcctccagggttcaagcaactctccctgccttagcctcctgagtagctacaggtgcctgccaccatgcccaattaatttttgtattttttagtagagacagagatttgccatgttggccaggctgtctcgaactcctgacctcaggtgatctgcccgcctcggcctcccaaaatgctgggattacaggcgtgagccaccgtgcccagcctggaagtgtttgtttatatcagaggttataaactggtattctgtgatatgatgtaggtgaatttcattttgccctgcagtgttttagacattttttcgttcagtactaattattgaaatagctaagtccgcattttatacatattaatttattttcttaaatacaaaaawcttatttttctcttgacaagtgggaaatctggcaatgcaggatgagttgtcacttccatatgacaatagttgactggaactctccctttagctagggcatatgctctcccagttttatcacctgtttcttttttctttttctaaactctttcaatctttcagttaccttttctcttttaggcatttgtacttgtgatctcaatttaagtatctggaatatttaggatcttgatattctaattctaatttttaggatattcatataatcctaggtgagtttgaagagaaaataaatgctcataatgtctcactttgttttctcctttttcagtttatcaggtttttcagttattgagaataacttagtgaatcacaagttcttgcatttcccattttccaagcagaatgagttrctaccctcagtggttccgttagccaaactctaccctttgatttaacttattttacttatattacaatcttgtttacaggccatccttgcatttttaaaactgctttattccattttctcaattttttctggcactctgtttctaaaaatcacccttctgattgtttatgkttctatttcttttcctttttttctttcaagtctgcccaactagttccttattactttacttcaatgtaaaatgtaaatgatacacttaaaatattgaactaattcttagtggggataaaaagtaatgcttctgatttccctttctttttctcccaaatataatagggtagttccttttggtgcaaacaatgcttttaccatgcctctgcatatgactttttggggaaaaraagaaaatagaaaagcggtttcagatcagttgaagaaacatggatttaaattgggtcctgcaccaaaaagtaagtttagggtttcacttaatattattctgatattgtaagatgcagggattatgaaacatttattctctcttggagtttgttggctaatttgtgctcaaggctccaaggtacaactttttttcaggagtctttttgaggaaatctctgatttttccttttgcctctattgaaatagattcacacataaaaatatacacagtaagagtgaggggatattaaaaaaattaaagaaaaagtatatatgcaatgaagtctcatatataccctcccctaattttccctaatggtaacatctggaaacccctgactttaaacattctttttgataaattttaggcaaaaataatcttctgatagcgaatgaaaaggattgcttggcaagagtttgttcaaataatgtggaattacttgtttttttagtgatttagtatttagcttttaaaatacctctaaaatacaaggcttttaatgcagtttgttatgcacgttttatttatttatttgtgtatatattttgagacagagtcttgctctgtcacccaggctagagtacagtggccacgatcagtggctgagtgcaaccttgacctcctgggctccagcagtccttccacctgagcctcctgagtagctgggactacaggcgcacaccatcacgctctgctaatttttgtattttttgtagagacagaatctcaccatgttgcccaggctagtctcaaactactggactcaggcaaaccacctgccttggcctcccaaagtgcttgggttacaggcatgagccacagcacccagccctgttaatgcatattttaaaagctacttaataaaagataaaaacctactttatttgatggctttattctttttattttgtaaattatagctttaggattcaatttggaaagtggttggggctctggaagagctggaccaagctatagtatgccagtgcatgctgcagtacagatgacaactgaacaggtgtgcttctcttttattttgtaatctaaaagtgaattttaaatgttgcaggtttgtatttaaaagaacaggatgaatatgtacgtgtgggtatttgtggtcttcaaatatattaagttataatgaaacatgttatagaataaatagaatatatatatgttaacattttatataaaaagtactgataaggaataaatccatacgtgaacatttgtacccaacatacaaaacacacacgttcctgtttatgcacggcatatttttgtatctgaaatgttttaaatgttcaagtagtaattttaagaaaaaaattgaagctgagacttaactcctttcagtaattttgcaaatgcagtgctaaagatttaactccaaattcttcacattgtctaatttgtaatttaggatgagttatgctgaatttctttgaaaaaaaagtatataaagtaattaatgcagatcaatttaaaaataacattaaaacttttttgatgtttgtatctaccagtgttagtccttttatctactaattgtagttaccatatttaccctgcttattgttagaaggacttgagcttgtttctggtagataagcccccggttacttctgattttttagacctggcctgatttcttctgagctgctgctgtgttcatgtgttaattttcaaaaatatctgtatcacatatatgttgatataaaattggactaacctagtttaaatagtcaattaagttagcataataataaaagtatcctatagtgcatggcaagttccttattgcagtaataataaatggaatgtcattgacctggtaggactgagaaaatattttgaatacaactgatagcatcacagaattttaatggcagaaggaaccttagagacaatctaaatttagttcatccctttcattttataggaataagacatggggccataaaggtcaagtcttgctgaaacttacatataagcttatttgtgataaaactgtgactgaaactcgggacttaaaattcttttatattcttttacctcctaacaactaaagcacctgttcattcgctcttcagtgagtagtgtaatyctagagttgatttatgtgcctttttggcgtttgactagtttgtggtttttaaatttaatttaatttcaatwtcttaattttttgggacagggtctcactttcttgcccaggctggagtgcagtggcataatcatggttcactctatcctctacctactaggctgaagtgatcctcccatctcagcatccctaggagccagaactacaggcatgcacccccatgcctggctaattttttaaaaatttttttgtagagatgggatctctcactatgttatccaggctggtctcaaactcctgagctcaagtgatcctcccaccttggtctcccaaagtgctgagattattggcatgagccaccactcctggcccgtttgacattaaygccagttaattaaatgatttcaaatctgacttaaatgcaagtattattttaattagtttgttttacattgtttcttgttgctgtttattgtagcttaaaacagaatttgacaaattgtttgaagatttaaaagaagatgataaaacccatgaaatggaaccagctgaggtattgaaccaatattttttatttaagactactcagaatgtttaaatatacttagaatctactttttgtttaatcacaggatctgcatgtgaaaaaggaatggcttaatgtatttcgctttatgactttttatttataggctattgaaacaccactgcttccacatcaaaaacaagctctagcttggatggtgtcacgggaaaatagcaaagaacttccaccattctgggaacagcgaaatgacttatactataacacaataacaaatttttctgagaaggaccgaccagaaaatgtccatggaggaattttagctgatgatatgggtttggtaattatttttttctttagttaataaaatctaattttgtgattatgattttctagaaagtaattttgaagtaaaaagagataggaatatgttggtascagtttgggactagatcttactatctttgtagaacacagtttttcctrtagtttttagttaaaatagtggtataaagatgtgttcctcagttttcttttttttttttttgagatggagtcttgctctgtcacccaggctggagtgcagtgacgcgatcttggctcactgcagcctccgcctcccaggttcaagcagttctcctgtctcagacttccaaatagctgggattacaggcatgtgccaccatgcccagctaatttttgtatttttagtagagacagggttttaccacgttggccaggctggttttgaactcctgacttcaagtgatccgcccgccttggcctcccaaagtgctggggttacagatgtgagccaccctgcctggccatgtttctcaattttctttgctctttgaaattcagggtgacctgtctttcayaggttttcttttaaaaagtaaagacaaaacaatgttatgtgaaattgtattccatcacaaatattgtgttatgcagagtattaaatagatacttatgtgtccttacactagcagtttttatatttttcagtctcagtaaccctttctactcataaaaattactgatttcaaagagcttttgcttttgtgtgctgttatcagtagttatagtattaggcagtggtagctaaagatagcagtacaaactcattgcttgttaacataaatagcatatttttaaaagaaaaataactatgccaaaacattaacatttttgttgcaacaactggcattgtcacatttttgcacatctctgtgtttggccgaatagatggcagctgaattctcacctgcttcttcattcagtctgttctgttaggttgttttggttgaagtatatgaagaaaatttgtccttacgacggtatgttgctgtaaagagaggagtattgtaatagctttttagataattgcagatttctttgatatactgcatcaaaattcaataaatattagtttattaaaggttaattgttgtaatatggaacgctaaatcatatcagtgagctttttataccctgttttgttaaaatctatttgtgtatcttgctcattgaatgaatattttacccatgtatgattttataacaccaggcattgctcatttagaaaatgttggttcattgagttgggcagacctactaaatgttgatgtatttcatatgcaatatccaaaacttacattcattaatattaccactgatgttattagaaaatcatttacattttgggaaggcactatgttcatagtgtcmcacacaacttttccaacattctaattttctattgaaaactcacattttatcattgacaagctcagttgtttcctttgtagatgacagcctcactttgttcattttctagaaagtatctttcagacactcagtcgtgattgatagttgtcattcaagtaaaaatggtgtcgcatgaaaaaagtgactagttgagcttataactcccatcttgagtgatttttctctagctaaccctcatagtttgatatgcaacagaagtagttaatatgtagtttccatttcactacacagaatattaaaaagatttgtactgaagtaatgagacttaataaaattaatgtgtactgcttcgtcaagaacattcttcttctttttttttttttttcttgagatggagtttcactcttgttgcccaggctggagtaatggttcagtcttggctcactgcaccctccgcctcccaggttcaagtgattctccttccttagcctcccaagtagctgggattacaggcatgcaccaccacacctagctaattttttgtatttagtagagacggggtttcaccgtgttggtccaggctggtcttgaactcctacctcaggtgatccacctgcttcggcctcccaaagtgctgggattacaggcctgagccactgtgcccagccaagaacattcttaaggaaaacttttttttttaactgtatgtggcagttaagaatatgatgactagtactaatataccttagtgccaactgctttgttttatgctgaggcacttttttgaccattgctatttgggctttttgtaggattagtgcagatgttaacagagtaaggtctgtcttagtagtattataaaaacagttttgacttygcattttcgtgaagggctcctgggaaaccctccccatccccagtggcctgtggaccacactttgaaaactgctgttatttacactgctttaaaattgccagagatttactaatgtattgccaactatgaattaagctgcagtaaatattgaaaaattacatacttccacttaagaaaaatgcataagaaatatatcttttatgctttatggagaagttatgacttttaagcttggtattatctttaagtcaaattttaataaaatgattatatgcatactggaattactaatcactttagctccgaacttcatggcaaatgagtagttataaatagttgcatgataaaaatcaagagttcaggattaaatgtagaattgtagaatagcagtcattcaataaaatgacacttctcagagatacttgtagtattttatagtgtaaatcatttaataattccctaataatgcartgggggaaagcattttctaactaaatgaaatactcatttttcattaatatacagtacacttttgtgaccttgaatgatatttgatattcgattacttgattttaaaatgggaacgtttttctggtgaactgggtttcacaatctgaccatttatctttttaaaacatttttaagggtaaaactcttacrgccattgcagtaatccttaccarcttccatgatggcagacctcttcctattgaaagagttaaaaagaatctactgaagaaggtaaagtagtagtaagtgcgctttatgtgaaacctccagtttattgtgaaatctttaaatttcatcattaaaaaaaactaccaagaaattgtgttttcagaaatgcgatgaatggtctctctgtcttttatgtgttgctgataagaatgaaagttcgtgtcacattctttttacgttttcagacaaggtgtggctctgttgcccaggctggagtgcagtggcgcaatctcagctcactgtaacctctgcttcccaggctcaagtcgtgggatttcgccatgttgtccaggctggtctcgaactcatgagctcaagccatctacctgcctcagcctcccaaagtgctggggctrtaggtgtgagccaccagcaggtatcacattcttgagaacaattgataatttgtatcaggagtcttaaaattgtttataatctttgaacaattttgccagtcaataatgccatttctaagaaactatctgaaaggagttaccagaaattcattttttccaaagaaaatacaggtttttttttattattattatttttttttccctcaacattgttttaaaggctgggcatagtgactggcacctgtagttccacctacttgggaggctgaagcaggaggattgctggagcccaggagtttgagcctatggtcagctatgattgcactattgcactccaccytcagtgacactgtgagaccctgtctctaaaacaaataaaaataaaataaaggtggacaatttgaaacatcttttgacaagggaacagttaaacgatatagccataaaacttactattatgtaaccattaagtattatttttgatgaataatcactttcatgattctttttagttaaaaaatgacaggtacaaatctttgtgtggagtttggttcctcactttgtaaataatatattcatgtgtgttttaagtccattcactacactatctgtaccaaaatgttaataataacttatgtcctagtgatgagaataagggtgacttttcttgaaaatttgtgtgtgtgtgtrtatatatatacatatatatatgtatataatataaacatacatttatatttggtttctaagaattaaaaattagtttagtgagaaaaataaatgttactagagaggaacagttacttcttttcttacctgaaaattcaagtaacttaaatagaaggaaatagcaaaaagatgtatgcaatatacttcttttctgaactcttctgaattaccattcttcctagtttttagttttcagagaaggcagtacatcagtttcctgtcagtgctattgagattttattttattaatgtctgcacttagttttacttcctactttctacttttattgagagttaaacctgttgaagtctcaggttcaattcctcaccctgagcaacctaatgttttatgtcttgttcttcctacatttggttattgaaactgaagttttaggttaccagatttgatagaagcacataagactacttactgctttagtctcaattattaattgagaaattatcaattaacaataaggatttctcttatttttccccaagataagttatatatttaaagtgtgttttatagtagaaaggttttagaatatttgggttgctacattaattgaaatggcagctgaagatgtgatttccagccagggatttattaaaaaaaaaaaaaaaattgtcactctttcaagtatgtttagatattccaaacataagtagactgaaatattgatttaaattcccctagattctaacatactattatttcatccagcttggacttgataaaaagtttatctttgaactttatagagaaaaagtttgctgagcaaaatattttaatataaagaataatgcaaagctgggcatagtgactcattcctgtaatcccagcactttgggaggctgaggcgggcagatcacctgaggttaggagttcaagaccagtctgaccaacatgatgaagccctgtctctactgaaaatacaaaattagctgggcgtggtggcgcatacctgtaatctcagttacttgggaggctgaggcaggagaatcacttgaactcaggaggtagaggtttcaatgagccgagattgtgccgttgcactccagcctgggcaacaagagtgaaactctgtctcagaaaaaaaaaaaagaagatgaatgcaaaggacatcctttatgtttgaataaacatttagtttttttgcatactgtttaatataaatggttatagtaattattgtagacttgataggatgtttgatgaaaagcatttttaccatctctttcttggagctaatgcttagacattaactgtctaaagtaactcttctagttacgtatctctaaaaatattgtatttgggattttaaattaatttaattttattttttgagacagagggagtgcagtggcgcaaccttggctcactacaacctccacctcctcagttcaagcaattctcctgcctcagcctcccaagtagctgggattacaggtgcccgccaccatgcctggctaatctgtgtctatttagtagagacagggttttgctgtgttggccaggctagtctcgagctcctgatcttaggtgatccgcccgcctcggtctcccaaagtgctggcatgagccactgcgcccggcagatttttagttttttttgattggtacctttaaagaggatgaaccttttcaaccacatttttagtaagacttaactctaaggggggattttttaagtgcttacaattcaaattttataaaattgttttcaattcatgtacattggtgcctttggaaacaaaggtacattggaaaagaaaagaaaatgggctagcaggaaaataccccatggagtaagaagagaggacactctgggacctgtactattatatattagagttatttgccctgcaaattctagagaaagagaggatgacaatggcagcctcattaaagatctgaacatggaacattggtttgaaaagtttgaagtctgagaattcttaattataaagtaaatcccagttcttgaatttttctcacaataatgtgtcatttataattgagatttgctttcggtattcctttcgaaaaggtgaaggccaagtagttttatttatttttttttttttgagataacccgtgaaaaaattttaaatcagtttgtatattttcctcttcacttattcaccctccccttcagttgctccagaattgggtagcaatttaagtcgtttttattatgcaaagtaaagcaatataaaacaggatgcatttaaagttatttaaaactgatagcagtactgtttaagaaatatgcctatttacccaggaatataatgttaacgatgactctatgaaacttggaggaaacaataccagtgaaaaggcagatggactaagcaaaggtaaatgctaattttgaaatgatccaatatttgatctggtaaactttaatttgaatatgacccaatatttgatttgcgttttttcagcctaatattgtaattctagttttggctttgtactgtacaaaaatttaggatctcttttttaaaaggtcttccctgagtactgataggaaaggtttcatgaaggagatgattgaattgggtagtataacatttagagaactggggaagagcattttgggttgtgaaaaaaaatctcatgaaagggtactttaaaaagagcatgttttattctgggacctcagtgaattttgttgtatttaaaatgyaatatgcatggataacagcagataatgctagaaagctagctttagagccaaattctgaagtcataggagaaatggaaagagatctgtggattttacttaaatgaccctcataaagcttatttctaaagatagattagagcagactgaaaatattttaagagtagtaggtgaaaaattgtaaataacaattggtgctattacttaagtttggaacaggaaagaaatagaaaggtggcgagttagggtaagatgaggttttttttgtttttgattttgttctgtggtctaactcatctacstagatgagttaggtagatgagttagcagtagaaggaaagaagtaaggttgaaggaaagtatagataaatgagtggattaaaagataggaaaattgagatttttatggaagataccttctcattttctttgtaaagtgaaataggtcatcttggaataaaaggagttataatctaggcaaaggggtcaatgtagtatggatcattctggtatggatcattctgataaatgggtaggggagccgaacagtgtttagtaaaaagagttaccaagtgacacaaggtgacatctgagatttgaacatgtaaatttataacagcacctatttgtggttctgttgatttttttttccaatagctcttagctgccttggtacagcaagacattcagctagtgtggggatgggctggatgagtacaaagaaaagactgggtcataaaaatttgaaggtactttctaattagaaatgaggaaatactagattaggaaaaaagtagagaaaatagagtaatgaaaggaatgaagatcttaagaaaactgaaaatcagtaattagaaaaccaaggttttaagagggataatactagtttctaagacaccttactaatactttatatttgcatttttctttgaaatagacgcatctagatgtagtgaacaacccagtatttcagatatcaaggagaagagtaagtttcgcatgtcagaattgtctagctcccgccccaaaaggtaaactattatggtttgattatgtcatatgtttatttagactctgttttcttatgtgtaaaagagatagaggctgggcacggtggctcacacctgtaatcccagcactttgggaggccgaggcgggcggatcatgaggtcaggagattgagaccatcctggctaacacagtgaaaccccgtctctactaaaaatagacaaaaattagccaggcgtggtcgtgggcgcctgtagtcccagttacccaggaggctgaggcaggagaatggcgtgaacccgggaggcagagcttgcagtgagttaagatcgcaccactgcactgcagcctgggtgacagagtgagactccgtctcaaaaaaaaaagaaaaagagagagatagagatgaccatgacccttatatttgttaagtagttctttcaaatacattcttttatttgaaactaccaagatcactatgacttaggcagatagagtattctcattttacagatgaagaagaatgatactgacctataaaagaaatgaattggtaaattttaataatcactcatctttctactactttttttctattttgtcaaggaactaagatctagatcttgggatttttgcttttttttgagattttagaagttttctttatggatttaaggggatgaaaactgaagaatattttattagataacttgacaaaagcattcttgatcgtttcagttcttcacatgtagtggaaataagacatgataaagttatttgtggacagtattatattaacatagactagagggagaatttgaataaaagatgtaattcccctctgatcttgtcttgaatctgttaactttacaaacttcatttatcttctgaagtaggtctaaaaattgggcttttgttgtattgtctaccatcagtatctacacaagtcatcgcaaatttgtctctgctagctatttcatcaacaaaggttttgaaactggctatgttaattgttctgtcattaatagctgtctgaactaagcacaaagccagcactcatcagtgttatctaaatctaattgcttcagatttagataaatgacaaatgttacaactttgaacttatcataaacctgggtaacacaacactgttaattggacaagatcagattaaaggacatagaaataataatggtgaggacatgagaaaaacttaacaacagctgacacacatgttatagctaatagttatgttattgtgtaacaggcactcttttaggggcttttgcatgtagtaacattttattctatgaggattatatttttatttctatttttcttatgaggaaacrggcattgaagaatattaggtaatttacttaaaatcacataacaaattactggtggaatgaggatttaaagctaggcagtctgacttcagaatttattgctcttaggcacttaatcactgttaaactttctacacaaaatttatgaaatttcctattgtgaaagaattacatttttgccttttggctgcttatttcattgtgttagaagtattttctttgataagagccaattcttttttcttttcttttctttttttttttttttgagacagagttttgctcctgtcgcccaggctggagtgcaatggcatgatctcggctcactgcaacctctgcctcccgggttcaagcaattctcctgcctcagcctcctgagcagctagaactacaggcacgcaccaccacacctggctagtttttgtatttttagtagaaacggggtttcaccatgttagccagtctggtctcaaactcctgacctcaggtgatctgcccacctccgcctcccaaagtgctgggattgcagacatgagccaccgtgcctggccacgagccaattcttttttgttccagttttatatgctttaattgaactaccaaatattaaacctggtattgaaatttttaattttttagaatgacttagtttttcaaatttattttattttattttattttattttatttttttgagatggagtgtcgctctgtcaggcgggctggtgtgcagtggcgcaatctccgctcactggaaactccgtctcctggcttcacgtcattctcctgcctcagcctcccgagtagctgggactacaggcacccaccaccacgcccggctatcaaatttattttaataatagtgaaattcgctgggtgtagtggcacgcacctgtagtcctaggtactcccgaggctaaggcgggatgatcacttgagcccaggagtatgaggttgcagtgacttctgattgtgtcactgtactccatcctgggcaaaagagtgagaccctgtctcaaaaaacaataacggtggtactccattttgtatagttaatgcatctatctggttatgaaagcagaatgcttttagcagatctgactttcatttgtcaaaatctttaaaaaatttttcaaaaaataaatgagtaggacaaaagttttttattgcatttattaaacatgtttgtatatcttattttgctttgggttggtccaaaaatttctttgtgtatacttaattttagaagaaaaactgctgtccagtacatagaaagcagtgattcagaggaaattgaaacaagtgaattgccgcagaaaatgaaaggtaacatgtaatagatttgatttgataatgtgtcctatattctaatgtcctgttttgcccatttttatgtttatttttgttttatttttaggcaaactgaaaaatgtacagtctgaaactaaaggcagggcgaaaggtatgtgtatactatatacccataatctagacttcaagattattaaagtacagctycattgatttgtatctcgctaggttggaatgttttagtaatagctcttaaacttggctgatgtttacatttgaactcttcatggagctaaccatgggttttaaattaattttgtaaaggaggaaaagtgaataaatagttgcaaattaaaatctaagggataataatatttaaactatacttaaaacaattttctactacctataaaatgacttcrataaaacctatgtgtgtagtatgaatagtaattacaaaattaggttgagaatgtcttcctggcaatacyattattgtttacattattatacagatgtgaaaataatcaaattttttctttttctttaaaatatgttttattttcctgtaattcacatcatactatatttctcattcgttgagaaattgtattgcatttggaaaataactgatcatcttgactgatctgaaaatttggcagccttatcattaggaatcaaactgtttgtttccttgaaaaattctccttccacctgagagccgaattactttgcatatgactgctcctactttcatttcttctcctcaagtcttaccatgaatgactacatcgtttctctgagttgaaaagatatccttagtgtcagaggtagtaattttggttaccaaatattttaacttaataatataagctcttacaatagagggtgaaaatgatattctatttcttacccttagaaagtacctgtactctagcacaggagataatttgaaaaaaatttaagattctttgttgttttatcagcaggatcttctaaggttatagaagatgtggcatttgcatgtgcattaacttcatctgttcctacaacaaaaaagaaaatgttgaaaaagggtcagtaaatatccttgttttctagtttttggttttttttctgtttttgaatgaaaaaatttaaaattttaagttataaaaccatattacaagaagtttagaaaatagagactattttttaaagtatataacccattaaaagaacaaagctacctcataatttgttttccttttggtgcattttcctactgtatttgttttagttagggccaaaatgtgatgggggcccttactcctctgaatagcagagatatttcttctagtgatggcacaaagcaatttgtggctgctttaaagcttaatttaattttggttaatttaagttaaaggtttaattttttggtattagaatttgcttttcattttaaaatgttagtgatctttgttatgattttatattttgtaattcataggaaaacaacactgcttaagagactaaatatttgagatgggaagagattgaactaaggttgagaagatctgagacaaattatatctctgccccttggtctccattattttacatgttggggatatagcaggctatctgttttcatatagcatatgatgtaatgatgagagaaatatacaataagcaagtcaatataattttaaataatgagaagtaatgtgaagaaaaaggaggataatgaagtaaagattgacctgaaggggcttgtttatgaagctaacatagactcatgagaaagagccgacttttggtccaagaatcagataattaggaatagaaaatataggcatgttgggtggattattctttaccctaattttagaaatttaaagaaatgtggaaatttcggttgagatagaattaaattacacattagaaaccactttcagttgcagatgcatagctgtgatacaagagagaacattttcaaagtcacagctgtgtgtcattttggttttaaccaaactaagtatatctttgaaagagaagcagaatagaaacaaaactctgtgaatggagacagaagccataatcctgattgtccttgtggtagatagtgatctctttagtaagacacaaaaggtcataaggaaaagattgattaaatgccactacattttaaatttccatgcatcaaaaggtgccataaacaaagtaaaaaatgataaaactgaagaagataatgtgtattaagtgtaactgacaaaaggttcaattctagactatgtaagaactttccaaacaattggaaaaagaccacccaataggagaatagtcaaaggatgtacatatggagtccatagaaagaaaacccaaataaccagttaacactggaaaaaatatgctgattcagaattattggggagatgcaaattaaaggaatagtggcagcaggcatggtggcacatgcctgaaattgcagcactttgggaggccgaggcccatgagttcaagatcaggggtgggcaacatggcaaaatcctgtttctacaaaaaaatacacaaaattagccaggcatggtagcacatgcctgtagtcccagctacttgagcctgggaggtcaaggctgcagtgagccataatagcgccactgcattccagcctgggtgacagagcgagaccatgtctcaaaaacataaaataaaggaatagggggatgctcttacccttcatattttcagacattaaaaaatctcacaatgccaagtattgacaaagttgtgcagcaataggaattcgtgcattgttgatgggagcgccaattaccaaggagagcaactggacaaaaatataatgaagctgaatatagaccatctgtaactctgtaaatataaataaggagacatgaaaaaatggttttcattgcagcattattttaatggaatattagaaataatgtacatgttgtccagtaggggaatggtaaataaattgtaatctactttgcagtatgatgctatgaattggttaaaatgaatacactagagctacaaatactaataagtgtaaatcccaaacacagttgttctttatctgcagtttcacgttctacagtttcagttctaaaatattatatacaataaggtattttgagagacagagaatgaccacattcacataagttttattacagtacagtcatccctcagtatttgtcagggatttggttccagggccccctgtgtataccaaaatgtgcgcatactcaagtcccacagtctgccctgcaggacgagtatatatgaaaagttggccttccatatacatgagttttgcaatcagcagatactgtttttttgtttgtttgtttgtttgttttgagacggagtctcactctgtcgcccaggctagagtgcagtggtgcgatcacggcgcactgcaacctccacctcatgggttcaagcaattctcctgtctcagcctcccaagtagctgagactacaggcgcctgccaccatgcccggctaattttttgtatttttaatagagacgggtttcaccatgttagccaagatggtcttgatctcctgacctcatgatccacccgcctcagtcttccaaagtgctgggattacaggcatgagccaccatgcctggcccattctgtatttttttttttttttttttttttttttttgagacggagtctcgctgtcgcccaggctggagtgcagtggcgcaatctcggctcactgcaggctccgccccctggggttcacgccattctcctgcctcagcctcccgagtagctgggactacaggcgcccgccacctcccccggctaattttttgtatttttagtagagacggggtttcaccgtgttagccaggatggtctcgagctcctgacctcgtgatccgcccgcctcggcctcccaaagtgctgggattacaggcgtgagccaccgcgcccggcccattctgtatttttaatccacgtttggttaacaaaaatttgcatgtaagtgcatcacatagttcaaacatattgtttaagggtcaactgtatattgttataattgttctgttttattctttgttgttacgaatctcttactgcacctactttataaattaaactttattgtaggtatatatagggaaaaaacattatatatagggtttggtactatttatggttttaagtatctattgagggtcttggaacatacccccagtggataaggagggactactgtagatagcactgagagaaaaaagcaagttgtgaatgatacgtagatacagtatgatactttgctcaccttccagtttaattttgaaattagtgtgaaaatacaattttttaaaaactcagaaatttgcattttaagtttactggaagatactccattggtaagggataccatctctagaatttatttcaagaatttgtaaaaacactttattatcactatttttaaacatgctccacagaaaagtattaagaatttttgttgtaatatattagttacctattactgtgtaacaaattatcctaaaacttagccatttaaaatcagacatttattatctcacacactttgacagggctggaagtcggagtggcttagctggatggtttaatggcttatggtctcttacgaggttgcagtcaaactcttcttcaggggccgccgtcatctgaacattggacttagggaggatccatttccaagttcactcacatagttgtcagcagacctcattacttgctggctaactgtagtcttcagatcctcactatgtgcatccttccataagttgcctgagtggcctcacatcgtggcagctggctccaccagagtgaaagattggagagagagaatgagtatgagagtgagcttgcacacccaatacggaaacttcttttgtaatctatctcagaagtgacatactatcttctctgctatattctgttggtcacacagaccagtcctggtggagtatgggaggagattacacaagattgtgaatatcaggaagtagagatcattgagggccatcttggctggctaccaaattaaatataacacaaattcagaaaactgcataaaacaaatgttcgtcttaatgaatgactatgactatcagaaaatattagagacttcctccttgtgacctactctctgtcatagtcctttggttcttctcataatcactatgtggatttttagtttttttaagtgatgaggtaaaatttattccctgttaaaagtccatctgcttcattttaattgttcctaatttatcttttcatggaggcacattattgccatctccttattgacatatatatttcagaaaaacagctaaaggttctatcagtggttcatttttttaggagcttgtgcagtggaggggtcaaagaaaactgatgttgaggagagaccaagaacaacactgatcatctgtccgctttctgtgttaagcaactggattgtaagtctttaagccctttaaaaatgtaacataatttatattttatctacaaggtagaaagtattctgttaaagagtcattcattggggtaaatatacttggtcatcagttcgtatctaagttcaaataatcatcaggtgaattggattatgtttgctgaattgaagaaatttttctttgaagatgtgtagtagagaagaaggtaaaggaacataatcaattgctaacataagatttggtttgtatttctgcctttgctatttttgtcccccaaagtgggaaagatgtatagtttgactcctctacatttacagattgactgttggaactgtcttttctaagagctataccaacaataacttatttttataacaataacaacagttagtgaactcctgtttatttggtttgtccttaacctcttttaaggatttttctcatttaattctcataactgttaccctgattttccaggtgcccacattgaaacacagagaggttaagttgcctaaggtcatccagctaataaatgatggatcttgtatatagtctccaacattttgaatctagagcctgtccttttaacactacccatcagaaattttttttttccagattgcttttctgttctgaarcattgacattggaatggaacctcttgattaattgtttatttgcagcctggatatgttttcttcctagtttgagcttcaaacttcttgttatgatgaaataatgactctcttggaatccctgtgaatataaggaccactcaccgttcttgccacttccaagttatctgtttatctctcatcgccattyttcttatgtcagaggaggaagagatcctactctttttaagaccagtatttagtctctacattggattctctcttttcccacattgctcatctgttcttttttcccttgtttatttagtctcttcccactggctcttcctgatacatactcaggttttttcattttaaaatacattctcttgatatgcatctttaaaagttgctactcttctgctttccttcactgtcatactcttggaggttaatttctactttgtgcttttacttactaattccttaattcattgtaatctggcttgtaccattagttctctaaattgcattggaaaagactacttgtgatagtytaattgtcaaatttagtggcctcttcttggctttatagtctttttttccgtgacatgaattatctttttttatataagtttttggtttatttatttattttttaaattacaccttgtcctgataagtgtatcatttttcctcttaggaccagaagaatgaatgttaatggtctgttgctatttttttattccaacgaaactgttctttctttaatttgttgtttgttatgggaaggatagtacatgggtacttgaatggcagttttgggatgaggtttagagtattaatggaggtataaactatctaactgattatttgagggcttggggtatagagatgtatttttaaaatgggtaatcagtatttaattataattttatatttaggaaagttcaagtaatgtaaagttcagaaaggaaagtgtggcaaaatcttgccaagtgagatcatgcacactctgtgaatttaaaggaatgagaggtggtttggcatttagggattcatggttgtgttagtccattcttgcattgctataaagaaataactgaggctggataatttaagagttttaattggctcatgatactgcaggctttacaggaagtatcrtgctggcatctgcttctggtgaggccacaggaagcttacacagcctcaggaagcttacactcttggcagaaggtgatggggacccagcatcacattgccagagtgggagtaagagagagagtggagaggtgctacaaacttagaaacaaccagatctcgtgtggacttagagtgagaactcactcatcaccaaggggatagcactaagccactcaggagggatccaccgctatgagccatacaccttccacctccaggcccctcatccaactctggagattacatttcaacatgagatttggaggagatgaacatccaaacgatttcaatgatcaagaattaaaatttcacaatctgaacaagataccgtcttcctggctctcaagtaaaggatctagcattctacagagcaggctagaactgacttatattcccttttttgtcttcaaataatccaggtaaaggaatagaacctgggtaccaatcctacttctaccacatatttgttctggatatttagacaagtaatctcatgaaataacacctatttcgttttctattgagaggatgatacatacatacatatacagtagagcctaacactgtctagagatggagtaactatagttctctccctttattctccagaaaagctgattttcttctgttccaagtgtaatccctttacaaataatgcactgtcccatttcaaggccacccattgattcagttttctcatattggattctttgtcatgctggattctaatttccttttcttctttaccaaatttctataagaaattctttgcattttcagctttactttttcatgttttatcctctctgcatttttgcctttatttcatgtttaatactttcttcagtccttggtagtctggtttttgcttccactcactacagaaactccctttgcagagatcttcagacttcaatattgccatgtacaatgagctccccttttcctctgccttgaatatgttattcatttattatttgttatgtcttattttgtaagctatctctaaaccttcttgtaaagaactggaatgaagatagatgacaaattaaaagtccaccttggttttttttcttgaaacttttatattctttggatcccaggcctttaccctttatatttgttgtcctaactttttctctgtctttgttctggttcctattaaatctgtcttttctgtatttccatacaacatakaattttttaaaaagagtattttaaaaaattttaatgagatctccatctactcatcaagattcaaaaattaccaaaagtctgacacatgtgctttcctttttttctttgctggattgatttttttttttttttttttttttacagtcttgctctgtcgcccaggctggagtgcaatggcgcgatctcagctcactgcaacctccacctcccargttcaagtgatcctgctgcctcagcctcttgagtaggtggaattacaggcacatgccaccatgcccggctaatttttgtttttttagtagagatggggtttcaccatgttgatcaggctggtctcgaactcctgacctcgttccgcccacctcggcctcccagtgttggaattaacaggtgtgagccactgcacccggccttttttaaagaaagaatctcattccatcacccaggctggagtgcagtggcacagtctcagctcactgcaacctctgtctcctgggttcaagtgattctcatgccttagcctcccgagtagctggaattataggtgcrcatcaccatcaccaccatgcccagctaatttttgtatttttagtrgaggcagggtttcgccatgttggctaggctggtctcgaactcctgacctcaagtgatccacccgccttggcctcccaaagtgccgrgattacaggcatgagctactgcacctggcctggaatatttttaattataccccaggcatcatgtgttttctcccaataaaaacaagtcttctccttacataccggtattctgtagactctgtccctaacgtttgctcactgtacatgctctctttaggaaatttcattcattcttacagctgtaaatactgtctgttgttaactttaaaattcatatctacacctctcacttctatctataggtaattatttacattttcctagtatacgtcttcagttaggtattctatagtgaccaaaaatgataaaggtctaaaatattcatctctttcttacttggatgcccacttttcccttcttttttttttttttwaaacttccttatatttttatcacacaattctaggtagtcattcaagtatcagagcatcttagtcttattattattattcatatttcatatttcattagtccccaagtcctatcagtcttgtcttagtttctgtttttcacacctgtcctttccaccctgttcctacttctaccttgctggtttaggacttcatcatctctctcctcatagcttcccagctgtgtctccctggtatcttctcttttcagtttaatcagactatttttttctgctgaaaatcttctaggtctggtttttttcatgattaaaaaaataataataagtttttaaaactgatcatgtcctcaagaaagtcagggatgattatttgttcttcatttttagttacatcactattgtggttgatacctggcaaatagtaggccaataataaatgagtgaaagaaagtggctacagtgcttgaatctctgcccacatccttggaaatattggttgttgttcttttactgtttaatttttatattattaagtctgctaactaatgcagcattaaagggccttctaattaaaatatttttataaaactcattattgttttcaataactttggtttttcctcctaaaaatgaagcagttgctgattggtagggccaagtaaattttaaataatttattattactgtgtatgtgtcatttttcttattgttattattttggtctagactgaaggaaacttgatttcatacaattttagtagttggatttgtcacactactgccagggcagttacttttttatacatctattaagtctgacacaaatctgctcattgttaaaaatattcctaatttttctttaggaccagtttggacaacatataaaatcagatgtacacttgaatttttatgtttattatggtcctgatcgtattagagaaccggccttactttcaaaacaggatattgttttgactacgtataatattttaactcatgactatggagtaagtattgttgatacttaacagatcttttaaagattgaatgtaagaaatatgccacaggtttctagagtgttccaaaattcaggctttatactttttttttctctttagatacttaacgatatatagaaaaataaatggtttttttttttgactttttgcgtgaaagggttgcattttatttagatgctaatttaggagtatttttcttttctccactcctcccctccccctccctctcgatggagttttgctcttgttgcccaggctggaatataatggtgtgatctcagctcactgcaacctctgcctcctggtttcagatgattctcctgcctcagcctcccaagtagctgggattacaggcatgcatcaccacactcagctaatttttgttattcagcagagatgaggtttcaccatcttggtcaggctggtcttgaactcctgacctcaggtgatccacccaccttggcctcccaaagtgctgggattacaggcgtgtgccaccacacccagacaggaatatttttcatttagaacattttaagttaagattttaaatttggattgtaagtatatgaagcaatttgtaaatgaattttattttcttttttaatattctggaaaattgttttctatcacaatgatttgattaatatctcagtttgaaggtatgctttttttgtagttacagttcataagttttccagttagtctaattgttttttacctttataattccaattgttcaaaagttaaaactttttgaaaaataccttgctatcaaaatttcagtcttctagtaaaaatattaccttttatataaaagaaagtaatgttgaattcaagtaattcttamaactgccattttctatatcattgctatgttttaatccgagrtagaacagttcagtgtattgaccagtgactcaacagagagctagactgctgcttgggtttgaatgctagttctgccacctgtggtgctttgggtaacatacttacttagcagtttgtgcttcagttttcttatctgtaaaattaggtgtgctaataagtacttattttataaacttgtgagtattcaataattaatgtagtgcttaaagcagtacctagcacatagtaaatttgatattaaataatgataacaactagttagcaaatcatattaagtactattttactttcctgtgttttttaattcatataaaacatttatttcagactaaaggagatagtccattacatagcataaggtggctaagagtgatcctggatgaaggacatgccatacgaaatccaaatgctcagcagacaaaagctgtacttgacttagaatcagaaagragatgggttttgacaggtaatcatagcattaaacttactaaamccttaaatctctaaaatatatcattatgtaagttagtaaagtaactttgtaaacttaaagtgggtgtaaattctgccccaaaattaatcatataaataatttaatcaaatgttttgagttgttcttcataattgcccgtgatataacaacatttgacttattgataatttatggaacagtcactagacttattcttgaaccttggaaatggagtagacactctagtggaaatggagtagacactctagtcatccagtcataatcttgatttctgtttcccatcctcaaacctgtttgccattcacagtacctttactagaaggtaaggaaaagaatgtaaacttaaactagttgctttttccttctgctagtgctgctgctttaaaaactaaataagcagatgtacttgataaggagaaagttgaattttccagtctttttcttggctagtgtgtcatgtgagagctaaaaattagagcaaaactgtatcttgagatgtgtatatttttaataaatgattatagtcaacacttgatagtttaatttaattgataatgatgagcctggtacagagtgcccattttcaattgttgtcttctctgattgggccaaatagatactcttactggatactctggttaaagagttataacagtttcctgttatttctaggtactccaatccagaattctttaaaggacttgtggtctcttctttcctttttaaaacttaaaccatttattgatagagaatggtggcatagaacaatacagcgtcctgtcacaatgggagatgaaggaggacttaggtaagtactttcagacagtgattaatattagttacaaataactgttagtagcttgaaccagttggcactttctttactattttaacttgactcttaacttttccttctaaaaagtgtttatggctcagtacctttgtctttcagaacctagtgatgcttgtttggaaagacaaagatttctaattgtcgataactacccttcccctgttgtggctaaactgaaaggaaagacataactgttttttgtgtgttgctaagccccaaagccccaaaaccagcattaacagatttagcaggaaacatcgtatatcctttgaggatctaatatgcattaagttttcatatcttatatagctttatttatttatttatgtatttatttatttgagatggagtcttgctctgtcgtccatgctggagggcagtggcgcgatcttggctcactgcaacctccgcctcctgggttcaagcgattctcctgtctcagcctcccaagtagctgagattacaggtctgcgccagcatgccccgctaatttttgtatttttagtagagatggggtttcgccatgttggccaggctagtctcaaacttctgacctcaggttatcctcttgcctcgacctcccaaagtgctgggattacaggcatgagctaccacacctggccttacatagctttatatagtgaatgatgtgaggtaccatgaccttagcaaaagttgtataggaaagttttatgtggttgtttctggtggagatagataaaagttgagaacataaattaaaactcagtgatagccattttgcaagatgtagactaatgtggttcaactttttggctaaagcaccggtttatagactgaagatttgagagctattagtgggatataaaatcattataaaggtggtagccagcatttaaaaagacaatgaaatagagaagagattagtaaatatcggagtgcatgatacatagtaagtattattttgtgaaatatttgtttcttttgtatgtgtttgtatatttttgctggatagaatgtgtttcttactgtgagttatagtgagaaagcttcaagagccactaacctagttggcagtactatccacttgattcctcaaaaccaactatttaaactccaggaaattgtatttatatttcaatgttgggaaaaaacaagaattgatacatctctttttttccagtactgagaaagaaatgtaaagattgtggaacctgtaaagcatttttctgtgttctgaattaccatattayctttttattttgggggcactcattactttatacaattacttatttatatacttttgattttaatattacagaatgtagtatcttacccatatttgtattcttacaacatttaattcagtgcctggcacttaatagatacttagaatttgagtgttgactattcggtgatggagttgacaggacagttgagaagtaaaagagttagtgattggaacaaaaatggggaacagaacttasgaaaataaggacaggatataaaaagattaaactatgttaggtattgaggggaaatttccatacatttgttttaataattttatttttgtagaatacttctgtgattatcagattggttaaaatcccaaataagggattttaaaaacacttttacagaagctataaaacagtaacaaattaaaatgttctgtttcgttcttcttggatcaatttatntagaaattaaaagttacataattatttgttttattctgattaggcgtttacagtccctaattaaaaatattacacttagaagaacaaagacaagcaaaattaaaggaaaacctgttttggagttaccagaacgtaaagtatttattcagcacattacactttcagatgaagagagaaagatttatcagtctgtgaaaaatgaaggcagagccactattggaaggtatggagaaagaaaaccatgttaaaaattagtttttgtttactttgtttcccattcactgaatgacattatttagatgtgttagcaatagtttgaagtatactgaaagataatttgcttctatgaattacagtgttttttacaaatcaataaagtgaatgaaataatagtataattcaccaggtaagtaattttttaagttaggaaataatttaaagcttactttaaatgacaagttctcaattgctagccagaagattttgcttgcttctatttccaaaatcgtatggaaatctggaaataggaactgatgaaataggtttaacaagaagattaaggattggtagaaggtatgaaattytggtccaagcaagatcaggtttaatgtgagcccacagggaacagaatgaataagagacaagtgaaagcagaataggactgtgaaaggggaatcttcaaaacataaaaacttcagtgaggtaggtacaaagcaggtttgataggaattagagagagtgggaaagattgttctaagcagcagatttctgagttcaaaatcttctttcttttcatattctttcaacaaaaatttattaagtgcccactgtgtgccaggcacttatacccattgggatacagcagaataaaacagacaaaaatgcctgcactcgaggaatttatattttaatgggaagaaacagataatttaaaaacatgattaagttttaaggaataaagcaacgaaaggggatggggaatgccaaagctgttttagtagggtattaaggaagacctcactgagaagatgatatataggtaaagatctaaaggagattgggattaaggggtgtttcagccagaaggaagagcaagtgtagatgctcccagttgggaacatgcctggtgagcttgaagaataacagagaagcaagtgtggctggatagtatgaacgagagaaaatagtcatgatatcagagatttattggaatgggggtatgtaacgcatatgtcaaggactttggcttttactttttaygacaggaaaccttaaagggttttgagccaggagagggacgtaatctgatttatatttttaaaagatcactctggctgctgtgctcagatttaggttatttgaataggaataaggtcagaagtagggagaccagtggcagtcaaagcaagagatgatggtggtttttaccatagtagtgataaagggagtgagaaatgattagattctgttaaattgtgaacgtagaaccaacagaacttgctggttgatatgttatggcatgtgaaagaggaatcaaagataacttcaagcctttttacctgcataagtggaaggctggaattgctgtttaccaagacaggtctatgggaagagcagagatttttttaagctaagatcagaagctcagttttggacacattgatcataggatgcccgtgaattttccaagtagagatatcaaataattagttggataggagagtcgagttcaaagtcasctatgtgtggatggtaattaaagccatgagatcaccaagggagtgagtaaagtgaaagagatctaactgtgaagatagcaatggctggtgaaataggaggaaggaagcttctaatatttagcacatggtaggcactcaaaagagatctcttaaattgaaatgctgagtatcagtaagatatgaccatgccagggaataattagtgttagtaaaggttattctatttgaaaaagttgaaaaagattaactttattgaaactgttctcagaaaataagttatttttaaagtattctttttaataggctatatatttactaacatttatttagcactcactaggtgttatacattgatcttagtgctttaaatgtattcacagcaatcctattaggtcagtataattatccacatcttataagtgaggaaactgaggcacagagcagtttaggtgacttacactgttgtcacacagctagtgagtgacaggacagattaactctggcactttggtttagagcttgtaagtttaatctttgtattattttgcctattccttgcattcttgaatattcagaaatgtttgttgccataatactaccagtactaatactagcaacagattcatgtatagcacttaatatagtccaggcactattttaaatactttacatrtattaaattaaataacagtagttgtatgaggtaggtacttttacaatgccactgttagaactgaggaagctcaagacataggttaagcaacctgtccaaggttacataattaaattggcacagccaggttttgaattcatgaccagctagctctaaaaatttgtactcttagccgttaggctatatttcttctgttgccttaaaatacttaaatatcagatggcctggttatataatttttggatcacccatttccttaagaatctatgttgtcattgtaccmctgtattttgtatagaatgtttctgtggggaagcctggttttttttttttttttttttttccctctgaagttcagcaacttctttgttgactttcccctgggacatgtgatattatttaaatctttagattccaggcttttccccccttctctttcctggaaagctttctttaaatattgttttctgttccattattttatttctctctgtgtatgttagatgtcttttatctgtgttccataggtatcattttatttctgatcttttacatttttttgtttaattttgattttctcagtcctgtttcctacatccttttctatgtttttatcagtgactagtctttttttatattggcttatattggtttcagtgtgactttcatttctctgatgattcactgttttctttcactttcttgagccataccagctcatctttcatctcttcctgttctcttgccatattttttcaaagctctttgtctttgctttaagattttttttttttggaggaattgttttattgagtggtgttaaattgtgacagtatccttggtcataatttttatttgctctgtggcaacatttttctgctgagttttctttcactgccatgtgtcccctacctttgctctctgctgattattacttatatttgaatatcttgagttcttcttggactagctatttgctagtccagatatacaaaagggaaaggtcacaatcatgtccccgaccagcaggaaataacccaatttacttaagactcagggttacatgttgagttactttaggttttattagtacacataaacagagatcagaaactttaggggtgcttggagtgtagagtgctgtgcccatagtctttttttgaaaatacagtgcacctgtatgtttctgtattcagtttaccttccctctttttttgatataaatttctccatggaagctcaagtcaccaagcatgcaccctgttcctgtttctgcacatgagaggtattgattttccmctcagggcatgccatccattttaaagaattgtrttttggcagctctgtttgagatctgcagtcatccctctcagcatcttcctatctgacttasactgcaattggcagccatttctcatatattgtgccttattgttatagatctctcttggttttattagagttgcttttctgcttttcattcttgttttggagtaatttctagagaagaaaagaaaaatgccattttactctgctgttttagaataggaagttattattgtttagcggacttaataatatttgacattttaatctctaggtattttaatgaagggactgtcctggcacattatgcagatgtcctgggtcttttgcttagactgcggcaaatttgttgccatacttaccttcttacaaatgcagtgtcttccaatggcccctcaggtaggtaaatttgattgcttcatatcattgtatttgtcagagatacttaaataagagtgataaattttttttatgtggcatacatttagtttattttgttctgtcaaatggagattgcttttagtgtgagactcagctaggaatacatccaataatttttttaccaatgaaatggaattataatgaggtctttccaggaattccggtgatagataccctttgatgaaagattcatattggatctgccttttattgtgtggtggtatgttattgtcatgttataatgatgcttctctatgaggtatattatgtgagttggctactattttggcttctgaatgtttcttaaatttcaaatttaaattatgctttttgcctatggcagaaaatgakgagagactttccctactggcaagcgaaactttyccttataagatagattaacttgtcatattacaaaccttgctctgaaattaatttttcagccttttctctaggaaatgatacacctgaagaactgagaaagaagttaataaggaagatgaagttaattctgagctcaggttcagatgaggaatgtgcartttgcctggattctttaacagttcctgtgataacacattgtgcrcatgtattttgtaaaccctgtatttgccaagtcattcagaatgagcaggttagttttttgctcagtacaggttcagtgtttgatagagyagtgtacctgtctttaatataataaaagatagtatatggagttttgcacttggatttaataatatacctttgatagttaattattccagtattttaataggtgatatatttcttctaatgcaacatttgcaacataaaaagatgttcacagtcaatatcttaattccgctgtttatatcattgctgttcaataaatggattgataatgtgagacacaaagataattttcagttttctagtagtcatactcttaagtaaaaagaaacattaagctaattttaatacatttgtatttaacccaatatatctaaaatataaaaagtattaatgtgctttttacaaaaaactaaatcttcagaatttggtggtggtgtatacttacagcacacctcaatttggcttagccacatttcaaggacgtaattgccccatgtgattattggctattgtgttggataaggtaggtctagattcttttgtgtggtagaatttttttgaagttgactagtctgttaagcagtcattcagctggggtagaatttttttaaacattttaaattgatatataacatatgtagaaaaaatgtataaattcataattaaatagctcagtcaattatgaggtaaacatattcctgtatctgctgcctaggtccccttgtggcccctcccaaccatttaccctctccctcttccccaaaagtaaccccactgtattgacttttaaataattttagcttcagaattatttaattgtaatggtgttttatatatagttatttaagatataatcttattttattaacaggttcaaacgggtacaacagatgttgctttggaatgaacttgataggatttaacagatcctagtagctttataagctattataagctttataagcttaatagctttataagccattaagatggatttttttttaaagaatagtactaaatagtgtagctgtattgtatttaggttcaataaattgttattcatagattttttttttaaacttgcttacaatgttataatttttggtttcttgctcttgcttctagctagtccagatcacatacttttgctccctcctttatccrttctacttaccacattatgtctggagttcagcatgttcagatgtctcttaaatggatgaaatccattaaaaggtttaataaaatgttagctatgagagatacagattttagcatacatttaaaaatttttaggcatatttatatttgttcttctgttaagtgttgctcatacttcsttctttcttatatagccacatgctaaatgccctttatgcagaaatgatatacatgaagataatttattagaatgtcctccagaagaattagcacrtgacagtgagaaaaagtctgatatggaatggacatccagttcaaaggtaaagtactcatgtgcaaatatttgagtatttgttttacctttatataaggaaatatacmcagtatatcaaaatcgtaattctgctttcattcctgtcattttagtgttctgttgttgaccactggctttttatttttagtggtgaatttgaggggaaatggaatgggttcagattattagagtgttctttcagtcttaattttttgttttaaatgagtagtcttttgcattttagggaaataacatttcaggaccttttctttatgataaaaacttttagactaattttactgatttaaaatggaatctaatggacatcttaatattttttgcagattaatgcgctaatgcacgcattgactgacttaagaaagaagaatcccaacataaaaagtttggttgtttctcagtttacaacattcctgtctttaatagaaataccacttaagtaagttccacagtgtttttcactttcagtaaaaggattttatataatcatattgatttggatagcaaaaaaaaaaacttaatttgttttgccagttttagtcattttatctgaaagatattcagagtcacaatagagaatacttcctggcagcacaagaatttaaagattaagtcctgaatttatcagaaaatgactgactcagtgcctagcatattaataagtgttcaataaacatttgttaaaataaatgagtgaaagaatttattgaagagatttgtagttacttaactttgttttatttttataataatagtgtttgttacttgtctcttttcttcccccctttagagcctctggatttgtgtttactcgtttggatggttccatggcccaaaagaaaagagttgaatcaattcagtgttttcaaaacactgaagcaggatctccaactataatgcttctgtccttaaaagcaggtggagttggtttgaatctgtctgcagcttctcgagtgtttttaatggatccagtaagtagttytgtaaattttttcagaatcttagtacttctttcaaaaaaataagacaaaaaactatttggtaaataccttcatagttataattaactgtgaaaattcttaggcaaactttagaaataaataacaaaaacttagtaaatgtggattaagagctttctcttaagcactttactgaaatcctcacaacatccttatgaggtagataccattattaaatgctctgttttggccaggtgctgtggcacatgcctgtaatcccagcactttgggaggccaaggtgaatggattgcctgagctcaggagtttgagagcagcctaggcaacatggcaaaaccccatctctacaaaaaaaagtaccagaaaagttactctggtgtagtggtttgtgcttgtagtcccagctacttgcagggctaagtcggaaagattgattgcttgggcccaggaggttgaagtttcagtgagccatgctcctgtcactgcactccagcctgggtgacagagcaagaacccgtctctgaaagaaaaaaaagaaaaaaaatgctctgttttactgaagaggcaactgaagcacagaaaagtaaataatgtgcccagtatcatacagttagtaataggcaaaaccagaatcatagtccatgtaaatatttaagtactattatgctatgctattctacttttcttctataataaatattaactgtaatgctttttagggtagtggttcattcagccagcaaataatgagatcctgctttgcgtcagtttttataggcactgggaatctaactataaacaagatagacaaaatgattaccatcacggttctagtagtcttaagctttaatgtgcataagaattaggtaaaatgcaatttcctttgcattcaacstagagacttaggagttctaggattagacccaggaagctgcatttttagcatatatcataggtgattgaggtayaggtggtctaggatcacaatttgagaaacaaattatcattaatggaatgttctgagtacgttttaatgcctaatatagtgcagtcagttgtggttgtgtagtacaggcatgaaggtagaacagaggctaaaattcactttgaactttactcaccaagctgtgtgacctggacgtgcattcacataggagcgtgtttttctacgtgtacaaaggggctgtttggcctgagaggaccttggactaattcagtttctaatttgcactgggtactatgtgggctaaaggcaacmctctgctgtttctgtgcattcagacttaagatttgtggttgtaacttgttacctgaaactcagaagatttttaacatgtaggaattctactgagatacatgtaggaatactactgagatataaattttagttacttgggtgaggctaccttgttgatgcatatatgtttactcaggcttcctttttcctccctcaactgacggtatccttctcagtaagattataactagggtcatcatacttaggccttcatgggtgaatatcatggatatggtatggtctgttgtattttcttttttcttttttttttttttttgagacagagtcttgctctgtcgcccatgctggagtgtggtggcacaatcttggctcactgcaacctccacctcctgggttcaagcggttcactgcctcagcctcctgagtagctgggattacaggcacctgccaccacgcgtggctaatttttgcatttttagtagagacggggttttaccatgttggccaggctggtcttgaactcctgacctcatgatccacctgcctcagcctcccaaagtgctgggattacaggcatgagccaccgcgcccagccggtctgttgtattttcttgcctttgtactgtggatgaagtttgaaatctttgtttgcagtattttatggctactataaaaaatatttgtaactatagattgttgaatattaattaatccagtgataattctagaagctgatttttagaacaaatcccaaattttatttttcttgcttataatcttagtaccaaagaggttaataccaaaataattagtatgaaaaagttgatcagagactaaacgtgttaacagtttttaaaaatttacagaacgttttagcagttttatagtaagttgagtgttcttcattgaacatatcaagctttccaatgttgtttctaacttaaaagtcaggtccgagaaacataatgattcaataaaaaaataaaaatttgctcatgaaagtcttttaccattaaatttttttttctttttttaagagacagggtcttcctcttttgcccaggctggtctcaaactcctgagctcaagcaatcctccctcagcctcttgagtagctgggattacaggcatatggcactgtgcccagctttcttttaccttttcattgaacattgtataagtattggggtaatatggcctggcgcggaggctcatgcctgtaatcccagcactttgtgggaggccgaggtgggcggatcatgaggtcaagagattgagaccatcttggccaacatggtgaaaccccgtctctactaaaaatacaaaaattagcggggcatggtggcaagcgcctgtaatcccagctacttgggaggctggggcaggagaatcgcttgaacccaggaggtggaggttgcactgagctgagatcgtgccactgcactccagcctggtgacagagcgagactccatctcaaaaaaaaaacctcatagttttaatttaaaatttaatgatccttatccaaacaattcatgatactatttaaaaaccacttaccaggggtctatatctttttggttattcttcccttttcattgttgcaccattttattgctgttgttgtgttttttgttttttgtttttttttgagatgtagtctcgctctgtcgcccaggctggagtgcagtggcgcgatctcggctcactgccagctccgcctcctgggttcacgccattctcctgcctcagcctcccgagtagctgggactacaggcgcctgccaccacgcccggctaattttttgtatttttagtagagatggggtttcaccgtgttagccaggatggtctcgatctcctgaactcgtgatctgcctgcctcggcctcccaaagtgctgggattacaggcgtgagccactgtgccggacccatcattttattttttagcttaaaacagttctcatgatcatgtctgtgttaattagctaatggtactttttttagctcagctttaaagtcaaactaacgtcaaatactgatacagaaaatagcatcaacaaaaaaataatttttaggacttactgactcttaaaacccccttttttttttttttttttttttgagacggagtctcgctgtcgcccagtctggagtgcagtggcgcgatctcggctcactgcaggctccgcctcccggggttcaggccattctcctgcctcagcctcctgagtagctgggactacaggcgcccgccacctctcccggctaattttttctatttttagtagagacggggtttcactgtgttagccaggagaaaccctttttttatacttttatttcatgaacagaggaaagtgaaagaaaaccagaaaagggggagaaaactaaataggcccaagaattgtgtcttttctcatataaattaagtcatttaagaggatgtataacctttttctgctgttaagcacacatagattcttttaaaaatgaaaaaaaaaaccaaattgattaatcaacaaatacttattttgggtgctgatacatatgtcggggcctgtattaggtattagaagtagtagtagggggaggatgcctatcatcatagtgattgggagggtggatttttccccagagtatttgtgatgttagtatctgacttcaggcagaaaactttcagtcagaaaaagatgaatgaatactagtgaaatgaaaggacaaatgcaaaacactgaaagatcagggcagtagtaaagtaactcatccatgttcttgttaggcctggaatcctgctgctgaagatcagtgctttgacagatgccatagacttggtcagaagcaagaagttatcatcacaaaagtgagtttttaaacaaactattttaagactaggttgatacgatttttacaattaagcaagtaatgcatgaatatattattatgattgagtgtaattatgcagagcaaaatataagtcacctttttcctccttcatcaataatttaatatatgctgtttaaggggcctttctctgcacctacatttatagttatgtgtacatctccttaaaaacattcttttaaagataaatggaattatactttattctacaacatatttgtttccyttaaaactatacattggagactacctcataagtacatttagatgaacactttttttaaatagtggtaaaatacaaaatttaccattttgaagtatacagtttagatgcattaagtacattcatgttgttgtgcaacagccatcacaatcatccatctccagaactttttcatcatcttaaactgaaactgtgtatccattaaataataacttcccattcctctccccccagcccctggcaactaccattctactttctttctctgaatttgactactctacaaaaccrtatagatatatcgtaatatatttaacccattaagttttttgctaataaaaacagtgccataatgagcattattatatataaatcttttcacatagatgcaagtaattctttgggataagttaagaaaactagaattctggatttagaatttttatcaactatcgagttggtttcaaaataggatttatatgaaaattgttaatttatgcttctgtggccaaaaaagtgctgttctaatttgcatttacctaaaaccttgagtatatttcacatatcttgtttattaacattttttctgtgaattatttatatcttctgtccagttctcatagttatggtacaaatagttttatagtataaaggactccctgatacagtctgacttgaaatcttttgtttatgtatgttgaaaatggtttatcccatactcttccttgtctttaaactgcatttttttggtcatgaaaaagctttaaaatttttatgatttaaaacgtcagccttttttatacgttctaggttttaaggtcttacctaggacagaaggctttattttcacattttttcaactattctgtatttacttctggttcttttggaagattttattttttgttttatgatttgtgacatgagtctaagcttattattttatcagatgaagaacgatttgttctgtcacatcattttttttctttgaaaattccaactttttccctactagtatgaaatgtcactttcatcataaactaatttatatatattacttgggtctttttctagactattctgttccattgatctcttttccttttcttagggcagtattactcttataacaactatggtttcctaaagtaagttttgatacctgatagggtaaaatgttctgattaccctttttgaaaattgtattggtggttattattattgctcttgaattgaactttagattttagttataaaatcccatttaagatatcttgagatttattgaatttattattactttcgagaactatctttctttataagtaacgaatgtttccatacaggaacatagtatcctttctccatttatgtagatcttatatgtatttcagtaaaattttattatatagctttagttattgcagtaattgggtcttcttaaacaatgttaaatagtagcagatagtgaccattcttgacttgtttctgttttgttgtagaatacttttattgtttcacattaaatatgtaaggttgagacattcattcctagttggggtattttaaaatcaagtttttatcaggaatgagatgatcacgttttatttttctctttgttagtgttgtgaattatactaaagattcattcttgaatttctgggaatagttttttgttttttttttttttttttttgagacgtcgctctgtcacccaggctggagtgcagtggcgcaatgtcggcttactgcaagctccgcctcccgggttcacaccattctcctgcctcagcctcccgagtagctgggactacaggcgcccaccaccatgcccggctaactttttctattttttagtagagatggcatttcaccgtgttagccaggatggtctcgatctcctgacctcatgatctgcccgcctcggcctcccaaagtgctgggattacaggtgtgagccaccgtgcccggccagaatggcctttttaatacaatgctgaagtcattttgccagagttgcctatatagtttgctttttttttctttattgctttgcttatcttgtgatctgtaacttctattcgtacagccatattctttatataagaaaaccatattgggtaaggaaagcaaagttcagttctattaaatagttattatagtttggtgcaaaagtaattgcggtttttgccattaggcaaatctttcatttagtttttttaataaagattttaaatactatgccttaaaaactacttaacttttttttttctttttaaagttcattgtaaaggactctgttgaagaaaatatgctgaaaatacaaaacaaaaagagagaacttgcagcaggagcctttggaactaaaaaaccaaatgctgacgaaatgaaacaagccaaaattaatgaaatcagaacattaattgacttataatttgtgggattttagtaaggtcagtttgattggatacttaagttttagaaatgagaaaaatacagagttttagaaatgagatctagagaacacgtcttctaaaaggggcatattttatattagtgaagaggtattactgacacaatttcttctatatatgaacctatttttaatgaaacttcaaatagcaataagttccgttatatactgtggcctgaaataatttgagaaaaaaggttactttgttattcagcttttcataatatctatgctgagtattttcacgtatcttccaagtactcagctttttcgtatttcaaataaggtcagaccttttatacttttgaccaaatagttattttctatgttggacacttagttatttrccaaagcctccgatttgtgatgcagtgtttgtagtccttgtaaacaatatatacagactakacaagaattaattttattgggctttcaaaaaccatatttgcattccagaaccaaatcttaaatgagaccaaagtccaggttagcacaggtttttatttttcctacagctacattgagatatagttcacataaatgacttggagttttatgttcatgaaaaaattagggattatgttaagagtactattttttccattttagttaagyagtactacactcattgtttaaatgtaacttgctgtgtctgaggtataaatatagtctgtgggagtgagaggcaaaccagtcctacccaatttgatttgaatattttaaattatggaactgctaaatagatatttctataaatagataatttttatttatgtagctttttttggaagtaactttataaatttttataattcagaagactactatatgtgagaggcgtgatatctggatggaagttgggctggatgatctccaaagtcgtttcaactcttaaagacatcttaatcctgaatgtaaacaattgttawgtgtttagaatcagaatttgattttgaacttgagtaattcatccttacagctatctgtagaattagtcatcttttttcttttcttttttttttacttttttgttaataagcaaacttatttgctgcagaatttgggttgactcctgagcatatttaaaacaaagaagctagaaatttagcagtcagattaggtaggtggttttatttcaaagggaaactttaatccaaagaaagattaattactctaacaaacaagagaagcttcatgtttgatgatacagatttaagaatacctgagacttaagagtgttggaagtcatttgatagaaagatgagatcggagacaatgttgtgttayagggcacacattgaaggtatatgccaaatctctcaccagataagtccttttctccctgtgccgttttcttgctcaaagggaacagtgaattagccagctagaatcttcctggtccctttttgaggcagtagcaggtaaggaaagggctgattttcatcaaaaccaagacctttctgcagggatgatagtggaataataatgtgggattagcccgctagcattaggagcagttgggaagttacctggtagatcaagcattacacacaaaaaatcaagttgatcagagtatgggttctccatrtagcaatacttcagtgagattaagtataaacagtttttggcaaaaaacaacacagtctactctttctgcttacaaagacaaagccttacaaactcactatgaaggtaaagggaggacagcttgcttctttgcccagacatttacaaagttgtttttaaaacacactcataagtaagtttggcaagttgtttaaaaaatgtctctttgttttgtacagttctgttagatgttgttatattttaaaagtttaatttaaaaaatttaatttgtccttcctaagaaggataaatatataaaaaagccactggaatgaaaacttcctatatgctatgctgttgtcttattattatatagaaaaataactttagaaaaatattgaagacattgtattaccacttgtgattcaaacaattttgtggttaaaactggattttaaatttaaaaatcaataaaaatttcaaatgtttattaccttcctcggtgccataattttgactttatcttcaaataaaatccttcattaattgtgacatttctatgcaagtgttacatttttttgagagtacatgaagattactgtaacagaataatgtcctcatatcctaactaactttattttgctcaatttagctggttgaaattcttgttcagaaatcaagagtgcttatttaaaatgccttgatctaaaaacattggtcccaattaatttcttcatctggaagaaaaaaaggagttgtgataatacctatatatacacagatagcactcttaatcaatcattgtacattttgtccttaaaattacagctctagaattggaaatacaaactaaccctatgtagtttgttaccagtgagtactaatgatcttcggcagtgtgtgctttgttttggggaatggcaaagacattgctgtatttttttcttgttttatttatactacttgtcaaggtttatgcattagcatttggatgagattcattaaaaatataagggcacatttgatgtttggctcttaacaaraactcaaatgtttaacctcaagtttttaacacattaacttcaaaatatctgcaaaatgtgttatacagcaggacaatatgggtataaggagaattaaggtaaacaaacatttactttatgcataaaccatagctccatccaccatggagctaatctccaaaggcatggatttgacctctgttgtgggcaagtttgtcttacaaccaaaggtcataccagccactgcaaggggataagtatatatggatcacctctgcaaatataaatcttgtaatttgaattactgttgcctttttatacattttactaagtaacccttagtattctggactccctagaaaagattttccaatatttgtatagctttacatggaaaagttagttaatacttcaccttaagacatagatcatagaaggaaaagaatgtttagttcagtgattttctagccaaataacttgacagcattatatgctatgtcttatggtaagcttgtcattctttctgattccaaaagttaataatagccttcactacttatttgaaatttaaaaatttgctgggtgcagtggctcacgcctgtaatcccagcactttgggaggccaaggccggtggatcacgaggtcaagagattgagaccatcctggcaacatggtgaaacctgtctctactaaaaatacaaaatttagctgggcgtggtggtgcgtgcctgtagtcccagctactcaggaggctgaggtaggagaatctcttgaatccaggaggcagaggttgcagtgagccgagactgcaccactgcactccagcctggtgactgactgacagagcaagactctgcctcaagaaaaaaaaaaaaaaaaaaaaaaatttaaaactatgtcagcttttccaccttagagctttgttatgctactgtgtaaaaaatagagaatgaacggtagtaaatagaaaaaattaacgttgaatgcaactgaatggccacaaaaataagacattttatatctgaagactgtgtttctgttcatcttaaccagggactcggaagccagaaagacctctgactagctaaaattttgagaagtccttctttgtaccacagcatctgacacatggaggcacttaaataaatctttggtaaatgcttcattgtacttgaagatcaatagcgactcattcttcaccagtccaaatagctagtttcagaagtcatttatcatttaatattttataattctaggtaaatcctcaggttcttattgagctcctatggtaacagccttcaaggtggccccaaccattcttgacttaagctgtctatatgcttgtatattaattcacatcaatatgaataaggagggtgactttgaaggctaagtcacaaaagctttgcagcttttgcccaatcaaacctctaaagtttcttcctgtcatggttaactgtcctgttttcttccatagaatcatttctgaccactcattttagttttaaaaggtcatcttggatcctacccttctttagcttgccatctcttacaacctagaatgatctataaatttaataaatacgcttttccattctatcattttaaatcatagataaaatactagtagggactggacccagtattgattctgacagttaggaatgactttaaggttaaaatattctaaatagctaaatacccacttaatagagaggtgcagtgtggatgacactatgtaagtttgatctcggtttgttctgatctgtcagatccatcaccatcacagaaaaacaattagattgaaatcatagataccagtttttaaagcatatatcccaatgtcaagctttacacttttttaaaactatgacaaattccaaaaattgtgaaaaattccctaatagatttgttcaagggtgtatggtgaaattccttaatttaattaaacaaccaagatacagcaataagtcttttattttttgtacagggtgccactgcaggtaaccatcagagaacacactgctattttcaaatatacagaactgaacaaaagcattttagcatgctgccttactgtacacagaaaactggtgagcatcttcagacactaaggacaggaaataaaatgggttaatgctattggttgatatgtttatgaatcactcagcagtgttgagatagcctatctttacctgaaaggagaattacactcactcactctggcagcactgggcaattctaaaattcaggtctcgtgaaaggtacacaaccaacaagcaagcaaggaacagatgccatgtctgcttctgaagggagtgactgattttgaaccaggctctgcagattttaagaactgatacagccatcttaatatcttgagtttcccttactttgtatgttggcagtcaacaaaagtgagaatttctgaaacaagctaaataggattaaaaagcagaacactgtccatataacagaattgctgcttcacaacttttgcccagttctcacctcttatcctaaaaaagcctctcatctgataagttttaatgaaaacctctagcaacygtaacagacttttctcaacccagctctagatactaagtatcagaaacaaggcttgtgaagtggatgtgttcacagaaaaatgcagtgtttctactggaggtaagtgtcaagtttcctcttgatgttgtcaaaggaatctgctcccatataatcagcctggccctgttcccatcgttccttccgttcttccgaggatacaaacggctgtgccatagctgggatctccccaagggacagatgtgatatggctcctgagacatcttcctagaaaggaaagcataattgactctatgagagctgaaaatcaaactgttttaaagaatgcaataaattgaagacagaaaagccaggatgaatcatcatgcaaagtagcaaaaactgaaaagtattacatgaaacaaacaaamaagacacaaaaatatagattatatgattttttcctaacaaaatgaagacttcttgactcagtgaaaacattgggagaacaaagtaattagggttaatctttaagttctgcatacctttctacagaagccacaagagaaagccagtgtatagaccaagtctgaaagctgcaaacagttcattagaaagtgtaagatggatgggcaagggaacacaagtctcaagataaattctcaatctgtgtgggctctgaaaggttgagaacttaaacaaaatgatacccaacaggctacatttcagaaagaatctaactagagagccgcaacacatactcagttatcacattataagaaggaaagttaaactggtttgagactaggtaccaaacttctctgcttgttcaagctttcatttggattaccaagtagcatctgttcttgtagcttctgttaatttgcttagttttgaacaactttcaattcccatcttcacctttccttggttcataattacgtatatacgtaagcatataggtatgtatttaaatacagtggaactttaagatgtttgggtataggactgcattatagctgaggcaacataaggaagtccttccattggattagtcctgcctttgccttgcacttggcaacagtaatgatacagaggcatttccagagtcctctctgttcacaatatgggggctgtgaatttacaccctaaaagagaggcccctgaggtcaagccaagtatactggacataacttaaaatagtttagcatttaaagtgtaactctcccttcacctgccataaaaggtactttcttaattctgggctgtagatggctacttttaagcatagtccatctcaaattttcataaggataagtctcttcagacctgcgtttgaggcccattctgctgcttgactagtctattacataactaagacaagttatataacttctttaagcctcagttaatttacctataaaaggagatataatacttaatatacttaacaatacttactaatagtacttaatatagtggttttaagggttaaataagaatagctaactttcattaagcatttactatgtgccaggtggtttcaagtactgtatgacaggggtccccaacccccaggccacggaccagcagtagtccatggcctgttaggaaccaggccgcacagcacaaggtgagtggcaggcgagtaagaattaccacctgagctctgcctcttgtcagatcagaggtggttagattctcatagaagcgtgaactctattgtaaactgtgcatgcaacggatctaggttgtgtgctccttatgaaaatctaatgcctgatgatctgaggtggaacagttttatcctgaaaccatcccccatactggtccatggaaaaactgtcttccacaaaaccagtgtctagtgccaaaaaggttggggaccactgctgtacaaatattatgtcatgatccatataaagaactcagagtaagaatgcaagtgttagtttttctccctttctcctttctatatcttagtaaatgctagtaagtgaaatttcaggctaaaatctataccacaggaaagagaataatctcttataatattacaatctcacagccaggtgattagctgattatctgattataattcaccaccattctgttctcttatttatatctgaatatgtaacagtttcgttcctcatcctcttccaattctttcataagaacaaacctcagagaagacctttaaagtcagaaaagatgctaaagagggttgttataaatgttaacatgtcatctgcctcctacaaagatatttctttttcaagatcctatagtaatcataggagtacaaacataggaaataaaaacaatcctatagaagtatttactgtatgttcatattgtcattttcactgaaaacacattcttctaagcagatggcaaatataaagtagatacatctaaatgtttgcagttcctaaaacattcaatggggtgttgtttttatagaccactactttaggaataatctcaaaatcttttcagaggagaatgggctaagaattctaaagttaaaatatatgggtatatacagaaaattctaaataactgtgttctcagatccaaagaaatctgccacacagtttatttctgctacttcttgctggtaatgtttctcctaagatggttattgttttctttccacaaaattttatttatctctttgtttaaaatgctgctaaatattccacatctctattgatacaacaatttttttaaaaagcagcattaaatgatctgaagaaaagaaacagaacctaccacatttacatatgagcaggtgtctttgacaaggccaaattgttgaagcagaggtaaaacgttggtggtaaagatgttccaccacaggatgagaaactctggatgagtcatgttgggatcatgggcctcacttttgacactttttgttttgggatcataagtataattccatggtttgactcgtcccaggaaatgcacaactttggcacttgcaccaaacctgccaagtgaacgcaagttgaaacagttagtggattctgagtactgacaaaaagataagcagcacttagtagcacttttctatagctttctttcttaagagacagtgtctcactctgtcacccaggctggagtgcagtagcatgacagttcactacagcctctaacttcccacccttagcctcctgagtagcacaggccaccatgcc

SEQ ID NO: 94936 - DNA, 39781 bp, Homo sapiens
ctcagcgacagagcgagactccaactcaaaaagaaaagaaaagatgtcaaaatatggcccggcaccgtggctcacgcctgtaatcccaacactttgggaggccgaggtgggcggatcacgaggatcagaagatccagaccatcctggctaacacaatgaaaacctgcctccactaaaattacaaaaaaaaaagatgggtgtggtggcacacacctgtagtcacagctacttgggaggctgaggtaggagaatcacttgaacctgggaggtggaggtcgcagtgagccgagatcgcgccactgcactccagcctgggtgacagagtgagactttgtctcaaaaaaaaaaaaaaaaaagtcaagatattatcatctacagaaaatatatatataaattaatgagtataaaggggagtaagaactagcccagaatcccagaaatagactctccctcttcgtttttagtaccttcaaaatatttgaattccttctttcttagccctaaatcttgtccctgagattatttttttcctctctggatcaatctttcacctttaatcacaaccaagaaggaatatggtatcaaaactgcttagtttttaaaggtatcatttcatgaatagtataatattgatgtatatgaatcacatgtatatgaagaaagggtcaaaaacaatgagatccaggcacagcagcatgcacctactcaggaggctgaggtgggaggattgtctgagcccaggagtttgaggccaacctgggtaacataggaagacaacataaatttataatatttaatataaatacaagcatattggcatattttggatgatctagattaacacttttttgagtgatcttcagttcacattcaaatttacaattgaactgatgtcacattatactctaaagttagagcatttaatatatatatatatatttttttgagatggagtcttgctctgtggcccaggctggagtgtaatggcgggatctcagctcactgcaacctccgcctcccaggttcaagcgattctcctgcctcagcctcccaagtagctgggattacaggcgcctgcctccacgcccacctaatttttgtatttttagtagaggcagagtttcaccatattggccaggctggtgtcgaactcctgacctcagatgatccggccgcctcagccttccaaagtgctggggttacaagtgtgagccaccacgcccatccacatttaacctttaaggcaatgtctcccaggctggcaacattcccagagatctataattacatgcctcagggttcataatttctttttttttttttttttttgagacggagttttgcactgtcacccagactggagtgcagtggcgcaatctcggctcactgcaacttctgcctcccagattcaagtgattctcctgcctcagcctcccaagtagctggaattacaggcatgttgccaccataccctgctaattttgtagttctagtagagacagggtttcttttttttttctgagacaaagtctcgctctgttgcccaggctggagtgccatggcacgatctcagctcactgcaaccactgcctcctgggttgaagcgattctcctgccccaacctcccaagtagctgggattacaggtgtgtgtcaccacgcccagctgatttttgtatttttagtagagacggggtttcaccacgttggtcaggctgatctcgaactcctgacctcgtgatctgcccgcctcagcctcccaaagtgccgggattacaggcgtgaaccaccgtgcccggccagacggggtttcaccatactggtcaagctggtcttgaactcttgacctcaggtgatccacccacctcagtctctcaaagtgctgggattacatgtgtgagccaccatgcctgccataaaaacccttttttcatgtggactaacacctcaagtacatgttcaggagctggctctattaccatgtctgattagccagatttttgcagctcatactttaaagacagactcagcattatcaatcgatctatgaatatagtattgcgttttgggtgttttttttttttttttttttttttttagacagagtcttgctctgtcacccaggctggagtacagtggcgcgatctcggctcactgcaagctccgcctcctgggttcatgccattctcctgcctcagcctcccgaatagctgggactacaggcgcccaccatcacgcccggctaattttttgtattttttagtagagacagggcttcaccatgttagccaggatggtctcgatctcctgacctcgtgatccacccgcctcggcctcccaaagtgctgggattacaggcgtgagccactgcgcccggcctttttttaaaattttttttctttctcccttctagtcaaagcatgaaacctttaygtcactggaaatatactgtagtgactttgaggggaataggatggtgaggggataatcttcatactctttctcctttttcacctctttccatgatcccccttagtatctatctcccctctctgtaacattattgctctcccagtgcgttactttttccttgagtcatattgtgtgtgtgcgtgtgtgtgtttatatagtatttttagtagagagagggtttcaccatgttggccaggctggtctcggactattgaccttaagtgatccgcctgcctcagcctcccaaagtgctgggattacgggcgtgagccactgtgcccagcctcgagttatattttcttttccactttttttcttgtctgtttttttcccatttattttcaggccacctcctattttttgtgaacacaattaaatgtggcttccattccatatttagcgtgtatgtatggacacttaaacagcagtcttttgttgaataatatacaacatttatggataactcagcactttacattcaattcctcttatccttaaagcagtcttgaagagtagatgctgtatgtctgtcttgcagatgaacttagcctaagagggaataagtaacttgtgaaagatctcataggtaataygtggcaaaattcatgctctttaaacaatgtcacattccattcttaggaaaaaacaaagtccaaaaagaaaaaaaaaaagaaagaaaaaaaagaaggcgggcatagtggcacatgtctgtggtcctggctatttgggaggctaaagtggaaggattgcttgagcccagaagttcaagaccagcctcagcaacatagcaagacctcatttcttagaagaaggaggaagaggaggagcagaaggagaagaaagaagaggctgagtaatttttgttgttgctgttttgttcatttgtttgttttttgagacagggtctcactctgtcgcccaggctggagtgcagtgacaccatctcagctcactgcaaccaaggctgagtaattttatatgctccctctacactgctttggtcagagatctcatctaggttcctggcaacctgcaagcctaattaacatcttttccactttcatggcttaactccaatctaatattttcaatgtttttatattagttgtcaccctaaactgaaccactgttttccccccaaaactagcatcccctcaaactgcacctttttctgttaatggctccaccacattttgttatgcagagtcaaaatcttggtgttattcattcattcaacaaatatttaaatattattcagcacatacaactttgcaagggatgctggaaaacacaatggtaagtttaatggaacttctgccttcataaaggcttatattctatcaggaaagacaaacaagtgtggacccaaactagtatagtgatagtagagatttcctggagaaagtgatggtcaagaggggtgtggagaggtgtgctccatgggtaaaagtgtaagagaaagcatggctttagatgcacccaaagacattgctgaagcagagttgtaggagaaatggagagttaaagagaggcatacgtgaatctggatgattagcatgaagggtcttgtaaactataaggaatttggactatcggaagagcatgaagaagccatgattagttttatctttttaaagaatcttttttttttttttgagacggagttgctctgtcacccagggtggagtgcagtggcgccatcttggttcactgcaacctccgcctctggggttcaagctattcgcctgccttagcctcccaagtagctgggattacaggagcgcaccactacgcctggctaatttttgtatttttagtagagacgggtttcacatgttggccaggctggtctcgaacttctggcctcaagtgatccaccacccccccttggcctcccaaagtgctgggattacaagtgtgagccactgtgcccggctgaaaagaatcaattttgtcatagtttggagaatttctccttttctctccatcccttgaatgcaatttattaccaaatctgtcttatttgttattgtctaatttgtcctttcatctggattcccattgccaccctgcgtggtaccaccttactcccagctcttctcatctcctgcttagagtaagagctctctaactagtagcagtgccccaggccaggcgcggtggctcacgcctgtaatcccagcactttgggaggctgaggcgggtagatcacgaggtcaggagttcgagaccagcctggccaacatggtgaaaccccgtctctactaaaaatacaaaaattagccaggcgtggaatcctagctactcgggaggctgaggcaggagaatcgcttgaacctgggaggcggaggttgcagtgagccaagatagcgccactgcactgcagcctgggcaacaagagcgaaactctgtcttaaaaaaaaaacaatagtaggcggggtgcggtggctcacgcctgtaatcccaacactttgggaggccgaggcgggcggatcacgaggtcaggagatggagaccatcctggctaacacggtgaaacctcgtctctactaaaaatacaaaaaattagccaggcgtggtggcgggcgcctgtagtcccagctactcgggaggctgaggcaggagaatggcgtgaacccgggaggcggagcttgtagcctgggcgacagagcgagactctgtctcaaaaacaaacaaaaaacaacaacacaacagtgccccagactctctccctccaatgtacactgcatacaaagactagacaaacgatgccaaaggttacaccaggacgacaatgaagtccaagtcactcatcttggcgcttctttttatcaagctagctagttaatattaccacttacaatcattctccgagtccagccagcttcctcagaaatcctccccaaatgcagttcacattcttccctcactcctccaaaccttataacattattcccttttcctgtggcataatgcaatccagaggcatcctctctgagagcctacatcctttcaatcctccaagaaacagctcctcctcccatccttgagcttttcccacccagaataggctgtaccaaacatttctacattgtattaactcgaattatatcacagatcgaggtcttcgctttcagaaaagactcacattcttctcatataggcctcgcatggcctggccaagtacttcctaagctcggaacaaatactggtcaactttaattgaaccaaatcgggcggggtttgcggagtctgagagtgcaacgttggggagagggggatgaaaacactggaggacgggctgaaagcgtcgagtccgacacaaaagaggcgtcagacaaaacgccaagaggctggggactgggaacgaaggaagaggttctgccagaggcgacctgccacctgcgcgaggaagcggagtaggacggcggccgttggtgggcgtggtcgcgctagtctcgcgggagcggccgttgggcgggccgttgtccctgcgggcggggcgagttgctaaggaaatgactgcccgcagcgcctggccccgccgcgcaggccgggcggggtctggagcggcgccgtttccgcttccgctccctcacagctcccgtcccgttaccgcctcctggccggcctcgcgcctttcaccggcaccttgcgtcggtcgcgccgcggggcctgctcctgccgcgcgcacccccggggcttcggctccggcacgggtcgcgcccagctttcctgcacctgaggccgccggccagccgccgccatgggtgcctacctctcccagcccaacacggtgaagtgctccggggacggggtcggcgccccgcgcctgccgctgccctacggcttctccgccatgcaaggctggcgcgtctccatggaggtgaggaggcaggggcccataggctggccgctgcggggcgggaatctgacggagaaagagagcgggggatggggtcctcccctgggaagggtcccaattgggagcctgcggccgcagcggccgtttgcggggcgacagagaccgcggggtcagggccgagagggagctcccgatgcttggggaccgtgtgccggtggccagtggcggcgagggctcggccatgtgggaagaggcaccttccgcccactgaccgccctctccccgagctttggcgccatcctctcgtgccaacctagccctccaggctcatcaacggtgtgaggtttagtgtgggagtaaagacgcaaataggggctatttattcatttgtttttcaagggagaggtgaatagatgtgaataactttttaaattttaatatttaaaatatctgatgtgggaagcctcttttggctaggagtttgacagtgaaaggaaccccgggcagagtctgtttcacattttggttgcctggccttgggctcttgcatgttaatttcagaggctggacccgacctccaggagttgtcactcatttgcactcttttcagggccttttactaacttcggaaaacttgaattatgtcagtccctaggttttcctttttattatgcttcgttttctttctctcttaggatttctctaaaacttaatcagtaattctcatttgcctgtaattgtagtttatagtttctttgattgtaagtcatttcatcaatttttttcatcacaacctacctacaaagggcttttctagaaaattttactctggacaaaaggggaaaagaaaaatattggggggaaagtagtagtattaggtaaaacttgatgtgaaactacaaaagagaagagggaaaactgcggtagggaggaaagggaggaagacgggttaaccgtggctttgtgaagagcattctgaagtctaggcaaaagggccagrgaaatactctgtctggtattgagggtttctccacctaccgggtgggcttcaggtaacagcgaaatactgtctcccttgggaattgtttcagatccctcgctcctccctgtggttagctctggaatgacagtatgaacttaaatgttttgttttccgattcaaattttatattcataactgaccttaataacaattttataattaggtataaaatttcaggattggagtgtatcctatagttcatctcatctgctttggctccctttttttttttttgagacagaatttcgctcttgttgcccaggctggaatgcaatggcgcgatctcggctcaccgcaacctccgcctcccaggttcgagcaattctcctgcctcagcctccctagtagttgggattacaggcatgtgccaccacgcctggcttattttgtatttttagtagagacagggtttcttcatgtgggtcaggctggtgttgaactcctgacttaggtgatctgcctgcctcggtctcccaaagtgctaggattacaggcatgaaccaccacaccctgcggctcccacattttatagctaagaaattgaggcccagaaaggttaggacactgttttggtggaaagaatttgtaggatcagatcgttgaagacactagacattgttaatcatctatgtcaaactgaagcatagcattcatatttcaccaccatacacagtataactatttggtagatgtaattgtctattagaaatatctaggctgggcgcagtggctcacgtctgtaatcccagcattttgggaggccgaggcaggcagatcacctgagctcaggagttcgagaccagcctgggcaacatggcaaaaaccctgtctctacaaaaaatacaaaaaaattagctgggcatggtggcacccacctgtagtcccagttacttgggaggctgagatagaaaatcactttgagcctgagaggcagagccttcattgagccaagatcgcccctctgcactccaatctgggtgacagagcgagacgctgtctcaaaaaataaatgaataggccaggcatggtggctcatgcctgtaatcctaacactttgggaggctgcggcgggcggrttgcctgagcttaggagttcgagaccagcctggacaacatgaagaaaccccgtctttattaaaatacaaaaaattagctgaatgtggtggtgcgtgcctataatcatagctacttggaaggctgaggcaggagaatcgcttgaatcccagaggcggaggttgcagtgagccaagatcgtgccactgtactccagcctgggcgacagagtgagacactgtctcaaaaaaaaaaaaaaaaagaataaataaataaatctgggtatagtttcgtaggaaagtctttttgtaaagtaggtagtcaagaagttccatttccatggcattttctgttaacgttgtgagatttgaggtgaatattccatctcgcagtaaaacgtttcttccaggtttctcatttaatatttttcacttctctgctgttgttttttcatttctttggtacccttctttctacttttacttacggattgagttgcttggctactcagtgtttcacgttggtttgcccagtgattccatactatttgctgcttctctgtagggcatttccctttatttttggtttctcctcaattagaaaatgattttttttgtcagggacggtttagtgtgtagagatcttactagactattccttacatcctaatcttcctcctgagagataactgcttagggtattaaaatcttgctaatgtgctgtttctgaagttgcccttgtttgaataaatatgcctaatcaatagttaaatatgcctaatcaaatcctcttgaagagtattgtttgggatcctattctgcttcattgatagtgttccttctggctttttttctcttcaaagtgtagcatagtttctttgctattgcaagaaaataactatgagttctagcctcttccctgaatcttatctttccagaaaatataaagtactcccattcctctgaagctttagggcttaatccaaaaattaataaagtttatttaccctatttgcttggtcctaatgcttcatttgaggtaaggttatcataccactaaaggttgttgacatgctgactgatggatagatttagccgtagagaggactcttgagacaaaaatggcaatcatcaatagctggcatttttactttctgcctgtttcaagcttctcttcctgtgtgaccagggtgttgttgttgtttgttttgttttgttttgtttttgagacggagtttctatcttgttgcccaggctggagtacaatggcatgatctcggctcactgcaacctccgcctcccgggttcaagcgattctcctgcctcagcttcccgagtagctgggattacaggcatgtgccaccatgcctggctaattttttgtattttcaatagagacagggtttcactatgttggccgggttggtctccaactcctgacctcttaatccgcccgcctcggcctcccaaagtgctggcattacaggcgtgagccaccatgcctggcccatcagttgatgtagtcttaaggggacaagagtacatttaatatttggttgtgaggttctctggaagtgacaaaactgctttctatggagagttaggaattttttttttttttgaaacggagtctcgcattgtcacccgggctggagtgtagtggcttgatctyggctcactgaaacttccgcctcttgggttcaagtgattctcctgcctcagccttccaaatagctgggattacaggagtctgccaccaggccagctaatttttttttgtatttttagtggagacaggatttcactatgttggccaggctggtctcaagactcctgacgttgtgatccacctgcctcggcctcccaaagtgctgggattacagatgtgagctaccgtgcccggccaggaattttttgtgctataaatcatattttccttttattaaaggcagtgtcaatatctatagtataattttgaggaggctggctatttattgctgtgtagaagctggcttattagtggtcaaggggtcatctagaattgactataaagatagtattgagcagaaaattcttaaaatacctgcatattwgtttcagtcattaaattaatggaaaaaatataaaaagaaatatcacaagtatgctatggggttctaccttagggcattgaaggttgaaaaacatttattttcttatcttcagattagcatctcatatcaatagccaatagcttaaagcgctttttacttactaaaccaggtcagaatttctctctctctctcttttttttttttagacagagtctctgtcacccagtctagagtgcagtggtgtgatctcggctcactggcctttctgtttaagtgattctccggcctcagcctcctgagtagctgggattacaggcatgtgccacgacacttggcttattttttgtatttttagtagagatggggtttctctgtgttggtcaggcaggtcttgaactcctgacctcaggtgatctgcccgcctccgcctcccaaagtgctgggattacagacgtgagctactgcgcctggccagaatttctttgtctagaatgtggttagcaacttttataaaaacgcattatttgcatttgattagcatgcagtacccattcacagttcaaagctagtatagaattatatcacatgtatgcccatgagcatggagaaactattttctttttatttttttaagttggagttttgctcttgttgcccaggctggagtgcaatggtgccatctcggctcactgcagcttctgcctcctgggttctagcaatttgcctaccccagcctcccaagtagctgggattacaggcactcgccaccatgcccagctaacttttttgtatttttagtagagaaggggttttcccatgctggcgagtctggtcttgaacttctggcctcaagtgatctgcccgcctcagcctcccaaagtgctggaattacaggcatgagccactgtgcccggcctttttatttttwaaattatttatgtatttattttgagacaggatctcactcttgcccatgcttgagtggtaaggagtatgggatttcttgtgccggttccttcacatcctcactacacttatctgcctttacagtggctcgatcatagttcactgcatagccttctgggctcaaggggtcttccagcctcagcctaatataggcacatgccaccatgactggctaattttttttttttaagtttttttttgtagagatagggccttgcagtgttgcccaggctgaggaattttatttatgtttattttatttatttatttatttatttatttatttatttatttatttatttattgagatggagtctyacactgtcacccaggctggagtgcagttgcgcggtctcagctactgcaagctccgcctcccgggttcatgccattctcctgcctcagcctcccgcgtagctggactacaggcgcccgccaccacgcctggctaattttttgtgtgtgtttttagtagaggcggggtttcaccatgttagccaggatggtctcgattcctgacctcgtgatccacccacatcggcctcccaaagtgctgggattacaggtgtgagccaccatgcctggtctagaaattattttatattttataccattgccttataagttctcaagcaactggaaaatacaatcagaacgtattcctcaagatttcaaggatattttacacaaagttctattgtctgattccttagcagttgttactactgtttccctaacctctaatcttctattgggttattagtcttagaattgaattttgagaggtaagggcttgaatttgaacatagaaatttatacaggtctgatcagtagttcttgacattgtattatctggaaacaaatctttagaactgagcttaagatgtttaatgacattttgtagacagagtatgatttcagtgtagttgtttttgtttctttctagatctagttcagagatgaagtatatcaamttttttttcctttttgacccaatgctagcagaaaaacaacaccttttaatcatatttagtatttgaaaatgtgtatacaggttcctttttattttatttatttcttacaggttcctttttaatcagctttattgagatagagttcatatactgtatggttcataccacatatggttcatataccatacagtatatgaactcactttaagagtataattcagtgggtttaagggtataattcattcattttaagggtataattcagtggcttttagtatattttcttttttttcttctttttttcttttttcragacagggtcttgctctgttacccaggctggagtgcagtgacgcagcctcagctcactgcaacctccacctcccaggttcaagcgaattytcttgcctcagcatcctgagtagctggaactacaggctcacgccaccacacccagctaatttttatattttcagtagaaacagggtttcaccatgttgcccaggctggtctcgaactcctggcctcaagtgatctgcctgcctcagcctcccaaagtgctgggattacaggcatgagccaccgtgcctgcctgttttgtagtgtattcaaacagagttgtacaactgtcaccacaatcagttttagaaccccaaaaagaaaccctgtactctttaccagtcactccctatcttccgtccactaacccctggcatccactaatttacatgacctctatgaatttgcctattctgaacattttataaatggaattctaaatacactaccttttatatctggatgcttttactaagcatgtgtatttttgaaattgactttaaagcttgttggcccctggaagagtaaattactctccaccccaagtattccctctacccctcagctttgcctgtaagtttctttttaaaaaaatcacacatacattgttgtagtagatttaagaataagtattttgctgacccaaggttcttttgcttctttctakatcagtgccttgcaggttttattttacagagcttaatagaatcagaaatctctttaaaactccagtctcatatccagttatcactcaccatctctgtgtttgcagcaatagccaggcctggcccagagggacttgatctccacttttggtttttagacttttctgtggcttttaccacctgctgtgtatccttgacctcatactgctggactcctttggatggataccagcaggatggttcaggctccagtgggcactttttaaaattctctccttctgttcagatagacagagctcaggcagatcaccaagtctgttgcctgtgtaaycaggaaagagatgctagttttcttttaggcactcccatttgtttctgttggaaccttcctcacttagttgatggaagggaagcaaaagacccagaactccatctcaaattaatgacttaacaattcttgaattttctcttatctcctagttaactctttttcttatctccaggaggtcagttttaattattgttgtttattcatttattttcatggagacagggtcttactgtgttgtccaggctggccttgaacccctggcctcaaggaatcttttcacctcagcctcccaaagtgctggaattacaggcatgagtcaccacacccagcctgatatttttcagttgatgtatcatagttgtgcctaagcataattttttaattttaattttttatttttggggacagggtctccctctgtcgcccaggctggagtgcagtgatgcgatctcagctcactgcaacctccaccttctgggttaaagcrattctcctgcctcagcctcccgagtagctgggactacaggtacccaccatcacacccggctaaattttttgtgtgtattttagtagagacgagatttcgctgtgttgcccagggcggtctcgaactcctgagctcaggcaatccgcctgcctcggcctcccaaagtgctgggattacaggcatgaaccaccacgcccggccaagcgtaatatttttaagggtcatcaatgttgtgtcatgaatcaatcagtgtttcgttcttttttatggttgaataatattccatggtatggatttgtcacattttgtttatccattcattagttgatagacattttggatttccactttttttttttttttttgctattataaatmgtgatactatgtacaaatttttgtgtggaaatatgtcctcatatctcttggttatataccaaagagtggaagtgctgggtcatatggtaactacgtgtttaacattttgagaaactgctaaactgttttccaaagttgctgtaccgtygtacattcctgccagcaatatatgaggatgccagttccttcacatgttcactacacttatccaccttttttataataactaatggtgggtgtgagatggtatctcattgtagttttgatttgtatttctctgatggctaaatggctaatgatgtttgaactttttgtttgagacagaatctcactctgtccagattcaagcgattctcctgcctcagcctccctagcagctgggattacaggcacatgccaccacacccagctaattttttgtatttytagtagagacagggcattaccatgttgttcaggctggtgtcgaactcctgacctcaaaggatccgcctccctgggcctcccaaagtgctggattacaggctagagccaccatgccaggccttatgtttgaacatcttttatgtgcttattggacatttgtgtatcttctttggagaaatgtctgttcaaagtctttgtccatttttaattggattgtctttttgtcttttgatgtgtaagagttctttatgtgttttggatacaagtttgttagatatatgatttgcaaatcttttctccaatttttgtggacttttgctttctttttttgttttgttkttgttgttgttgttgttgttgttgttttggtcgggggacagtcttgctctgaccacccaggctggaatggagtggcgcgatcttggttcactgcaacctctgcctcctgagttcaagctatcctgcttcagcctcccgagtagctgggacccaggtgtgtgccaccactcccagctaattttttatttttagtagagaccgggtttcaccatgttggccaggctggtcttgaactactgacctcaggtgatctgcctgcctcagcctcccaaagtgctgggattacagtcatgagccactacaccctgattctttttgctggctttctttctttttttttctttttttttttgagacggagtctcgctctgttgccaggctggagtgcagtggcatgatctcggctcactgcaacctctgcctcccgggttcaagccattctcctgcctcagcctcccgagtagctaggactataggcacatgccaccatgcgcagctaatttttgtatttttagtagagacggggtttcaccatgttggccaggatagtctcgatctcttgacctcgtgatccgtccgcctgggcctcccaaagtgctaggattacagacgtgagccaccacactcagcctctttttgctttcttgatggtgtcttttgaaacaaaagtttttacttttgataaagtccaatttgtctattttgtttgtttgtttttgttaagaagctttgcctaacccaaagtcacgagaattttctcttaggttttcttctaagagttttatagttttagctgtttctgtgatccattttgagtgaatttttgtgaatggtatgagggagtgatccaacttcattcttttgtgtgtggatatcaagttgtcccagcactatttgtttaaaccactgttcttttcccccattgaattatcttggcatcattgtcagagataaattgaccgtaaatgtgagggttttatttctgaactctcaagtccatttcattggtctacatgtccctatgccagtaatacactatcttggttactgtagctttttagtacgttttgaaatgtttttaaaatttgtttttcatctaaattttaggattaatttgtcaatttctgcacaaaaggcacctgggtttctataggggttatgcagaatctgtagatcaactgggggagtattacaggcatgagccaccgtgccyggctgactgagtttttcatagatgtactctatcaggtttaggaagttcccttttattcctaggttgttgagtctattttatattacttttttagagacagtcttgctctgtccctcaggctgtagcacagtggctcaatcatagctcactgcagccttgaactcctaggttcaagagatccgcctgcctcagccttcttagtagctgggattacatgcatgcaccaccatactgggctaattttttaaaattttttatagagacagggtcttattactatgttgcccagactggcattgagtctttttatcattaatgagcactgaattttgtcaagtgcctttataatacctattgtgatgatcatagggttttgttctttagtctaccgatacgctatattgcattaagtgatttttttgaatgttaaaccaaccttgcatttttttggtgtataagtcttatttgatcaatgtgtattatccttttatatggtgctggatttagtttgctactattttgttgaggatttttgtgtctatattcataagagatattggtctgtagtttcttgtgatgtctttgtctggttttagaatcagggtaatgctggcctcatagaatgaattgggaagtgttgtcttcttttctatgtgatgggagagtttgtgaatcattggtattaatttttctgtaaatgtttggtagaattcacaaataaaggcatctgagcctgggctcttctttgtgggaagtttttggctttttttttctttaaaaattttcattgtggctgggcatggtggctcacgcctgtaatcccagcactttggggggccaagacgggtgaatcacctgaggtcgggagtttgagaccagcctgagcaacgtggagaaaccccatctctactaaaaatacaaaattagctgggcatgatggtgcatgcatgtaatctcagctaattggaaggctgaggagggagaatcacttgaaccacggaggcagaggttgcagtgagcctagatcgtgccmttgtactccagcctgggcaacaagagcaaaactctgtttcaagggaaacaaagttttcataacataaaaattaccatcttagtcatttcttttctttttttttttttgttggagacggagtcttgctctgtcacctatgctggagtgcaatgattgcagtcttggctcactgcaacctctgccacctgggctcaagagattctcctgcctcagcctcctgagtagctgggattacaggcatgcgccaccatgcccagttaatttttgtatttttagtagagacggggtttctccatgttgaccaggctggtctctaactcctcacctcaagtgatccgcccgcctcggcctcccaaagtgctgggattacaggcatgagccaccacgcccggccttaaaaatttttttaatgtacagttgagtagtatttaatacattcacattgttgtgtacccagtttccagaactcttcatcctacagaactgaaactccatacccattaaatgagtccccattctctttcccccagctcatggcaaacagcattctattttcagtctctatgaatttgattagtttagatacttcatactgtaagtggaatcatatggtatttgtcttttagtgactgcctaatttaaaaaaaatttttttgagacggagtcctgctctgtcgcccaggctggagtgcagtggcaccatctctgctcactgcaacctccacctcccaggttcaagtgattstcctgcctcggcctcccacgtagctgggattacaggtgctcgccacaacacccggctaatttttgtatttttaggtagagactgggtttcaccatgttggccaggctggtctcgaactcctgacctcaaattatccacctgccttggcctcccamagtgctgggattacaggcgtgagccactgtgcccagcctccatgttgtttttcacaacacctgtatcatttacatttccaccaacagtacacaagaatttcagtttctccacatccttgctagcagttgttattatctgtttttttttaatggtttcttttttcctttttctttttttttttttttgagacggtcttattcttgctcatgctggagtgcagtggtgcaatgtgatagctcactgcagcctcaacctctgggctcaagcagtcctgccacctcagcctccacataggtgggactgcaggtgtgcaccaccacttgtggctaatttaaaaaattttttcgtagagacagagtctcacagtgttacccaggctggtcttgaacttctgagcacaagtgatcctcccacctcagcctcccaaaataatgagattagagacatgagccaacatgcccaaccagttttgtttgtttgttttgttttgtgtttttgagacagagtctcactctattgcccaggctggagtgcagcggcatgatctcagctcactgcaacctccgcctcccaggttcaagtgattctcatgccccagcctcctgagaagctgggattacaggtgtaccaccacacccagttatttttgtatttttagtagacatggggttttgccatgttggccaggctggtcccgaactcctgacctcaagtgatctgctcccctcagcctcccaaggtgctagaattaagtttttctttctttctttctttctttttttttttttttttgagacagagtctcactctgtcacccaggcaggagtgcaatggcacggtcttggctcattgtaacctctgcctcccagattcaagtagtgattctcctgtctcagcctcccaagtagctgggattacaggcatgcaccaccacgcccagctaattttttgtatttttagtagaaacggggtttcaccatgttggtcaggctgatctcaaactcctgaccccaagtgatccacccgccttggcctcccaaagtgttgggattacaggcgtgagccactgtgcctggttttatttttattattattatttttaatagttcctattctaatgggtatgaggtagtgaggtgggtggttgtggtgtttttatgaatgtttaattggaaatgggtggccattktgtgcaggaaaaacctcctaaattgtgtcaaactcctggaaaatgaaatatcattccagttgcaagaatatctttttttttttttttttttttttaagacagagtctcactctgtcaccaggcgggagtgcagtggcacgatctcggctcactgcaacctccgcctcctggtccgcctcccgggttcaagtgattcttctgccttagcctcccaagtagctgggactacaggygcgtgccaccactcctggctaatttttttgtatttttagtagagatggggtttcaccatgttggccaggatggtctcaatctcttgacctagagatccgcctgcctcggcctcccaaagtggtgggattacaggggggtcaccgtgcccagccacaagaagatcttgagcatgtgaatgatcagaaatgatttagcctatgtaggcactaggccaggtagtgaaattcagggaaaataattcagatgcttctgagctatcacttatgaactaagaaacagcttaaagccattatagtgtgtttcctgaagatgaaagcatatggtaagatgaaatagtgattattttttaaaaattactactccagaaaggaaaagtttactaatttttattactaaagtttactgttggtgggtgcggtggctcacacctgtaatcccagcactttgggaggccgaggcaggcggatcacctgaggtcaggagttcgagaccagcctgaccaatatggtgaaaccccatctctgctaaaaataaaaaattaggccgggcgcggtggctcatgcctgtaatcccagcactttgggaggccgaggcaggtggatcacgaggtcaggagattgagaccatcctggctaacacggtgaaaccccgtctctgctaaaaatacaaaaatcagccgrgcgtcttggcaggcacctgtagtcccaggtactcaggagttttgagacgggagaatggcgtgaacccggaaggcggagcttgaagtgagccgagattgcgccgcttcagtccagcctggacgacagagtgagactctgtctctaaaaaaataaataaataaaaataaaaaattagctgggtgtggtggcacgcacctgtactcccagctactcgggaggctgaggcaggagaattgcttgaacccgggagatggaggttgcggggagccaagattgcgccactgcactccagcctggcgacagagtgagactctttctcagaaaaaaatatgataattaaaagttgagacgttcttcgccgagagtggtcggggtttcctgcttcaacagtgcttggacggaacccggcgctcgtcctgcaccccggccggccgcccatagccagccctccgtcacctcttcaccatgccctcggactgccccaaggcccccgccgcagctccagcgccgcgtagccaccactgccgctgccgccgcctctccttagtcgccggcatgacgaccgcgtctacctcgcaggtgcgccagaactaccaccaagactcagaggccgccatcaaccgccagatcaacctggagctctacgcctcctccatttacctgtgcgtggcttactactttgacagcgatgatgtggctttgaagaactttgccaaatactttcttcaccaatctcatgaggagagggaacatgctgagaaattgatgaagctgtagaaccaacgaggtggccgaatcttccytcaggatatcaagaaaccagactgtgcggggagaatgcgatgggagagcgggctgaatgcgatggattacatttggaaaaaattgtgcattttgcattacatttggaaaaaaatgtgaatcagtcactactggaactgcacaaactggccactgacaaaaatgacccccatttgtgtgacttcattgagacacattacctgaatgaacaagtgaaggccatcaaagaattgggtgaccacgtgaccaacatgcacgagatgggagcgcccgawtctggcgtggcagaatacctctttgacaagcacaccctgggagacagtgataatgaaagctaagcctcaggctaatttccccatagccatagggtgacttaccttgtcaccaaggcagcgcatgtatgttggggtttcctttaccttttctataagttgttccaagacacccacttaagttctttgatttgtaccattccttcaaataaataaatttggtaccctccccccccccaaaaaaaaaatgtactgtgggctggcgtagtggctcatgcctaaatctcagcactttgggaggctgaggcgggaggatcacctgaggtcgggagtttgagaccagcctgggcaacatggtgaaaccccgtgtctactaaaaatataaaaactagccagtcatggtggcacacacctgtaatcccrgctacttgggaggctgaggcatgagaatcacttgaacctgggctgcggaggttgtagtaagctgagatcatgccactgtactccagcctgggtgacagggagacattctctctctcaaaaaaaamaaamaaamaaaaaaaacaaaacaaaccaacaaaacaaagtaatccaggaacaacaacatgatgaaggactgcatgcaggactcagtgatggatggtggaagacagccaggaagttaagcatgactctggtattaagtgttgtctgggagagttaagattccatttacagaaataagacctgtaggggaagctcttgatttttttttttttgcagactgctgatttcctgattacatgtgttaagtttgaggtatagagagaaagaacatcctggccgggtgcagtggctcacacccgtaatcccagcactttgggaggccaaggtgggcagatcacgaggtccaggagatcgagaccatcctggccaacatggtgaaaccccgtctctactaaaaatacaaaaattagctgggcgtggcggcgcrtgcctgttatcccagctactcaggaggctgaggcaggagaattgcttgaacccgagaggcagaggttgtgatgagccgagatcgcgccactgcactccaccctggcaacagagctagactctgtctcaaaaaaaaaaaaaagaaagaaaaaaagaacatcctgtagaaacaggcagtcagaggtatagaactacacagaatccaagagatctttcaagaaaagtgacatgcagcaagagaaactatcaagggggtaaacaacctatagaatgggagaaaatattcacaaagtatacatccaacaaaagtctaatatccaaaatctataaggaacctaacaagcaaaaagcaaataacccccttaaaaagtgggcaaaggacatgaacagatacttctcaaaagacgtacatgtggcccacaaacatgaaaaaacgcccatttctaatcatcagacaaatgcaaattagaaccacaaagagataccatctcacaccagtcagaacagcttttgttaaaatgtcaaaaratgagaaacgttggtgaggctgcagaggaaagcagacacttgtacactgttggtgaaggtgtaaattaatttagcgtaggcacagtcagtttggagatttctcagagaactaagagtggaactaccattagacccagcaatctgatggctggatatacggccaaaggaaaataaatcattctgccaaaagaacatatgtacctgtatgttcattgtggcaccattcacaatagcaaaaacattgaatcaactcatgtgcccatcagtggcggactagaaaagaaaagaaaatatggtacatagccatcatggaatactatgcacccattaaaaataatgaaataatgtctttgcaacaacatgaatgtagctggagggcattatcctaagcaaactaacacagaaacagaaaaccaaatactgcgtgttctcacgcagtgagagtgggagctgaacatcaagtacacatggatgtaaagatggcaacaatagacatgggtctactagaggtggtggtgcggcagggtgggggtgggggttgtgtggcagaggaacagctgaaaaactacctatttgatactatacccagcacctgggaaaygggttcagtcataccccaaacctcagcatcacacagtatacctttctaacaaacttacacatgtattctgtgattctaaaataaacattgaaaaataaaaaaaaaactgacatggtttgtactgtttaatctgacataatggctaggggaaatgaagtctgcagaatggctgtttacggatgttgttgttgttgttgagatgaggtctcactatgttgcccaggcttgaactcctggcctcaagcagtcctcctgccttgacctcccaaaatgttgagattacatgcatgagccattgccaaaacggctatttggattgctgttaaggttattacattctctgtgtagtaagaccttgaaggagaaggatttgagatcaggagtttaagaaaaaatgttaatctaggaagagaggataatttctgtgtttggccagttgcaatggctcacgcctgtaatcccagcgttttgggaggccgagctgggcagatcacttgagctcaggagtttgagaagagcctgggcaacatggtgaagccccgtctctactgaaaatacaaaaattggctgggcgtggtggcaggtkcccactgtaatttcagccactcaggagactgaggcaggagaattgcttgaacctggaaagtggaggatatggtgagcctagatygcgccactsyactccagcctgggagactccatctcaaaaaaaaaagaaaacaagatgctgaaatgaagtaattaccacagtcaatgtgatcctataactttgttttsttttagagatggggtctccctctgtcacccaggctggagtgcagtggtgcatcatagctttctgcagcctccacctcctgggctcaggtggtcctcttgcctcagtgttccgagtagttaggactgactgcaggtgcatgctgctatgcctggctaactttaaaatttttttgtagaggcggggtcttgctatgttgcctaggctggtctccaactcctgatctcaatcagtcctcctgcctaccttcccagagcgctgggattacaggtgtgagccatcgcacctagccaatctcataacattttatgactagcaaacttagtagttctgattcaggcataaatcagttggtggggttatacaaggttgggtgagtttttcyagatttctaagagaccatgttgaaatacttggctctgtctcagtaagggatagagagaagcaaaggtgtgggtaaaggttatgagcagacatgtaaagggggcaaattaaagtgtttagggaaggtgaaacagttccaaatcataatatagatcccaagcctcaccaagaagtgaaggagagggtaattgtgcgatagttctcaggactgagacctcaaggtgtaagacgaatctttattgtgggtggtcctctttgagaaaaagaacaaaaaagaaaaatgtgaaatgggtgctaaatttcagagcagaatatacatatatgtgtatgtgtgtgtgtatatatatatatatttttatgtagcaaattccagtttacaaagggcttttatgtgttttgcatcattacaacagttctgtgatgatgtggatgtggtggatattgtaattccacatcacagaggataaaattgaggcacaccataaggtagctgaccagagatcatgcagtatatggtagaatggcaacttgaggccagttcttaggtgtgtttgttgtccttattcagaatggaacaatgtggtttattgtacaaaaatttaaaaatgaatgtcgaaaagtagaaattattacccaaatctcaccctctgtggttgtttgctatgtgatcttccagactcacatatacatgtagataattttttttttttttttttgagacggagtcttgctctgtcgccctggctggagtgcagtggcgcaatctcggctcactgcaggctctgcctcctgggttcacgccattctcctgcctcagcctcccaagtagctgggactacaggcgcccaccatcacctccagctaattttttgtatttttagtagagacggggtttcaccatgttagccaggatggtctcgatctcctgacctcatgatccgcctgcctgggcctcccaaagtgctgggattacaggagtgagccactgtggccgtcctcacatgtagatacttttttaactttttgcttttaaccacttaagatattgtgaactcatttccaaattaacatatatttgcttttaacagctacatttccactggagttacgtaccatttgtaatctattcctggaaatttagatggttacaactgttttttattttatttatttatttatttagagacggagtctgactctgtcacccaggctggagcgcagtggtgtgatcttggctcactgcaacttccacctccggggttcaagtgattctcctgcctcacccttccgagtagctgggactacgggcgcacaccaccacgcctggctaatttttgtatttttagtagagacggggtttcaccatgttggccaggatggtattgatctcttgacttcatgatctgccggccttagcctcccaaagtgctgggattacaggtgtgagccaccacgcctggcctcaactgttttttattataaataatgctgtaggcccggcgcggtggctcacttatgtaatcccagcactttgggagactgaggcgggtggatccctagatcaggagatcgagaccattctggctaacaaggtgaaaccccgtctctactaaaaatacaaaaaattagccgggtgtggtggtgggtgcctgtagtcccagctacttgggaggctgaggcaggagaatggcgtgaacctgggaggcgaagcttgcagtgagcagagatcgcaccactgccctccaggctgggcgacagagcgagactccgtctcaaaaaataataataaataaataaataaataaagctgtgtacagcctggccaacactttgggaggccgaggcaggcagatcacaaggtcaggagttcgagaccagcctgaccaacatggtgaaaccccatctctactaaaaatacaaaagttagccgggcatggtggcacatgcctgtaatctcagctattcagcaggcggaggcaggagaatcgcttgaacccacgaggcggaggttgcagtgagccaagatcgcgccactgcactccagcttgggtgacagggcgagactctgtctcaaaaaaaaaaagaagaaaaaatcctttattctggttttcccgtagcttccacagatccaaaagggtcaggtttatttccagtagccaaatattctgccatctggactgagatatctcctaggttgaggttattatagaggtagtaacctgattctttcttccttttctccttcccctttcctcctttgcctccctcctcttttcttcctctgtatttattttatcattccttcttcctttcttatttctaggccatataggccagccagggaaaggttagtaaggggtgacattgatccctatgacctgaggaatattcttcgaccttgagacatgccgattatgctcttcttttcctaggatgctcacaactgtattcctgagctggacagtgagacagccatgttttctgtctacgatggacatggaggtaactttaacagatcatattggtaacattctaggaccccaattccagacgttccagggcaagaacaggtccctttgttcatttactttccagggtctggccctcattatcatttcctgcgtggtgctgtttttctgtattctgtcattcttttttcccagtaggtactgtattggtttataatctcaccaggacttgttttaatccaaagagcctctatctttttttatttttattttttaaaatttttaggctgggcacgcggtaggtcacacctgtaatcccggcacagtggatcacgaggtcaggagttcgagaccagcctgaccaatatggtgaaaccccatctctactaaaaatacaaaaattagctgggcgtagtggtgggcgcctgtggtcccagctgctcggaaggctgaggcaggagaatcgcttgaacctgggaggtggaggttgcagtgagccaagaccatgccactgcactccagcctgggcaacagagcaagactcttgtcttaaaaaacaaaaaagtgtacccagttgagctgattctttatctttttttcactggagaactaagtatacaggtgagaaaagacgagatatttatacccgagagaattgatggtgaaatccatttttttggatcagaacttccccaaacagtgtccttcaaatagggttcaggggtgctaagatatttatcccctcaacccttggggttcactccagtatggcatataratattgtatcactttctatgtgtggggagcagtgctccaggtgaccttccttcctttccttctaggggaggaagttgccttgtactgtgccaaatatcttcctgatatcatcaaagatcagaaggcctacaaggaaggcaagctacagaaggtctgtctgcttacaccgcccattcctcacttgtgtaggcttttcccttgttctctagcccttgggcttttcctttctttttgtcctctagctgctgctgcttatttactcttgaagaattctgttcctaaaacgagcttattggccgccttttagacttgccttattattcctaggcctctgagctgtttttatctgtgagtgtctcttagtgtggtggctcacactcttaatttgtattccatccttgtgctcaggattgtatatagggagttcattttgtactagtcttagactattttgcttatattcaggctttagaagatgccttcttggctattgacgccaaattgaccactgaagaagtcattaaagagctggcacagattgcagggcgacccactgaggatgaagatgaaaaagaaaaagtagctgatgaagatgatggtgagtgtggcatcccttgtttgaggggaaatcagcattttaagaaatattctttaatattacttatcaattctaagataggatggctttctagggacctggggagtccttatgttaaagaaacctatgatgttctcctgcattgtatgtggttatgaaaaggagggagagaattatcttcgttgagtggcatctgagctgtaagcattgtatatacattatcttttgtcattgtgatggggtcttcctggttcctgctagtatttatgtgcttttttttcccctcaagactggagcagttattagccccaatagccaatcattaagcctaaatcctaattcacagtagcattgtgggcttcctggatcctcagccagaatagggtttttacaacttaacaataaaaaatgagacgtcagaggggaagtatagtaactagtgttgttttgattaagaaggggatgaaacacaaaaaccaaaagaagtctgtggaggagraggagctagggcatgttcttctgagacttgagcgagaggaaccttgggagtgggaggttgtggggaagttagaggctgcaagggctgttgaggtagtgagagggacggatcccatgaggagtctggcatgggggctctgatttagcctcttccctgcagtggacaatgaggaggctgcactgctgcatgaagaggctaccatgactattgaagagctgctgacacgctacgggcagaactgtcacaagggccctccccacagcaaatctggaggtgggacaggcgaggaaccagggtcccagggcctcaatggggaggcaggacctgaggactcaactagggaaactccttcacaagaaaatggccccacagccaaggcctacacaggcttttcctccaactcggaacgtgggactgaggcaggccaagttggtgagcctggcattcccactggtgaggctgggccttcctgctcttcagcctctgacaagctgcctcgagttgctaagtccaagttctttgaggacagtgaggatgagtcagatgaggcggaggaagaagaggaagacagtgaggtaagggcctgtgagggcaggcagatgctgaagttkcagagaggtcctgtttggttgccgtctgtagttttcaactctctttccttctcctattttgacatcatcccscaagacccactgtattctaagctttagtcttgaattcattgagctccatcatcacaggtaccatttgcctttttacctcttcctttgttggtactataacaagcagatctagttctggcttttcagagtctgtctcctagagagagaacaaggagatagttgttaccttggctagttgactgttttcttctctggaaaatttattttctggccacagtgcctgaaagatatttttggctggcagcccttgccttgtcctgggctttttgctagtgactgctaagcccagttcaggatgtcagttgtactcatgctagccctttccatccccccaattttcatgaccatatacttgtatctttcagtgttttgaggacctgtgttcagtcaggacctcttgattctgagtatgagctgtggggagggaggggatcatcccagtctcagcagtctgggatcctccccctggcaggaatgcagcgaggaagaggatggctacagcagtgaggaggcagagaatgaggaagatgaggatgacaccgaggaggctgaagaggacgatgaagaagaagaagaagagatgatggtgccagggatggaaggcaaagaggaggtgtgtggggaaggggagcaatgagtcttgaaaagccacaaggcaggtgtgaatcccctaattttgattttgagacaggggatccccctgatactttaggrtggaagtaatagtcatggggatttattctgcaaggggaatgagatggtaagcctttggggttgaattatctaaaaacaagggagagggagtgtgctgctgtctctagaaagatgaaatgtgtgcttctcctgtttgttaaagctcttttgggggtcccagtgaaagcaagcataggtgaacgatcaggagcacatcagtgaggaacgcatgttcagaagcccccatgatgctccttttcttcctcttaagcctggctctgacagtggtacaacagcggtggtggccctgatacgagggaagcagttgattgtagccaacgcaggagactctcgctgtgtggtatctgaggctggcaaagctttagacatgtcctatgatcacaaaccagaggatgaagtagaactagcacgcatcaagaatgctggtggcaaggtcaccatggatgggcgagtcaacgggggcctcaacctctccagagccattggtaagggccaagaaactgggaaagacttctagggtctttctctctgtcccagactacctagtagcaaactttaatcttcctagtgcttgtgcctttcaaagcactttaatatctactacctctgttcttatattyctgtgaaataactaagatgggtagaggtatcattatacataggtatcattatacccatcttatgtaacatttgaatgatgaaaaagacctgtgagtgccgggcgtggtggctcatgcctgtaatcccagcactttgggaggctgaggctggtggatcgcctgaggtcaggagttcgaggccagcctggccaacatggtgaaaccccatctctactaaaaaaaaaaaaaaatacaaaaattagctgggcatggtagtgcaagcctgtaatcccagctactcaggaggctgaggcaggagaaccgcttgaatccgggaggcggaggttgtagtgagcygagatcgtgccattacactccagcctgggctacaagagtgaaactccgtctcaaaaaaaaaaaaacaaaaaagacttaaaataaaaagaccagtgagtgactttcttaaggttcagcagtctggtggcagggttgaaactagaaaaactaggacttaggactcagttccccattccactagattatggaactttgtaaagaagggaaatgaatggcaaggtttgacctgccacaaacacaagtctgtgggaagtatccaaactgctcatcaaccattcctttactccaggggaccacttctataagagaaacaagaacctgccacctgaggaacagatgatttcagcccttcctgacatcaaggtgctgactctcactgacgaccatgaattcatggtcattgcctgtgatggcatctggtgagcactggcagaatgccctaaattcccctttctgcagcatgtcttctcttataggactcagggcacctctaggattagagcctaggcagacctaggcctcttggtgggtgaagagcacccagactaaggcagagctgagaatttctgtagttatttacactggcctgggccaccacctctgtccatactcctctacgctgccttagtgagactggaagattctgactgttgttcttgaccccaggaatgtgatgagcagccaggaagttgtagatttcattcaatcaaagatcagccagcgtgatgaaaatggggagcttcggttattgtcatccattgtggaagaggtgagtaccagggtggagaagagagggtgtctggtctgcacagccagggttcactcttttaatctgagctaagtcggcaatctgggagcattatcagtaattgctgacagacgctaaaccccractccaaagttccaccttctgtcatttccctgacttagccttatgccttatggactagcaggtgggccgttgtgtgatacctcttgcccattcctctcctaccaccctgactcagcaagccagccctcttgtgggactgtagattcctggcaaggtgttcaaaccctgtggctgagctacccccatccctttcttagctgctggatcagtgcctggcaccagacacttctggggatggtacagggtgtgacaacatgacctgcatcatcatttgcttcaagccccgaaacacagcagagctccagccagagagtggcaagcgaaaactagaggaggtgctctctactgagggggctgaagaaaatggcaacagcgacaagaagaagaaggccaagcgagactagcagtcatccagmcccctgcccacctagactgttttytgagccctccggacctgagactgagttttgtctttttcctttagccttagcagtgggtatgaggtgtgcagggggagctgggtggcttcactccgcccattccaaagagggctctccctccacactgcagccgggagcctctgctgtcctycccagccgcctctgctcctcgggctcatcaccggttctgtgcctgtgctctgttgtgttggagggaaggactggcggttctggtttttactctgtgaactttatttaaggacattcttttttattggcggctccatggccctcggccgcttgcacccgctctctgttgtacactttcaatcaacactttttcagactaaaggccaaaacctaatcgtacgcatcgtgtccttttttttctgctgccgtggcccccgacttggtcccatctgtagcatgtggcgagcccccatgtgagtgtgtgcgtgtgctcgtgtgtgtcctgcgcgtgtataggagagcccagagcgagctgctggtaggccggcctggcgggcgtcgcggctgcccctcgccccctcctgcagccagaaatgatctagttcccccagggacaggttgggaccggtctggctggcctgaagcctggagtcgggcaggacgcctcctgcgctgctccctggccggctccccgctgccgctgattggcttgctccccgcctcgtcacaatcacttcccggtcacgccattgaggctcccgccgcggccgcttcccacggactacgcgtcccgtgcgtctctgcggcggcggaagcggaagcgagtacggaggtaccagctggtctccgtaggggggtagggggctccatgaatggaagcggcggcggcggcgggagcggcctgagctgggcgccggggccagggccgggggctgcccagggcccgcgccgctgcatgggggcggcccgcgggccctgagaggaagggcagacaggcgggccgagataggaggggcggggtcgggcggccgcaggccggaggcgcgtcgggctggagccggtcacgatgccccgaaggaagcaaagccacccgcagcccgtgaaatgcgagggggtcaaaggtcaggggtcaggggccttgaggggagaggagcgggggtggggtcagtggagtgggctcaggtcagggtggagggggactcctgagggatgaagtgggcgatccagactcctagcttcccaccgaggcactaagggaatcagagtgggtcagcgagtacgggaagtgtggtccacgagggctggttcctgagggagaatccacaagccccctcccctcttcagtggatactgaagactccctcgacgaaggacccggggccctggtattggagagtgatttgctactaggccaggatctggagtttgaggaggaagaggaagaggaggaaggcgacggcaacagtgaccagctcatgggcttcgagagagactcggaaggtgggttttcgggtcttggttaaggattagcggccgctggagaccccagcccttcaggaggcaggttaggtgaacagaacaccatttcctgccacaaccgagggctggtttagtttacatttgagctagatgacttcatttgtttaatggtccaatcacttccatcactttgttgaggtgaagttctgaggcctggtcaaaggtgataggaataggagggtgggtgaatcacatggagcaactgattaaaagtaaatgccctgtctctctccctagcccattccttatgtgtatttacttttaagagaggttcagggaagcaaactctctgtaaatcattcaacccagtatttaggtctaatctaactccctttcacctgcagcgtaagctccttttgtattgagaggttttagtttctgtctttatccttccatgtccctcttccctgtgatcttagcatcaccctaccctaatttgctgcactacccatccacttatgcaagatgttttttgaaagtcattgaggggatccatgtaaatatctgttctttaggcaggcaagtggtattacatgcattactttcattgtctccacttccctccaaattttgcctcagagataggttttattttatatcagctccttactaaaaggggccttagcaatagagcttagaaaaaggtcttgggggctctctccctttcgtatttttactttcttgtctcaagaattaatttcattatggattcatttcagtctgtgatccactgtgagcccttgatccttgaccattgagggaaactagatacaggtcaattctaccatcactagattagtccagtgtaagaggtagacaattcatgttgaattttctggaattactgcaggggagaccttgattcctaggagggaactaaagggatcatcaaagctaagggtggagccaagcaagtggggagaccataagtgaaaaggggagagtttggagcctgatcctaccctatgctgatgtctcttcttatgtctatttcaccaggagactctctgggggccaggcctgggcttccctatgggctgagcgacgatgagtctgggggcggccgggcactaagtgyggagagtgaagttgaggagccagccaggggtccaggggaggccaggggtgagaggccaggcccagcctgccagctgtgtggggggccgacaggtgaggggccgtgttgtggggcaggagggccgggtggggggcccctgctgcccccacggctactgtactcatgccgcctctgcaccttcgtgtcccactactcgagccacctgaagcggcacatgcagacacacagcggagagaagccgttccgctgtggccgctgcccctacgcctcagcccagctcgtcaacctgacacgacatacccgcacccacactggcgagaagccctaccgctgtccccactgcccctttgcctgcagcagcctgggcaacctgaggcggcatcagcgtacccacgcagggccccccactcctccctgcccgacctgtggcttccgctgctgtactccacgaccagcccggcctcccagtcccacagagcaggagggggcgrtgccccggcgacctgaaggtaagacacaccagggaccaaagatcttgggacatgggtggctgaccctaggaatgcttggattggattcatagcccaggtctttgtccccacagatgctctgctccttccagatttgagcctccatgtgccaccaggtggtgccagtttcctgccagactgtgggcagctgcrgggtgaargggagggcctctgcgggactggatcagaaccactgccagagctgctattcccttggacctgccggggctgtggacaagagctggaggagggtgagggtagtcggctgggagctgccatgtgtgggcgctgcatgcgaggagaggctggagggggtgccagtggggggccccagggccccagtgacaaaggctttgcctgtagcctctgcccctttgccactcactatcccaaccacctggcccggcacatgaagacacacagtggtgagaagcccttycgctgcgcccgctgtccttatgcctctgctcatctggataacctgaaacggcaccagcgygtccatacaggagagaagccctacaagtgccccctctgcccttatgcctgtggcaatctggccaacctcaagcgtcatggtcgcatccactctggtgacaaaccttttcggtgtagcctttgcaactacagctgcaaccagagcatgaacctcaaacgtcacatgctgcggcacacaggcgagaagcccttccgctgtgccacctgcgcctataccacgggccactgggacaactacaagcgccaccagaaggtgcatggccacggtggggcaggagggcctggtctctctgcctctgagggctgggccccacctcatagcccaccctctgttttgagctctcggggcccaccagccctggggactgctggcagccgggctgtccacacagactcatcctgaactaggtccttcttccccatgttttatacagacggaccagaagccacctttttctcccccgctggccaggggctccacacagactaacgtaggcactataaggaccagcccaaccccatgggcgggggggcccatatggaccaggggaccttgccttgactgaggcacttcaygagctcagtgagaagggccctgtattcacctccactgcccccaggggctgtggacaaaccggctgggggactgcccagcctcccacctgtttatttaacttatttcagtgctttataataaaggaaacactaacaaagccatgtctatgctgaattggcaatggcaggcaatttggccttacccttagcatagtagtccatgctgtgatgggggaagcaggggcagtgagagggaaccagaggtaggcagcagtcaggctgagtttaatgatggggaactgggccagaccaaacacakacctctgcccatccccttggcctttggcccatggctccaagaggccagaagcggcccagagggagatatggttcctccccaaggcaggcagccatggtcccttagactttgtgcaaaatactaaatgctaatttggcatcgagggccagctctgaaaagagaaggggcaatcctctgtgcagccagcmcaggggacaaggaaaggtaggatacsaggyccctggccaagaraaaaggggtaggtaggaaagaagaaggaaaagacccctccgcccctagcatgggggacacaggcacagggcaagtttctgtaaattcctctggggtagagggcagacatccaagcagtggagattacagatcctcatctccaatgccctcgaaggcgaaattgccgtggacatcactggcactggcatctgtgctgggactgccaattccccgcaagctcacggcactcagcttactctgtaacaaaggcagggtggggtcagagatcttgggcgtgcaagatcccccaacaaacagcaacctcaccaacgctggaactcactgagagtttgaccatagactcccgggtggcatcaggtgactcctggggaagaagaggcagaggtgtcagaaactcactaggagaggtgaggcagggctgagagccagggttctgaccaggaggtaatacttacaagcagtggtggggacttcactgcttgctggctgtctgagcgtctcagagtaccccccacccgccggcgcagcatctggggacagacacaaggtgccggtgagggcaggatcacttcccctccctctcaagacaagcctcacatctaggacaaaaggcaaggggagcacacctgctcactgctcagtccacacttgctgcctaccttcctgatactgccgccagatttcttcaccatcagttcatcaaccatggactgcaagcagatgctcatcatgatagcctgagggcaagaagagtgtccagcttgatgagagtggtcactctgagcccagcaccactaatgcctcccatattgagtactggaaactctacactttaaggtgctccagaggagggctgagggtaggttcacacctgggggctagtgatggtgacccactgtagccggtccttgctcatgaggtattcaaaagccagttccaggcgcacctcaccccggccccggcctgggctgctcgtgcttccactgggcaatggtacctgggagaggaaggggaattcggttgagttcactctgaccaacctgtctggctccctgacccgctgcagcccatacctaagctcaaggcttgccgggcccccaacccaggcccttccccctcctaacccgactcacagaggaggtgacccgccagcatcgcatgcgggtgacccggaaggagccttctcggagttgctggccaggcaggcggagctgcaggctgagctcactgttgcccgcgctcaccaccacaggacagtccttttctgggaagtcagccacacaggcatcaaagcgcaagtagccatagtgccgcagcgtctgggccagtctcaggaactgaaaaatggtcatcacatgggggtagattaggagggagaatggggcagctcagaaaaagcaaccccggtcgggcgcggtggctcatgcctataatcccagcactttaggaggcagaggcagacagatcacaaggtcaggagctcaagaccatcctggctaacatggtgaaaccctgtctctcccaaaaatacaaaaaattagccgggcgtcgtggcgggtgcctgtagtcccagctactcgggaggctgaggcgggagaatggcatgaatctgagaggcagagcttgcagtgagccaagatcgcgccactgcaagcccttagaggaagacagagaggaggcagggctcacctccttcttggagactttctcttgcagagatttgagttgccggtgctgttccttggtgaccaagatccacccacgctcaatatctgataccgtctatagtagagacaaggggcaggcagtaggaggtcccagtcagcaatccaaggaaagcgtctaccattacctctgtccagcctgacccctagccccacacttgagcgacctctctgcagtaagtccttgatcttgtcagcttaataaaagtagggagagtagatattgtgccagcagcactgatagtattctaggaacttccccacaaattgggaacaaagacacgacagcagttttctt

SEQ ID NO: 94937 - DNA, 17673 bp, Homo sapiens
agtcctgctcccatccaaggccaatccctctatgtgtgccgttgatcccattcttattcaccttctgaaagacttgacatcttcagtcattcgctctttcccctgcatcaacgtatcactgatgtaccattcccacaagcttataaaaatactctagaatttcccaacttataagaaccctctcttaacccttcaacccccaacaaccactacatcatttttgggtttccctttcacagcaaaagttctcagaatatttgtccacagatatatctccacttcctcacctcccatttgcactaagtctgagaagccagagaaatgtccattggcttaagttgtatagaggtttatcaatgacctttataaaacacttccagtgatatactttcataacaactcattatatttctcaaattttcttctctcttcactgtgaccaaaacctctaacttttatatatattttccctgtctctaatttattctgagtcattctcagaggtagtcattctctgaccaccctaaagtccttcttcacatccattacaacatcattctatttccctcaaaatacttagtgctctctaattgctacttatttatttacttgctttgtctgtcaccttctcccctcctgtgcccacactggaatgcagactccatgaaggtaaagaccttctctgttttcatcacagttacattccagcgcctccacagtgcctaatatacagtggtagccgataaatgtttcttaaaggaaggaatggggcatggctagtattaaataagctcactgtccttaccacaccataaaccagaacccatccacatgtatttgcccttgcttgggagagctctctgagtacaggagttggcttgatccatttttttatccttagtacattagcacatccctgcacatagtggttgttcaataaataactgttggtaagttaaaatttaaaatatattgacttgtttttgtttcctgaaacaggatcttgctctggtacccaggctggagtgcagtggtgcaatcatggctcatttgcagcttcaacctcctgggctcaagtgatcctcccacctcagcctcctgggtagctgggactacgggcacgcaccaccacactcggctaattttttgtagagacagggtttcactatgttgcccaggctggtctttaactcctgggctcaagtgatccacccaccttggcctccccaaatgctggaattacaggtgtgagacagcacgcctggccttcatgtgttcttatttggggtacaaagacattaattctctatttgatgaaaaacgtttataaatacaattttggaaaggaccttggaaattatccctgtcaaaaagcttactgtaccacaattatattaatggcctaagggaaactcttttctacttaagtcttccttaattcccactttcttcatttagattatgaagtaacatgcaaggtatcttgcagctagaactgagtaagttcatattaaaactgttttgcagacagaccaagatttcaacagatgaaaagatattttcactacaattattcataataaagctatatctttatcaaacattcactacttactgatatcttagtcgtatatatgatgaaacaccaggaattctgaagagttctttattaatctaaaaaataaataaaagccttatgaatgtggtattatgatttcattctgtttataattatggtgtttaatttgtatcttgccctaaggcatcaggagcagcagcaagtagtataatacgtggtccttttttaaaaaagagatctgtcattaattttaggaatcttaagcttacataacagataataaaagacataaaaatatttaggaagtttttttttaagttgacattaccttatgttattgagaatcatagaagaggtgggatttaagattactcactaaggattggtaagacatgggtagaaacaaagagaaggtactcaaaacagaggagtaacaggagtaaaggaataccagacatctcagatctctacacttttgagtaagttttaaagtaccagtgaaaaaactagcctggaaaacattcacaaaagcaaaaaataaaagataaggcctaatgaacagaaaggggccagatagtgaaaggccttggaaactgtgaacctagtcctgcaggcaacagaaacattttaagactcattatcaagtagaaagatggcatgatacaggtaattctgtattttggggatattagctggtgtgtatgattgatgagatgatacagaaagcagggagataaaaagcgaaagtatttagtggaccaccccttcctaacgttactgattctatcttgtgaccaaatttcttcagtctcaaattgtattttatagctctgcgacatgaatatattagttgttatctaagtaaccaaggtttgaaatgctacatgctgattcttcacttctgggacagtctattattaccagttcctgattattcttccctcaggaacgctttgcacatcattccctttctatcccactgccagtaccctaatacaggaagggcctcactaccttatgtttgggtttctcagtttctctgcctccagtatttcctcccttcatccaacctaaacattgctaccagattcatcttcagaaataccctgcacctattaccccttgctcagaaatctctgaaggcttcttactgcttgagaaaagacaaaccaaatgccttaactggcaatggaggttgccaggaagccaccctgacatcactgctcaatgtcttcaggcccagctcatgttccacctccttacaaattcccacatctagtctagactagaacagctctgtcaacagacatataatgcgtgccacaaatgtactttttaatttcttcatggccacatggaaaagtgaaaaagaaacgggtgaattttaatgaattttatttaacccaatagaaccaaaatattatttcaacatgtaatcatgttgaatattttacattttcatattaaatcttcaaaatccactgtgtattttatatttacagcacatttcaaatagactaacgacatctgaagtgctcaatagctacatgtggctagtgactaccataacagtgcagatctagactccagaccataaaaaccaatgctttacactatagagcatcatgttgtcacccctaaagtgcaggttggcaccatcctatgtttatgtacatgtctcagactaagttttaatagtattgccaaccatttactctcccagactaaaaactcaagtcaccttcttaccattaacttagcagtcagcaggtgaatcccatttgacatttacttagtgtctctctgacctcctttatgtcctgcctccatggaggccctcattgccttacctgaatgattgcccatttcctttcatctagtttttctgttcccagttgatcctccatatagctgtcagagaccatcctaaaaaaacaaatatcctcctgctcactccttgcacaaaatatccactggattcctggtaactactgaaaaaaatctaaactccctattggaaaccaagatccttcacaagctgatcttaacctacctcttgcttcaccaatcactcgtgcactaaatgctcaggcaggttgattatcccactctccctaagtatgctaaagcttctcaaagctctgtattcctgtactgaatcccgaaattaccttctccttttgagctcagcaaattccttttgatgctatatgacccagctcacatatttactcctttataaagcctttttgttgccctaggcaaagttagttattttgttataaaggaggcacataaagtatttgttgaatggatgttcaatgtatagaggagtaaaagtgatcatctttgtatatccaataccaacttcagtggtcaaggcagcataaatgggtactgcaagaaggaatgaagcctcatcatatcataaattccttcagagcactggttttgacagatactacttcatcgcaaatatctcacagttacttgccctcttaataataatcgtgcatgttgccgggcgcagtggcttgcgcctttaatctcaacactttgggaggccgaggagggcagatcacttgagctcaggagttccagaccagcctgggcaatatgacaaaaccccttctctactaaaaacacaaaaaagtagccgggcgcggtggctgcgctggtgaccccagctacttgggaggctgaggtgggaggattacttgagcccaggaggcggaagttgcagtgagctgagatggcaccactgcactccagcctgggtggacagagcgagacccggtctcaaataataaatcggccaggcgcggtggctcacgcctgtaatcccagaactttgggaggccgaggcaggcggataatcctggccaacaaggtgaaaccctgtctctactaaagctacaaaaataggtgggcgtggtggtgcgcgcctgtagtcccagctactcgggagtctgaggcaggagaatcacttgaacccgggaggcagaggttgcagtgagccgagaatcgtgccactgcactccagcctgggcgacagagcgagattccttctcaaaaataaaaaataattaccgtgcatgttgatgacaactaaggtgaactaagcaaaatccaagggaaaacagaggagtttgggttagccctggagctcactgagtggggaaggctcttctcggtcagttgagggagagccccagtttcatactggggttgcaaggccgggcatggtggctcacgcctggaatcccagcacaggccaaaatgggaggatctcttgagcccaggagttcgacaccggcctgggcaacatagtgaaaccccgtctttattaaaaaaaaaaaaaaagaaagaaaaaagaaaggggttaaaggggttgtaaaattaaaaattaggggatgggtataaatgatagctcaggttcgcctggtcacaggaagccagacttgccggggttcaatctgacctcttcttttctaaagagcacgtaaaatagtacgaagtcaaaaaagaattagaacttcgcagtgatagtggaagcgctggagggcgatggcgggagggcgcgaaggcccaagacccttttagtacagtgtggtacaaacaaccgaaaggtctctggagtcgatgaactaaaaggacgcctaagcggtgtccagagcttagcaacctcgtggtctctcaacccaaaacgacgggaagagcccgagcaggggaggctaagaacgccgtagccacgaagccaaggagctaaagctggcgtcggtttaactcttccagcgccaagagatgaaaggggaagcagagggaagcagaaaggagggaagaagatcccgggagggaaccgtacgggctgccgcaaaacagctgggagcttgaaacccatggagaagtcacttctctttccctcgctgaccacttctgccgggaacgaccgggacagtcgcagccgaagcggcgggggcgagtcctcgggggagaccgggtcggagtcggggccccgtgctcccggagggccaatgacgccgccttccccagcccgaggctcgctcctttctcccgccctcacttgcctcgtcaggcctcccccaacgccgtccacagcccttcccaacccctaggcgaatccaggttcaagacgtagaaaagccgatgctgggtcagcagcgccagggactaccggccggcagaagccccacagtggcagccgccattttggagctggagactagcggcggagacgaggaggaaccagggcgagaccatctccggggggtgggcacggtgctgtcggaaggcgacggcggtcacgcctgcacgcctcgtctgtctggagcgaaattttattcagaaattattggtaatgtttggaagctaaaaaaaaaaaaaatgagaggagtcaaccctgaggaggaaaaagtagtatgatttgctggcgtcacccctctgctccgtgcgggcgcggcgaatggcaggtcccgaggtcgcagcttccactggcgcgggttgagttccctgttgcccttggtctcggggtcgctgtmggcgctgaggctgcaggtgggtttggggagcccggggggccgccgcgacgaggatcacggcgacggtggcggggagggttctaggcaagccctcggtgctgtgcatgtgtggaggggtggtctgggcttccccggggcttccgaacgaaggtgacgggaaaggaaaatggggttttcttcgggtggaggatgggattkccgggccggagcttttggaaagggttttctgaggctgtcataacaggaaaacgtccgtagagatgtgacccagtgaccgcccgctaaccggactggagagaagaccggcccggatcccacgcctggcctgaagcagggaagacgctgcctcccctccgcgagcagcttacattcgtccaagttccagccttctgtcttctcgctaacctcgctctyttccaaatcgcaaatcctcttgagccgacaccgttgcgcctaaatgatgygcttacccttttactttgcttttttatttttgagacagagattcactcttgtcacccaggctggagtgcaatggtgcaatctcggctcactccaacctccgcctcccgggttcaagcgattctcccgtctcagcagcccaagtagctgggattacaggcgcccgccaccacacccggctaattttttgtatatttagtagagacgagggtttcactatgttggccaggctggtctcgaactcctgatctcgtgatccacccgcctcagcatcccaaagtgctgggatwacaggcgtgagccactgcacctggcccaccttgccttttaaaagacaaaagtatggccaggcttagtggctcacgcctgtwatcccaacactttggaaggccgaggtggccggatcaagaggtcaggagtttgagaccagcccggccaacagtgaaaccccatctctacttaaaaatacaaaaattagccgggcgtggtggcacctgcctatagtcccagctactcggaaggctgaggcaagaaaatcacttgaacggccgggcgcggtggctcacgcctgtaatcccagcactttgggaggcctaggcgggcggaccacctgaggttgggaattcaagaccagcctgaccaacatggagaaacctcgtctctaccaaaaatacaaaattagctgggcatggtggcgcatacctgtaatcccagctacttgggaggctgaggtaggagaatcccttgaatccgagaggcagaggttgctgtgagccaagattgcgccattgcactccggcctaggcaacaagagcgaaacttcgtctcaaaataaaaaaaaaaaaaggaaagaaaaaagtatgaattgtataagcatgccagtgtaagaggagaggcagaaattcagtctacatagtcctagcacagcttagtgctaagcacttttgttggcaataatgtattgtctttctargatgtkgtcatatgtcttcttagtcaytgtacatgatttattagtttagtccaaacgcacacaggtgtattttgaattcatctgtatgcacgaatttttacagaaaattggcaatccaactatgtttttattgaattgtgcaatttattttccacatgatgtctattacaggttcagtatccctgatcagaatgttggaaatccaaaatgcccccatatgtgaaacttggggccacaagtttgagaccagcctgggcaacatagcaagatcttgtctctacaaaaaaaaatgtttaaagaatttttttaaattagcaccygtagctccagcttctcagaagattgaggtgggaagatcacttgagctcaggagttcaagactgcagtggactattataactccactgcactccatcctaggtgacagagcgagactatttaaaaaaaaaaaaaagtttcatataagattaccttcaggctatgtgtataaggtatatataaarcacaaatgaattttatgttttaattcggtcctatccccaagatagctcattatgtgcatgcaaatatttcaaaatcaaaaaatcgaaaacacttcgggtcccaagcatttcggataaggaaaaacctatagttctattcctcctcatctaccttctggaaactcagcatttaaaagcttttaagtaccataaacatcaattcaggaaggggtttcttaggcatggsctataatagcagccagagctgtagagtgaagctgaatttgaactccagctctgtacttaatagctatttggattaagctgttttcttatctgtaaaatgtaaataatagttatttcacattacgtatagaaatagatgatggctctggtacctagtaacctagtagtcttttttttttttttgagacagcatcacgctctgtcgtccaggctagagtacagtggtgtgatctcaggtcattgcaacctccrtctcttgggctcaagcaatcctcccacctcagcctccgaagtagctgggactacaggcatatactaccacacccagctaattttttgattttttgtagagacagggttttgccatgttaaccaggctagtctcaagctcctaggctcaagcgatccatccgccttagtctcccaaagtgctgtggttacaggcatgagccacctagtagtcactctataaaagtaaattttcttctccctttgcctttttttttctttcttttttttctgagacagagactcgctgtatcccccaggctggagtgtagtggcgtcatctcagctcactgcaacctctgcctcccgagttcaagcaattctcctgcctcagcctcctgagtarctgggactacaggcatgtgccactacgcccacctaatttttgtatttttagtagagatggagtttcaccatgttggccaggctggtctcgaactcctgaccttgttgtcgtccacccgcctcagcctcccaaagtgctgggattacaggcgtgagccactacacccggcccctttaccttttttagagtaatttatattcatatctacagtgacattattgaatatagttttcttttttctctcatatcttttaatttcctttctaaatttagttttcagtaattacagctttacctaaagaattccatttctggcaaaattgtattaaatttgtttttgcattgtgagaggttctaaatatgttttacacaagtaaaagtcctaaatgagagccaggtgcagtggtgtatgcctgtagtcccagctacttgggaggctgaggcaggaggaatgcttgagcccgggagttgagagctgtagtgcctgtgaatagccactgccctccagcctgggcaacatagcaagaccttgtctcttttacaaaaaaaagttccaaaacaacatgaggagggtgcaaacaatcagctgttgcaggtagaatttttttacataccatctctgtttctctgctctgtatcgtatcacatcactattgaagctagtagtaaaatgtaataaatagacccagtgtggtgtaattttatattaatcattgtcccgtatgtaatcttcatcaattagattttaaartattatactacattctgatgccaggcaaacaaagaggcgtattaggcttttaacatctattacatctatgtctrtcatcttcttgtttcagatgcaatttatttattttattgagatggagtcttgctctgtcgcccaggctgaagtacagtggcacgatcttggctcactgcaacctccgcctcctgggttcaagcaattctcctgcctcagcctctccagtagctgggataacagaygcgcaccaccacacccggctaatttttgtgcttttagtagaaatggggttttgccatgttggccaggctggtctcgaactcctaatctcaagtgatctgcccacctcagcatcccaaagtgctaggattacaggcatgaaccaccgcaccyggcccagatgcaatttaaaagctatttcaaaaaaaaaacaaagcagttgtatttctgataatttttttttcttttagctatcatggtgaacttacttcagattgtgcgggaccactgggttcatgttcttgtccctatgggatttgtcattggatgttatttagacagaaagagtgatgaacggctaactgccttccggaacaagagtatgttatttaaaaggttagtctgcatttttttaaaccagcaattggccaaatttggggaatattctttttgataygtgccaaaaataaacagaaggggtaatttttcccccttgaggacttagattcaaatgatactgtttttagtcttgtttgttattgaatccttggataaaacagtatgattacctctagaatttaaagtcttcatttaatgaataggctgtttcaggtctttgaaagtatcgtctttttttaattcaaagtgcattttaatayagaaacagtttaaaagtagctggccaaaacctagcttatatacagcttccacatatattgtcatatattatcttacttaagacatgctatagctgagataaatagtaataacagcagctaggtgctgtgttcttagcagcactacctgagagctttagacctggtggtagagtgatagcaactggcagctgcctggtcccattgtgcctctagagatggctcctctggcagcagagagttccagttagcaagacaggatgcctgccagtgggcatacagctgggtaggaggaagcctgaggggcaagagaactgagcagcatccacagtgggtatggagagatggtagaagtgattcacaaatcagggatttcaagaaagaaaataagctggaaagggtttagaaaacatttsgaatgaactcactgagcagagataatagctttcatataaagataaactaagtaattacaattctttaacccagaaaaatgaagctaacaatatggtaaaagttaaaatcatgaatgaaaagaatacatatgatgaatctaatatgtaaattttttaaatggatcrgtgtaatagaaaataaaatattgaccgggcgcggtggctcacacctgtaatcctagcactttgggaggccgaggcaggtggattccttgaggtcaggagttcgagaccagcctggccaacatggtgaaaccccgtctctaccaaaaatataaaaaattagctcggtgtggtggcacacagctgtaatcccagctacttgggagggtgaggcaggataatcgcwtgaagccaggaggtggagtttgcagtgagccaagatcgtgccactgcactccagcctgggctacaaagccagacttcgtctcaaaaaaaaaaaaaaaraaaagaaaatgaaatattgcaatcwttcttctgacttccccttttatctcgtatcacagttttatttacagtttttccatttcttccttttttgctttccacacagggaattgcaacccagtgaagaagttacctggaagtaaagactggctagattatcgaatgttcacattttaaagttctgagagaaataaaaacatgaagaatytgaaatgtctttcttttcatacaaaggtagcccttctggtaacaagcatacttaaaaaataattattagggcccagcgcggtggctcacacctgtaatcccaacactttgggaggctgaggcaggcagatcacctgaggtcaggaattccagaccagcctgaccaacatggtgaaaccccatctctactaaaaatacaaaaaattagccgggtatggtggcgcatacctgtcctgtcaggcaacagagtgagactccatctcaaaaataaataataaataaaataataactcttaggtacctgattgtataccgtggtattaaatttataattagcatttaatttgctgtttctcattttgaaccacagtattattaaatcatggagcaaattttttatcatatatttttcaaaaaaaatttcaaaccttgtgcttcaacgggacttaaaaaggatgatgccaagattttatttgataaaaatcacatactgaaaattttaagtgaccttagctttggcaaagctttttcctttttccaaatgtaggatacacacaggaagcaaggatttttaaaatacaacacacaaaacatgaattaatttaaaaaataagttgtactttatcaaaatttaaaattttgctcttcgaaaaacacatccagaatatgtaaacaatccttatagcttaagaataaacaacctaacttttttttttctgagacggagtcttgctacgtcgcccaggctggagtgcagtggtgtgatctgcaagctccgcctcttgggttcccaccattctcctgcctcagcctcccgagtaactgggactacaggtgcctgccaccacacctagcgaattttttgtatttttagtagagactgggtttcaccatgttagccaggatggtctcgatctcctgacctcgtgatccacctcagcctcccaaagtgctgggattacaggcgtgagccactgcacccaccttcaacaacttaactttttaaatgggcaaaagattttaacaaacactgccaaaagagataagaggatggcaagtaagcacatgaaaagatactcaacattagtagtcactagagaaatggaaattaacagcaaaatgagatggcactacacacctattaaatggttaaaattaggctggctcacgcctgtaatctcaacactttgggaggctgaggcgggtagatcacctgagctcaggaattcaagaccagcctgaccaacctggtgaaaccccgtctctactaaaaatacaaaattagccgggtgtggtggtgcatgtccgtaatcccagctacttgggaggctgagggaggagaatcacttgaaccccaggagcggaggttgcagtgagccaagatcatgccattgcactccaacctgggcaataagagcaaaactccgtctcaaaaaatagatttaaataagtaaaaataaaatggttaaaatttgaaagactgactaccaattgttggcaaggatgtagagcagctagaaggcacactgctggcaggaatataaaatgtagccaccagtggttgtcccaccttggaaataagtttagcagtttcaggtaaaacacacctaccacttgacccagccatcccagtctgatttatttacccaagagaaatgaaagcatatatccacacaaagacttttacatgaatgttcatagcagcttgattagtaacagccaaaaatgagataacccaaatgtcttatcaacataggaatggataaagtgtgttgaatccatatcatagactactacccagcaatgaaaaggaatgatctattgatacataatatggatgaatttcaaactaacagtgctgaatgaaagtagccagataaaaaagaacacatgctataggattctgtttatataaatagaaaatgttataaacagcaatctgcagtaacaaagcagttcagtggttgagagatcaaggtctggaaggtgttataaagaattacaaggaggctgggccaggcgcagtggcaatgcctgcaatcctagcactttgggaggccaaggtgggcagatggcttgagcccaggagtttgagaccagcctggaaaacatggtgagaccccgtctccactaaaaatataaaaattagctgggtgtggtgcggtgtggtgggtagtcccagttactcaggagtctgaggtgggaggtcacctgagcctgtggaggatgaggctgcaatgagccgtgattgtgccactgcactccagtctggaagacagagtgagcccgtgtcaaaaaataaaatataaaataaaaacaatagagaagtaaactcttttaaaaatattcctttgccttcaatatatgaaagaggagattgatgaataatacttgaaaaatctgtaatcaggaagagcagaatatttttagaaaggacaaaaatagcactaatcagaaacattaggttttatttcttttgttttctttggtttgtttcaagcatatatactttattgcaagcaatattacacctaagtcttttgtccttaarggatatatggagagtttcaacacaatgctgttgtgtgtatttttttctacctccctttcctggaaatacgtgtagtattttttatgaaacataaattgctaatgccaagatctgtaatagtaaattggattctctcttgattcattttttataacacaatatcatcaagattcagttatcaatttttaaaaacatagccaggcacggtgactcacatctgtaatcccagcactttgggaggccgaggcaggtggattgtttgaggtcaggagtttgagaccagccttgccaatatggtaaaaccccatctctactaaagaacaaaaattagccaggcatggtggtgcatgtctgtaatcccagctacttaggaggctgaggcaggagaatcacttgaacccgggaagcagaggttgcagtgagccaagattgcaccactgcactccagcctgggcgatagagtgagacccatcttaaataaacaaacaaataagtaagtaaataaattgccaagttctactacctcttcttggaagccaaattttattaattgttttaggtaggatttaatttaggagaagattacgctgaaacgataccatttagttaccactgatttgtgttgattaatacacatcataatttttaaaatgccaaacatttgaaattctgttaaactatttcattttgggtaacaaaattcatgcgagtttggatttaataggtacagtgttcaagaagatggaaatagctctatgcaatctctcttgttaacacaagatttctttttttttttctttttttttttttttttttttgagatggagtctcactctgtcgcccaggctggagtgcagtggcacgatctcggctcactgcaaacttcgcctcccgggttcatgcccttctcctgtctgagcctcttgagtagctgggactacaggcgcccgccaccacgcccggctaaattttgtatttttagtggagatggggtttcaccttgagcatgcctacattaaagcaccattacatcatactggaagtattactttatatactactgaactatcagcttttgagggggcagaggaatcttactctttttttttttttttgagacgggagtcttgctctgtcgcccagactggagtgcagtggcacgatctcagctcactgcaacctccgcctcccgggggttcacgccattctcctgcctcagcctcccaagtaggtgggactacaggcgcctgccaccacacccggctaatttttttgtatttttagtagagatggggtttcaccgtgttagccaggatggtctcgatctcctgacctcgtgatcggcctgccttggcctcccaaagtgctgggattacaagcgtgagccactgcgctcgacctttttgtttttgtttttgttttttttttttgagatgtaattttgctctgtcacctagactgaagtgcaatggcgctatctcggctcactgcaacctctgcctcccaggttgaagtgattctcctgcctcaacctcccgagtagctgggattacaggcacatgccaccacacccagctaattttgtatttttagtagagacgggtttttgccatgttggctagtctggtcttgaactcctgacctcaggtcatctgcctgccttggcctcccaaagtgctaggagttgagctgccatgcccggccaacacaagatttcaatgaagaagattacagaaaaggtgagtagcctaagatgacatagaaagtgtactggaagtgcatctatgtggtctattctgtctccatgaactctttcctgattagctcagtaacttctctctctcctactgaattattggtaattttttgtgccagtcaatcaaaaagacttcatgcattaattcattgctctatagcaacccttgacctaaagagtaagattcctgcactttgggaggccgaggcaggccgatcacgaggtcaggagatcgagaccatcctggctaacatggtgaaaccctgtctctactaaaaatacaaaaaaattagccgggcatggtggagggcgcctgtagtcccagctacttgggaggctgaggcaggagaatggcgtgaaccctggatgcggaggttgcagtgagctgagatcacgccactgcactccagcctgggcgagagagtgagactctgtctcaaaaaaaaaaaaaaaagaagagtaagattcctctgcccctcaaaagctgatagttcagtagtatataaagtaatacttccagtatgatgtaatggtgctgtaatgtaggcatgctcaaggtgtagcggtggcacaaaatacttttccttagtgaactttccagaagtaaaaggaagaagctagtatgactagagtctggagtgactggggcagagagaatttggggagaacagaacaggacaggtggttggtccagatcacagagcttttcaggccagcaataggatggcaataggaagtcactgaaggattttttttttttttttttttttttgaggcagagtctcactctgttgcccaggctggagtgcactgttgcgatctcatctcactgcaacctctgccgcccaggttcaagcaattctgcctcagcttcccaagtagctgggattacaggtgcccaccacaacacccggctaatttttgtatttttagtagagatggggtttcaccatgttggataggctggtcttgaactcctgacctcaggtgatccacccgcctcggcctcccaaagtactgggattacaggcatgagccattgcacccggccatcactgaaggattttgaagtcagagttgtgtaatcatttaagaatccctgccaatgtaagtcccctgaaggtgggactgtttgtgtttttcatggttatagtcccagggcctgatatgcagttattcttgttaaacaaaagaaaatcttgtgagatttgcatttttggaagatcactgacagcaccatgaattagacatattgagactggaatcagaagaccaattcaaagatccttggactagagtacacaagataccaagagggcttgaactaagtagtagcaatgaagacaagggcaagagagagttaggagtggatttatagcatttgaggactgattggaataaggggtgacgtggagaagttgtgggaagagaataaaaaatgattcccagatacttggtgctatgatctgaatgtttgtatctttccaaaattcatttgttgaaatgtagtctccagtgtgttggtttaacagatggggcctttgggagatgattagatcataaggccaagccttgtgactgagattagtgcccttatgcagagaggaagcttgtttgccccttttccccttccaccatgtgaggacaaaaaaatgcaccatctatgaggaatgggccctcaccagacactaaatccgtt

SEQ ID NO: 94938 - DNA, 53455 bp, Homo sapiens
  misc_feature (1)...(53455): n = A,T,C or G
taccacggtatacaatcaggtacctaagagttattattttatttattatttatttttgagatggagtctcactctgttgcctgacaggacaggtatgcgccaccatacccggctaattttttgtatttttagtagagatggggtttcaccatgttggtcaggctggtctggaattcctgacctcaggtgatctgcctgcctcagcctcccaaagtgttgggattacaggtgtgagccaccgcgctgggccctaataattattttttaagtatgcttgttaccagaagggctacctttgtatgaaaagaaagacatttcagattcttcatgtttttatttctctcagaactttaaaatgtgaacattcgataatctagccagtctttacttccaggtaacttcttcactgggttgcaattccctgtgtggaaagcaaaaaaggaagaaatggaaaaactgtaaataaaactgtgatacgagataaaaggggaagtcagaagaatgattgcaatatttcattttcttttttttttttttttttttgagacgaagtctggctttgtagcccaggctggagtgcagtggcacgatcttggctcactgcaaactccacctcctggcttcawgcgattatcctgcctcaccctcccaagtagctgggattacagctgtgtgccaccacaccgagctaattttttatatttttggtagagacggggtttcaccatgttggccaggctggtctcgaactcctgacctcaaggaatccacctgcctcggcctcccaaagtgctaggattacaggtgtgagccaccgcgcccggtcaatattttattttctattacacygatccatttaaaaaatttacatattagattcatcatatgtattcttttcattcatgattttaacttttaccatattgttagcttcatttttctgggttaaagaattgtaattacttagtttatctttatatgaaagctattatctctgctcagtgagttcattcgaaatgttttctaaaccctttccagcttattttctttcttgaaatccctgatttgtgaatcacttctaccatctctccatacccactgtggatgctgctcagttctcttgcccctcaggcttcctcctacccagctgtatgcccactggcaggcatcctgtcttgctaactggaactctctgctgccagaggagccatctctagaggcacaatgggaccaggcagctgccagttgctatcactctaccaccaggtctaaagctctcaggtagtgctgctaagaacacagcacctagctgctgttattactatttatctcagctatagcatgtcttaagtaagataatatatgacaatatatgtggaagctgtatataagctaggttttggccagctacttttaaactgtttctatattaaaatgcactttgaattaaaaaaagacgatactttcaaagacctgaaacagcctattcattaaatgaagactttaaattctagaggtaatcatactgttttatccaaggattcaataacaaacaagactaaaaacagtatcatttgaatctaagtcctcaagggggaaaaattaccccttctgtttatttttggcacatatcaaaaagaatattccccaaatttggccaattgctggtttaaaaaaatgcagactaaccttttaaataacatactcttgttccggaaggcagttagccgttcatcactctttctgtctaaataacatccaatgacaaatcccatagggacaagaacatgaacccagtggtcccgcacaatctgaagtaagttcaccatgatagctaaaagaaaaaaaaattatcagaaatacaactgctttgttttttttttgaaatagcttttaaattgcatctgggccrggtgcggtggttcatgcctgtaatcctagcactttgggatgctgaggtgggcagatcacttgagattaggagttcgagaccagcctggccaacatggcaaaaccccatttctactaaaagcacaaaaattagccgggtgtggtggtgcgcgtctgttatcccagctactggagaggctgaggcaggagaattgcttgaacccaggaggcggaggttgcagtgagccaagatcgtgccactgtacttcagcctgggcgacagagcaagactccatctcaataaaataaataaattgcatctgaaacaagaagatgatagacatagatgtaatagatgttaaaagcctaatacgcctctttgtttgcctggcatcagaatgtagtataatactttaaaatctaattgatgaagattacatacgggacaatgattaatataaaattacaccacactgggtctatttattacattttactactagcttcaatagtgatgtgatacgatacagagcagagaaacagagatggtatgtaaaaaaattctacctgcaacagctgattgtttgcaccctcctcatgttgttttggaacttttttttgtaaaagagacaaggtcttgctatgttgcccaggctggagggcagtggctattcacaggcactacagctctcaactcccgggctcaagcattcctcctgcctcagcctcccaagtagctgggactacaggcatacaccactgcacctggctctcatttaggacttttacttgtgtaaaacatatttagaacctctcacaatgcaaaaacaaatttaatacaattttgccagaaatggaattctttaggtaaagctgtaattactgaaaactaaatttagaaaggaaattaaaagatatgagagaaaaaagaaaactatattcaataatgtcactgtagatatgaatataaattactctaaaaaaggtaaaggggccgggtgtagtggctcacgcctgtaatcccagcactttgggaggctgaggcgggtggacgacaacaaggtcaggagttcgagaccagcctggccaacatggtgaaactccatctctactaaaaatacaaaaattaggtgggcgtagtggcacatgcctgtagtcccagttactcaggaggctgaggcaggagaattgcttgaactcgggaggcagaggttgcagtgagctgagatgacgccactacactccagcctgggggatacagcgagtctctgtctcagaaaaaaaagaaagaaaaaaaaaggcaaagggagaagaaaatttacttttatagagtgactactaggtggctcatgcctgtaaccacagcactttgggagactaaggcggatggatcgcttgagcctaggagcttgagactagcctggttaacatggcaaaaccctgtctctacaaaaaatcaaaaaattagctgggtgtggtagtatatgcctgtagtcccagctacttcggaggctgaggtgggaggattgcttgagcccaagagacggaggttgcaatgacctgagatcacaccactgtactctagcctggacgacagagcgtgatgctgtctcaaaaaaaaaaaaaagactactaggttactaggtaccagagccatcatctatttctatacgtaatgtgaaataactattatttacattttacagataagaaaacagcttaatccaaatagctattaagtacagagctggagttcaaattcagcttcactctacagctctggctgctattatagcccatgcctaagaaaccccttcctgaattgatgtttatggtacttaaaagcttttaaatgctgagtttccagaaggtagatgaggaggaatagaactataggtttttccttatccgaaatgcttgggacccgaagtgttttcgattttttgattttgaaatatttgcatgcacataatgagctatcttggggataggaccgaattaaaacataaaattcatttgtgttttatatataccttatacacatagcctgaaggtaatcttatatgaaacttttttttttttttaaatagtctcgctctgtcacctaggatggagtgcagtggagttataatagtccactgcagtcttgaactcctgagctcaagtgatcttcccacctcaatcttctgagaagctggagctacgggtgctaatttaaaaaaattctttaaacatttttttttgtagagacaagatcttgctatgttgcccaggctggtctcaaacttgtggccccaagtttcacatatgggggcattttggatttccaacattctgatcagggatactgaacctgtaatagacatcatgtggaaaataaattgcacaattcaataaaaacatagttggattgccaattttctgtaaaaattcgtgcatacagatgaattcaaaatacacctgtgtgcgtttggactaaactaataaatcatgtacaatgactaagaagacatatgacaacatcctagaaagacaatacattattgccaacaaaagtgcttagcactaagctgtgctaggactatgtagactgaatttctgcctctcctcttacactggcatgcttatacaattcatacttttttctttcctttttttttttttattttgagacgaagtttcgctcttgttgcctaggccggagtgcaatggcgcaatcttggctcacagcaacctctgcctctcggattcaagggattctcctacctcagcctcccaagtagctgggattacaggtatgcgccaccatgcccagctaattttgtatttttggtagagacgaggtttctccatgttggtcaggctggtcttgaattcccaacctcaggtggtccgcccgcctaggcctcccaaagtgctgggattacaggcgtgagccaccgcgcccggccgttcaagtgattttcttgcctcagccttccgagtagctgggactataggcaggtgccaccacgcccggctaatttttgtatttttaagtagagatggggtttcactgttggccgggctggtctcaaactcctgacctcttgatccggccacctcggccttccaaagtgttgggattacaggcgtgagccactaagcctggccatacttttgtcttttaaaaggcaaggtgggccaggtgcagtggctcacgcctgtaatcccagcactttgggatgctgaggcgggtggatcacgagatcaggagttcgagaccagcctggccaacatagtgaaaccctcgtctctactaaatatacaaaaaattagccgggtgtggtggcgggcgcctgtaatcccagctacttgggctgctgagacgggagaatcgcttgaacccgggaggcggaggttggagtgagccgagattgcaccattgcactccagcctgggtgacaagagtgaatctctgtctcaaaaataaaaaagcaaagtaaaagggtaagcacatcatttaggcgcaacggtgtcggctcaagaggatttgcgatttggaagagagcgaggttagcgagaagacagaaggctggaacttggacgaatgtaagctgctcgcggaggggaggcagcgtcttccctgcttcaggccaggcgtgggatccgggccggtcttctctccagtccggttagcgggcggtcactgggtcacatctctacggacgttttcctgttatgacagcctcagaaaaccctttccaaaagctccggcccggmaatcccatcctccacccgaagaaaaccccattttcctttcccgtcaccttcgttcggaagccccggggaagcccagaccacccctccacacatgcacagcaccgagggcttgcctagaaccctccccgccaccgtcgccgtgatcctcgtcgcggcggccccccgggctccccaaacccacctgcagcctcagcgcctacagcgaccccgagaccaagggcaacagggaactcaacccgcgccagtggaagctgcgacctcgggacctgccattcgccgcgcccgcacggagcagaggggtgacgccagcaaatcatactactttttcctcctcagggttgactcctctcattttttttttttttagcttccaaacattaccaataayttctgaataaaatttcgctccagacaracgaggcgtgcaggcgtgaccgccgtcgccttccgacagcaccgtgcccaccccccggagatggtctcgccctggttcctcctcgtctccgccgctagtctccagctccaaaatggcggctgccactgtggggcttctgccggccggtagtccctggcgctgctgacccagcatcggcttttctacgtcttgaacctggattcgcctaggggttgggaagggctgtggacggcgttgggggaggcctgacgaggcaagtgagggcgggagaaaggagcgagcctcgggctggggaaggcggcgtcattggccctccgggagcacggggccccgactccgacccggtctcccccgaggactcgcccccgccgcttcggctgcgactgtcccggtcgttcccggcagaagtggtcagcgagggaaagagaagtgacttctccatgggtttcaagctcccagctgttttgcrgcagcccgtacggttccctcccgggatcttcttccctcctttctgcttccctctgcttcccctttcatctcttggcgctggaagagttaaaccgacgccagctttagctccttggcttcgtggctacggcgttcttagcctcccctgctcgggctcttcccgtcgttttgggttgagagaccacgaggttgctaagctctggacaccgcttaggcgtccttttagttcwtcgactccagagacctttcggttgtttgtaccacactgtactaaaagggtcttgggccttcgcgccctcccgccatcgccctccagcgcttccactatcactgcgaagttctaattcttttttgacttcgtactattttacgtgctctttagaaaagaagaggtcagattgaaccccggcaagtctggcytcctgtgaccaggcgaacctgagctatcatttatacccatcccctaatttttaattttacaacccctttaacccctttcttttttctttctttttttttttttttaataaagacggggtttcactatgttgcccaggccggtgtcgaactcctgggctcaagagatcctcccattttggcctgtgctgggattccaggcgtgagccaccatgcccggccttgcaaccccagtatgaaactggggctctccctcaactgaccgagaagagccttccccactcagtgagctccagggctaacccaaactcctctgttttcccttggattttgcttagttcaccttagttgtcatcaacatgcacggtaattattttttatttttgagaaggaatctcgctctgtcgcccaggctggagtgcagtggcacgattctcggctcactgcaacctctgcctcccgggttcaagtgattctcctgcctcagactcccgagtagctgggactacaggcgcgcaccaccacgcccacctatttttgtagctttagtagagacagggtttcaccttgttggccaggattatccgcctgcctcggcctcccaaagttctgggattacaggcgtgagccaccgcgcctggccgatttattatttgagaccgggtctcgctctgtccacccaggctggagtgcagtggtgccatctcagctcactgcaacttccgcctcctgggctcaagtaatcctcccacctcagcctcccaagtagctggggtcaccagcgcagccaccgcgcccggctacttttttgtgtttttagtagagaaggggttttgtcatattgcccaggctggtctggaactcctgagctcaagtgatctgccctcctcggcctcccaaagtgttgagattaaaggcgcaagccactgcgcccggcaacatgcacgattattattaagagggcaagtaactgtgagatatttgcgatgaagtagtatctgtcaaaaccagtgctctgaaggaatttatgatatgatgaggcttcattccttcttgcagtacccatttatgctgccttgaccactgaagttggtattggatatacaaagatgatcacttttactcctctatacattgaacatccattcaacaaatactttatgtgcctcctttataacaaaataactaactttgcctagggcaacaaaaaggctttataaaggagtaaatatgtgagctgggtcatatagcatcaaaaggaatttgctgagctcaaaaggagaaggtaatttcgggattcagtacaggaatacagagctttgagaagctttagcatacttagggagagtgggataatcaacctgcctgagcatttagtgcacgagtgattggtgaagcaagaggtaggttaagatcagcttgtgaaggatcttggtttccaatagggagtttagattttwttcagtagttaccaggaatccagtggatattttgtgcaaggagtgagcaggaggatatttgtttttttaggatggtctctgacagctatatggaggatcaactgggaacagaaaaactagatgaaaggaaatgggcaatcattcaggtaaggcaatgagggcctccatggaggcaggacataaaggaggtcagagagacactaagtaaatgtcaaatgggattcacctgctgactgctaagttaatggtaagaaggtgacttgagtttttagtcygggagagtaaatggttggcaatactattaaaacttagtctgagacatgtacataaacataggatggtgccaacctgcactttaggggtgacaacatgatgctctatagtgtaaagcattggtttttatggtctggagtctagatctgcactgttatggtagtcactagccacatgtagctattgagcacttcagatgtcgttagtctatttgaaatgtgctgtaaatataaaatacacagtggattttgaagatttaatatgaaaatgtaaaatattcaacatgattacatgttgaaataatattttggttctattgggttaaataaaattcattaaaattcacccgtttctttttcacttttccatgtggccatgaagaaattaaaaagtacatttgtggcacgcattatatgtctgttgacagagctgttctagtctagactagatgtgggaatttgtaaggaggtggaacatgagctgggcctgaagacattgagcagtgatgtcagggtggcttcctggcaacctccattgccagttaaggcatttggtttgtcttttctcaagcagtaagaagccttcagagatttctgagcaaggggtaataggtgcagggtatttctgaagatgaatctggtagcaatgtttaggttggatgaagggaggaaatactggaggcagagaaactgagaaacccaawcataaggtagtgaggcccttcctgtattagggtactggcagtgggatagaaagggaatgatgtgcaaagcgttcctgagggaagaataatcaggaactggtaataatagactgtcccagaagtgaagaatcagcatgtagcatttcaaaccttggttacttagataacaactaatatattcatgtcgcagagctataaaatacaatttgagactgaagaaatttggtcacaagatagaatcagtaacgttaggaaggggtggtccactaaatactttcgctttttatctccctgctttctgtatcatctcatcaatcatacacaccagctaatatccccaaaatacagaattacctgtatcatgccatctttctacttgataatgagtcttaaaatgtttctgttgcctgcaggactaggttcacagtttccaaggcctttcactatctggcccctttctgttcattaggccttatcttttattttttgcttttgtgaatgttttccaggctagttttttcactggtactttaaaacttactcaaaagtgtagagatctgagatgtctggtattcctttactcctgttactcctctgttttgagtaccttctctttgtttctacccatgtcttaccaatccttagtgagtaatcttaaatcccacctcttctatgattctcaataacataaggtaatgtcaacttaaaaaaaaacttcctaaatatttttatgtcttttattatctgttatgtaagcttaagattcctaaaattaatgacagatctcttttttaaaaaaggaccacgtattatactacttgctgctgctcctgatgccttagggcaagatacaaattaaacaccataattataaacagaatgaaatcataataccacattcataaggcttttatttattttttagattaataaagaactcttcagaattcctggtgtttcatcatatatacgactaagatatcagtaagtagtgaatgtttgataaagatatagctttattatgaataattgtagtgaaaatatcttttcatctgttgaaatcttggtctgtctgcaaaacagttttaatatgaacttactcagttctagctgcaagataccttgcatgttacttcataatctaaatgaagaaagtgggaattaaggaagacttaagtagaaaagagtttcccttaggccattaatataattgtggtrcagtaagctttttgacagggataatttccaaggtcctttccaaaattgtatttataaacgtttttcatcaaatagagaattaatgtctttgtaccccaaataagaacacatgaaggccaggcgtgctgtctcacacctgtaattccagcatttggggaggccaaggtgggtggatcacttgagcccaggagttaaagaccagcctgggcaacatagtgaaaccctgtctctacaaaaaattagccgagtgtggtggtgcgtgcccgtagtcccagctacccaggaggctgaggtgggaggatcacttgagcccaggaggttgaagctgcaaatgagccatgattgcaccactgcactccagcctgggtaccagagcaagatcctgtttcaggaaacaaaaacaagtcaatatattttaaattttaacttaccaacagttatttattgaacaaccactatgtgcagggatgtgctaatgtactaaggataaaaaaatggatcaagccaactcctgtactcagagagctctcccaagcaagggcaaatacatgtggatgggttctggtttatggtgtggtaaggacagtgagcttatttaatactagccatgccccattccttcctttaagaaacatttatcggctaccactgtatattaggcactgtggaggcgctggaatgtaactgtgatgaaaacagagaaggtctttaccttcatggagtctgcattccagtgtgggcacaggaggggagaaggtgacagacaaagcaagtaaataaataagtagcaattagagagcactaagtattttgagggaaatagaatgatgttgtaatggatgtgaagaaggactttagggtggtcagagaatgactacctctgagaatgactcagaataaattagagacagggaaaatatatataaaagttagaggttttggtcacagtgaagagagaagaaaatttgagaaatataatgagttgttatgaaagtatatcactggaagtgttttataaaggtcattgataaacctctatacaacttaagccaatggacatttctctggcttctcagacttagtgcaaatgggaggtgaggaagtggagatatatctgtggacaaatattctgagaacttttgctgtgaaagggaaacccaaaaatgatgtagtggttgttgggggttgaagggttaagagagggttcttataagttgggaaattctagagtatttttataagcttgtgggaatggtacatcagtgatacgttgatgcaggggaaagagcgaatgactgaagatgtcaagtctttcagaaggtgaataagaatgggatcaacggcacacatagagggattggccttggatgggagcaggactattctatacaacaggagacccaacagtgtacatgcagataggttaatagatgtagtatctggaaaatgagaaattattgtctaattttattttctgattgaagaatgaaatgagattatcagctgagactagggtggagggagggatgggtgatctttgaacaaagaggaggaggtgtggagtagtagtctcagaaactgaaagtcaacctactaagaaaagtcagattgaagggtaatacttacggcctgtttgaggcctttggccatgaatttaaagagcaaatagcgttagccaggtgtggtggcaggtgcctgtaatcccagctactcgggaggctgaggcaggagaaatacttgaacccaggaggtggaggttgcagtgagctgagatcttgccactgtataccagcctgggtgacaagagtgaaactctgtctcaaaaaaaaaagaaaaaaaatgggccaggtggatcatgaggtcaagagatcgagactattgtggccaacatggtgaaactccgtctctaccaaaaagaattagctgggcgtggtggtgcatgcctgtagtcccagctactcaggtggctgaggcaggagaatcacttgaacccgggagatggaggtggcagtgagccaagatcgtgacactgcactccagcctggcaacagagtgagactccgtctcaaaaaaaagcaaatagcacagctgtaattctcctccatatcccatccccccgccggcccygcatgattggagttaatcaggactggggttttgccagcctagtagagagaagtacctagaggagcaagacatttgagtgtttgcaaataatgttaacagatcatgaattgaaggtgaggacctgagtaaaaacaggagggggtcatggatagggaaaaagtagtcagcgaattagagagataccactgaccccagaggatttttgcaatgggaatactagagtaagtaaggtgttagagaatgagatgcttgaagtgaaattttgaaagtagaacagttactggtagtgataaggtctagggtgtaatcgtagtggtgggtggctgaagtgaaatgattattggagttgaggaagtcaaggaaccaacaggtcagtattgaagttactgagaggaacaacgggtcatgtaaaagtcctcagtgaatgaggccaggtgaatagatgccatagtgaagaggaaatgtggaagactaatagtgaactgctgggtggcaagagctttaatgggactagactatttgaaagaggaaagagaagacatggtttagaagctgcagtgaggagcaaggaacacatacctcctgcttttcaagtacagggggtacaagaagttaaaacaacaacaacaaaaaaccttgagaaggccgtaagaggaagagtatgatgagggaacagccaggtacctgggaagacaagcaggtgaagagaattttcagagaagcagttgcagttacaggtgagtatgatcacagttccagagagcatcctgaaaggatttgagagggagaagaggtaggggattaggtcttactgggagacgtacacatcgttgataattgataacctagcagtcttgtgattttggctgtcactcagataaacaaggctgggagatgtggtgggtttagcagcccctgtcagcctcttatgaaaggtggatattcagtttaccttagtttgttgatggccttgagtagtggtaagaaattattaggtaactcggtggccttctctcctacttgcatagttagccaggaaaagctcatttattttagggagctaaaatctgaaatgttgctgtggagttgaactttgctaatgaatattttcataacttctgcttaatagcacacagttccaggttctaaatcccatttttaaaaaatgtatatattttattttatttattttttagatacaaagtctcactttgttgcccagtctagggtacactctagggtctcactctgtgcccagtctagtggcgcactcatagctcacagtaacctcggactcctgggctcaagcaattctctcatcttggccttctgagtagctaggactacaggtacatgccaccagccagttttcttatattttttttttgtagagayagggtctcactacattgcctaggctggtctcaaactcctgaactctagcagtcttcctgcctcggcttcccaaagtgctgggatcacaggcgtgagccaccgtgcctggcctgtagatgtgttcatgttatattttcctgaaatatatgtagtaggcatcccaatttgcatttcatcagatatatgttgaagcrtgcatcaggttctatttagggagttgcaaacatatgccacctatgtttttcagttgctcacattccaatgcaagggttcttaatgttaaactccctgaaaagtttgtgaatttctacgtgtatatgtactcttgttttttgtttgagtgtgttgagagttggtgggggagggggagggtccataggtttttatcagattctcaaggggatctatttaaggaccactggtctaattaatgggagagaaagacatgtaaactaatcattgtaatacagtgaaatcagtgccatcacaaagcaagataaaagaggaagagattcaccttgaaggatgagttcattaattcctaaacatttatttattgaggaacttggatgcagtagtatctgttataggtaatttatacattatttgaaatacttcaacattgtttttacatgtatactaatactaatgttttatagactgagatacataggtgaggaaagtttaattaacttgcttcaaatcacatagaagtagattcatatatgggtctatttgattgcaacattcactaccccactagggagccactaaagggctcattgtgtctaagattatctttgtgcttttaaacttggcagtgacttaataaacttgctttcacttaaaaaaaaaaagtaaacttggcaatgatggaaatgggcctttaaactgcttttcgtgttaatggaatttctatgcacttaaagatttgaaataattttaatnaatttgtttattayatatgccagactgtgcttttatgtttaattatgttttcatttcatttgaaagactcttctagcttgctgtttctggaccaaaaaaaatgacgtctattatcaaattaactaccctttctggggtccaagaagaatctgccctttgctatcttctccaagttgatgagtttagatttttattggactgtggctgggatgagcacttttctatggatattattgattccctgaggaagtaagttacatttcataattctatgtttttattaaatcaacttctcttttctgtactgtaataccatttcgatgtgataaatactgcctttttacactagtttatagcaaaaggcttaattttacttatgccaaaaacctatagtgacattttaacttgtaaagttttgattgacttataagctttgcttgttgaaattcagcaaaatcttaagctaatggatttcagtagaaacttttgcatgctaatttttggaaagaacaagaatacataagaatttgagaagaggaaacattttccatgtgaaagttctgtggtcagatcacattagcttactttctacatcttttgatgcttaacattgtcagctggttctcagaatgaccatgagatactgattcatcaaaaaaaaaatcaattatgggctgggcacagtggctcacgctggcaatcccagtactttaggaggctgaggtgggcagatcacttgagttcaggagttcgagaccagcctggccaacatggtgaaactccaactctactaaaaatacaaaaattagccgggtgtgatggtgtgcacctataatcccagctacttgggaggctgaggcaggagaattgcttgaacccaggaggcagagattgcactgagccgagatcgtaccactacactccagcctgggcgcaaagcaagactctgtttcaaaaaaaaaawaarataaaataaaaagtcaatgatgtttgcagtattatactaattttgcaagaaaagaggacttaartatttaaaaaactttagaacttgagaaaaaaaatccaaaccattttattaatttcttgtgtygatgagaacatatgcttccctgattaactgaagttttactattcaattagcaaaactgtctgtggttactatgcgaaaaagctgggacaaaaatccattataagtatgtggccatataaatatcctctccttaataatttctgaaattcttctcttttattattatttttttttgagatggagtttcacttctgttgcccaagctggagtgcaatggcgtgcttttggctcactgcaacttccgcctccagggttcaagttattctccttcctcagcctcccaagtagctgagattacaggcatgcaccacccggccggctaagtttttgtatttttagtagaaacagggtttcaccatattagccagactggtcccgaactcctgacctcaggcgatccacctacctcggcctcccaaagtgctgggattacaggcctgaaccaccatgcccagccaataataatttctgaaattctaagctgagttcttgaacttaaattaatagtttgcgaccaggcacagtggctaatgccggtaatcccagcactttgggaggcmgaggcgggcagatcacttgaggtcaggagttcgagaccagcctgaccaagatggtgaaaccccatctctactaaaattacaaarattagccaggcatggtggtgcatgcctgtaatcccagctactcaggaggctgaggcaggagaatcacttgaacctgggaggcggaggttgcagtgagccaagatcgcaccattgcattagagcttgggcaacaagagtgaaactccgtctcaaaaaaaaaacaaaaaaaacaaaaagagttaagtgaggctgggtgcggtggctcatgcctgcaatcccagcactttgggaggtggaggagggcagatcacctgaggtcaggagtttaagaccagcctggccaacatggtgaaagtgtgtctctactaaaaataaaaaaattagccaggtgtggtggtagacacctgtaatcccagctactcaggaggctgaggcaggagagttgcttgaaccgggcggtggaggtcgcagtgagccgaggttgcgccagtgcactccagcctgggcaacagagcgagactacatctccaaaagaaaaaaaatagtatgcaggatagctattaaaaatcaacttacggccgggcgtggtggctcacccctgtaatctcagcactttgggaggccgaggtgggcggatcacctgaggttgggagttcgagaccaccctaaccaacatagagaaaccccatctctaccaaaaatacaaaataagctgggagtggtggcacaygcctgtaatcccagctactcgggaggctgaggcaggagaatcgcttgaaccygggaggcagaggttgtggtgagccggagattgcgtcattgcactccagcctgggcaacaagagcaaaactccatctaaaaaaagaaaatcaagttacttgtggtgtctactgttcttttttgtttttgttcttgtttttatttttaggcagggtctcactctgtcacccagactggrgtgcagtggcatgatctcatcaaggtcaacctcctgtgcccaagtgatcctcccatgtcacccctcaagtagctgggactacaggctcatgccaccacccctggcttttttttttttttgtattttttatagagaacggtgttttgccatgttgcccaggctgatcttgaactcctgagctcaaacgatttgcctgccttggcctccctaagtgctgggattacaggtgtgtgccatcacacatggccttcttttctgtttaaaatgtgtgtacacaccatatatttaagtgtaccttataccacattttttgtagctatggagagcacaggtagtaataattgaaattcataggtaatcataattttagctcttagttttgctcttctgccccagtgtagtcttcaatccagaattggtgaataattttgaatattctgtctttacccttaaaaagattcaagaagtagtcctttggattgtgttcttgtaggcatgttcaccagattgatgcagtgctgttgtctcaccctgatcctctccaccttggtgccctcccgtatgctgtcggaaagttgggtctgaactgtgctatctatgcaaccattcctgtttataaaatgggacagatgttcatgtatgatctttatcaggtaatttaagcaattaaaaaaattttgttagcactccttcagtgattgtttttcacctttatttgtgttattcttttagtctcgacacaatacagaagattttacactctttacattagatgatgtggatgcagcctttgataaaatacagcagctaaaattctctcagattgtgaatttgaaaggtaaaaagaatttccagtagtaagtatttagatgaatggggtttaacttgctggaaaataccgaggagaattcagagagaaaattrtaggcattatagkctgaagaataaaaaagttagcacattctgccttgatacagaactcttaacttccatttgaattttaaaatatttcagaaaaaatgctaacagaatgttaatagctcaggccttttcatatttaacttgggaaaaactcatttagtgtttactgtgtacrataaacaaaagataatgtggccatttcctcttcctcagagcttacagttagattgaggcaacaaagtagctgagatggctaaatgtagtgattggggtaaatgaagtgctatggcagcagagtagataatgaattctagcattggacgttaaaaagtttattattgaattaggaagtcctatactaagtctatatttatcatctacagagataattgtattagatattttcatagatatgaaccctggsattgataaaatggtgcaataatggactctgaagatttagcccagaaataacaacagtctcaacagttttgcttctagttaatttttctgcaggataaattctttagcacaatgagatttaaattattctgttagtttagacgttagcaaaaatggaaacatttggtaactgtatatacaaaatacacattaaaatttgctagttcatactaaataatttaatagtgtactagcttttaaatctaatctctagccttgtacttataagcacaaataactctacaagattacataatatagtaacaagaatgtttgcctctagtgagggagtggagtaggtgggggacaggagagtgaagcctgctttcactatatgcatttttacttttgaaatttgtattattgcatatacagtattacctattaaaatattatagttgagaaataaataacctttctttagggttgtaaaagaaatctgagtattgttatcttgttgacataggtaaaggacatggcctgtctatcacacctctgccagctggtcatatgataggtggaacaatatggaaaatagtcaaagatggagaagaagaaattgtttatgcagttgacttcaaccacaagagggagatgtaggtatatcaagagaaaagctaaaggcaatgcaattggtattattttattctttggagaaaaaataagaaacacagtttttgttttggttaccagaaatttagagcaacttaaaaccgtcaaatagggagtgttttcaaaattaattatttgcatagtaagggggaaagtatggtataagacataagagattttaaaaatttataggttaagtatacactctacaaaacggrtatctccctggagatgttgcaaaggagatgaattttttacgtatcaaattacatgttcttgacctgctatttaacacaactttgtggatgggttgttcttttgttttgtaacgtgatatggtttggctctgtgtccccacccaaatctcatcttrtagctcccataattcccacatgttgtgggtgggacccggtgggagatgattgaattatgaggttgggtctttcccgtgctgttcttgtgatagtgaatgggtttcacgagatctgatagttttagaaacaggagttgccttgcacataatgtaattaccatctaatataactgccctgtatgtttaaagttagtccctttgaaagggaactcaattctagttatgattttacacacttcatgtggcactcagagcattactatataatattttggtgtttagtctcttacaggctcgttttgttttatctgtacattaagttcatagctattttgtgttacattacaatagtctcaggatctttatattaagaaatatttaagacaaatagactgaattttagacacttataaccatagattaatgaggaaaggatggctatgttgcagggcaaaagagtgagggtcgtgatcaactcagtataccactggaggctatatgagtaaacagcaaactgttcgcataaacgcagaaaattggcaaactgacaaactgtgtctgccacccagaaggaatgctgagggcagtcaggcctcaggtgcaggtgtttcttgtgattagacacatctgaagcctgttagcagtaatgtgaacctgygatcaattaagcagctgaccaattgttacctcgtcctccctgctctttctacccaataaatatgaagggctgtagaagctgaaggcrgctccctttgctcactagaagcagggagctctcttcttcttctcctgaccccttcctttaaaatagttacttttgttttaagttttcatttctgcattcgtcctccttcgttcagtctcgtagtaaccgtggcaaactgcagcatggctatttgagtaaatggtattgaaggattcaaccattttggaaaaaaatcaatttgtgtccttttaattatataacaaaagaaatttcagatggattagaactaaatagaaatgaagcaatattggtgagtctgatctctgatttggaaaagactttgtaagcataaaaataatgaaccaagttacaaagkaaaagtttgatagatttgatgacatacaggttcaaatgtctgaaacaacaaataaaaaaaaaaatcaaagtaggaaaatatttgcagcaagttgcccaaaaacttacaacatatatataagatcaagtattaatttattaataaaaatataccagttgcaagatggacaaaagttataaagtcaaaagagaaaatttaaatgatctttttttgttagataccattaaaattattattattcttatttatatttttatgtatttttttgaaacagagtctcactctgtcaccgaggctggaggcacaatcacggctcactgtagtgtygacctcccagcttcaagcaatcttcccattttagcctcccaagtagctaggactacaggtgcgctctaacatgcctggctatttttgtaattttagtagagatgaggttttgccatgctgcccaggctggtcttgaactactgggctccagtgatctgcccacctctgtctcccaaagtgttgggattacaggcatgagccactgcactagtccaaaattatttttaaatggtgattttcttctgggaagtatgtagaattggtcagtctttttgattgaacttttctggatgaggttaaatcttgctggaaagccttttagcagtactatgtattaacagtaaatacatttttaggaatgtgacctaaagaaacaatcagaaatgcaattgaagcttttgtaaaaaatgttctttggaagattataatggcaaaaataagtgaccgaaatatcagtaaagggaaaggatcaaatacagtgtagacacaataaaatgtttttataactgttaaacatttagtttagaaaaaaatttttatgtcctgggtaaaaaccaggatatagaactgagcgtataggaatgtatatgggatatcagctttgtaaaatacatatgtatatcagtacttaccataagacagggcaaaaagaaaaataaaaaaaatacatatgtgcatagaaaaacttatatggttagcaggatgtacaccaaaatattatgtcagttatctctgagtaatggtactctggaagatttttattttcttctttatacttttttgaagttactggatttcttatcaatgagcatgtctacttttatagttagaggagggaacaccktataaatgaagctgcttattttttaagtaagagaagctattattgtttacttgaaatgatataaaatattcctcttcttaaactttcttatagccatttaaatggatgttccctggaaatgctaagcaggccttccctacttatcacagattcattcaatgctacatatgtacagcctagaagaaaacagagagatgagcagcttctgagtacgtattctttcacgtccttattattattattattttgtaactttttgtatatttagggaatataagtacataaaagtacaggtttctttttttttttgagacggactttcgctctttcacccaggctggagtgaagtggcgcgatctcggctcactgtaacttccgcctcctgggttcaagtgattcttgtgcctcagcctcccgagtagctgggattacaggtgtgcaccaccacgcccagctaatttttgtatttttagtggagacagggtttctccatgttggccaggctggtcttgaatttctgacctcaggtgatccacctgccttggcctcccaaagtgctgggattacaggcatgagccaccacgcccggccacaagtataggtttcttaatgcatacgttgcacagtggtgaagtttggccttttactgtatccrtctccagaatcgtgaatgttgtacccaatgtataatgtccttttcaaggagctgtggaaatgcatggtagtgggaatgactgtattctgtttagcacttttcttggtcataagagattggttaactttagtatttttgaaaaaaatattatgtgaccatcagtttttgtataagaagaaacttagctggtttgaatttaacttttgtggaacagtgtgtaaagattggcttctttttgccagtcagtacatagctagctatccctggcactcactggcatatgtctgtatgtaaagacctcgtacaaatctattagaaaaatatactctaaaagaaaaatgaggccaggtgcagtggctcacgcctgtaatcccaccactttgggaggctgaggcaggcggatcatgaggtcaggagattgagaccatcctggctaacacggtgaaaccccgtctctactaaatatacaaaaaattagccgggcgtggtggcgggtgcatgtaatcccagctactcaggaggctgaggcaggagaatggcgtaaacccggaaggcggagcttgcagtgagctgagatctggccactgcactccagcctgggctacagagtgagactccgtctcaaaaaaaaaaagaaaaatgaacaaagagctaagtggataaatgaggctgtaaatattccactaattttgggtgttttacactttaatatagtaggccattgctgcttgcttcatcttacattctttttttttttttttttgagatggtgtcttgctctgttgcccaggctggagtgcagtggcacagtctcggctcactgcaaccttcacttcccgggttgaagtgattctyctgcctcagcctcccaagtagctgggattacagkcatgcgccaccatgcccagctaatttttrtatttttagtggagatggggtttcgccatrttggccaggctggtgttgaactcctgacctcaggtgatcctcctgcctcagcctcccaaagtgttgggattacaggcgtaaaccactgcacctggccttatattctttttaaataagctataagggatttcagcagggaaaattggattccatttttaaacatgttttcaaccattgtttttagttcatctactttaaaagtacaactattttttttttttttttttttttgagatggagtcttgctctgtcgccaggctggagtgtagtggcacaatcccggttcactgcaacctctgcctcccgggttcaagtgattctcctgcctcagcctcccaggtagctgggattacaggtgtgcgccactacgcccagctaatttttgtacttttaatagagacggggtttcaccatgttggccaggatggtcttgatctcttgaccttgtgatccgcccacctcggcctcccaaagtgctgggattacaggcgtgagccaccgcgccctgccactaaaagtgtaactattaataatataccgtgttgcaccaactttaagaagctcaagccagacactgtggttcacgcctgacattgtggtcaatggtcaacactttgggaggctgaggcaagatgatggcttgaagccagcagttcaagaccagcctgggtaacatagtgagacccccatctctttttttttttttttttgagatgtagtctcgctctgtcgccaggctggagtgcagtggcgcgatctcggctcattgcaacctccacctcctgggttcaggtggttctcctgcctcagcctcccgagtagctgggattacaggcgtgtgcaaccatgcccggctaattttttgtatttttagtagagacggggtttcaccatgttggccaggatggtctcgatctcttgacctcatgatctgcctgccttggcctcccaaagtgctgggattataggtgtgagccaccatgcctggccgcaatccccatctctacaaaaaaaaagaaaatttttgccagacgtggtggtacaggcccgtagttccagctgcttgggaggctggggtgggaggattgcttgaggccaggaggttgaggctgcagtgagctatgatcacaccactgcactccagcctgggtgacagagcgagaccctgtctcaacaaacaaacaaactgaaaaacaaaaaaagtagcggctctttaagtcttagttttgctagagttcagttttaccacatatttccaaggggactttcatctagaggaaggaaatccataaagatatacttgttggaagggaatatgatctatattttattctataggcatacatacatacaaactatgtatcatacatagttggcctttgtagctgctgttccacatctgaggattcaactaactgtggattgaaaatatttgaaaaaacaataaaagaagataatgcaatagtttaaaaaatataagtaaaaaaaaacagtgtaacaaccatttacatagcatgtacactgtattaggtattataagcaatctagagatgatttaaagtatataggaggatgtacgtaggttatatgcagatatattgtttttttgaggcaaagtctttctctgttgtacatgctggagtgtagtggcacaatcacgactctctgcagcctcaaactcctgggctcaagcagtctccctctagcttcccacatagctaagaccacaggcatgtgccaccatgcccggctaatttgtttatttttatagagacgggatctccctatgttgtccaggctggtcttgaactcctggactcaagccatcctcttgccttgacttcccaaactgctgggattacaggtgtgagccattgcgcctggccaccattttatttgagggacctgggcatctgatggttttggtattcgtgggagtcccggggccagtacccatgggtactgagggatggctgtatatataattatgtgagtgtatatatgtatgtatataaatttgggaattcatcataacggagttcactggggtggataggcgagaccagggtagcccggaaacaccaggctggttacatttggcctggtcatacaattttctcagtgatacacacaccattttctatgtgtattatgatgtataaagtgttgaggactactgatttataattttttaatgaagaaagattgagagttaatgacactgaatatatgaagagatattcaacagaatcaaaagcagttgtaatgacctgaacaaaattccttcattttgtacttggcctagtagttgcttatttgtaaattatagtctttctaataaaaacagggagataaaattatctttaattttgtagcatagtattgttacgttctatggggattttacattcttgttttctagcaaatgtcctggaaacacttcgaggtgatggaaatgtgttaatagcagtggacacagcaggcagagttttggaacttgctcaacttcttgatcagatttggaggactaaagatgcaggattgggtgtttactcattggcactcctaaataatgtcagttacaatgtggtggagttttctaagtcccaggtttgttctcatgttgtcacttgtaataagtttgctacagtgattgggtctgtggaagtgggcgtcttaaatgttttttggattttatttttctcttgaagagattgttaataagatgataacttggcattaaccatttactgtcctgtgtgctttaaatgtattatttaatttaatccctatttattctattaagtagtttccattgtgtccctgttttaaagawtaggcaaattgcttcccttctaactcttagtatcccagtctgtaaaatggggacaaaaatagaacctacctcatagcattggcatgttagaattcattgttctttcttttaaataagctttttgccttgaaatagcaatctttgggagtaagattttcatttagaacatataccttgccttttcaaaaagatttaaggtgatttatatgtgaaatataatgcaaaattggttttctttgggatgaaagtgagggtgggataatctaatgggaaatggaagcagaaaataagctgcttgtcaaaacagtacaaatttaagcaaccagtgggggtaaaagatagaacttgaattccttgactattagagaatatattgaagttataatatagtatttctaattcttgtcatcttyccccccatgttaggtagaatggatgagtgataaattgatgagatgttttgaagacaaaagaaataatccgtttcagtttcgccatctctctttatgtcatggtctttctgacttggcccgtgtacctagccctaaagttgtacttgccagccaacctgacctggaatgcggattttcaagggatctctttattcagtggtgtcaggaccctaaaaactcaatcattctaacctacagaactactcctgggactttagcacgtttcctaattgataatccttctgaaaaaattacagaaatagaggtaagcacttgtatgtgaactttatcttaaaactgtttgggggatacattgtgcatgatgtaaaaaaatagtgaccaaaaataaaacttgaaattgttttaggatttttatcagaattactcttgagagccaggagtggtggtgtgtgctgtagtgccagctactcgggaggctgaggcggaaggaccactcgagcccaggaatttgaggtcagcctgggcaacatgccaagacccaccccccatctcttaaaaaaaaactactgtggaagagagcctttaatagcacaaatttcagagttccttaactggaggttctcattcttctttgagatggggtcttgctttgttacctagtctagagtgcagtgktgctatcatagttccgtgcagcctcaaactcctgggcttaaaggatcctcctccctcagcctcctaagtagctggaaccatagacatgtgccaccatgcctggctatttttttatttttattttttggaaagacgttgtctcattatgttgccatgggtggtctcaaaagaaattctcattcttaaacttttccgtggtaccctctagtttacccagagggtaagcatatacagggttttctcaatctgtgaaaggttcctttcctgtctcttgcttaatttaaatcagactctttcctaaagacgttctttatcctgtagccccctgaagtaattactctttctttcagtgtttcatgtactttgaatggagtacacgtcttccttgttctgtattgcagcttcctagctacttatcttccatttgcagtttttgccttcagacctgctgatatgctgacccctccttgtttctgacatttaatgatctcttggtcattctgttactcattcatcatttgaccctgattcacagtcttcctgtccacttgtgttcaggactttattctcattgactttagcatccatgtgtatgatctgtctggttcttctcagttacttggcaccttatttcttaatcttttccttcgtcttacctcagacatccattcctgctatcatgctatctgctcctgtggtcattgcctgtaaccttcttatggctgaacggtctccagttctccacctcaagcatatcattctgaatttacagctgactttccctattattcccatgacaacaactcttctgttccattgggactttcagttcgtgaacctcaccttttacagtctgtcatccttccagccttaaactcagtggtccacaattaagcaaaattttgcaaatacatttaactctcctacacttctgttttagttgcctggaaaggctttgaccttagttaaaccatttgcttggtttgtgcctgtacttaagcagctttatgtttctgaagttaaacattatggtgtagacagatttgttttcacattcataacttcacatctcaaaaggggaccccataccagtactcagcatttggtaggatgttccctttctcacggtaaggtaattgtatatcttctttctcctcaaacatcctacagctcactctcagccttcattcatagcacatgatcttgtctcaaacttaatgtagaagtcaaagcagtgagtcaggaattcctttatctttccaccactaaatgtactaacttgattctgcatctgcatttgctgccttatctcttgttataggaacaagactattagctcactaaccagtatacccaaagatcatttgcttaataaccagcccatcaaatctatcgatttttcaaaattagtatatcattaaagtttgtagcaattgatatagtgggatggttaataactgccagagttgtacaaaggtttagctgactaaaccttaacatagaactgtaacaaaccttaacataaagcagtatcataaagctgcttctcattttgtctttgtagcactcatataattatttaattagagacagactctcactctgtcacccagcctggagtgcagtggcaccatcatagctcactgtaccctcaaactcttaggctcaagctgtccctacmccaccccctaacccactccaccttccaaagtgctgggattatacatgaaccactgcacctggcccttagcagtcattttaaggaaagtttagtttgttaaaagctatgtggtagagatatctgtctgccaactctacttaagaaaatcataacatcagtaactaaaatctgagatatatgtactataattatagaattgttgagcaaggattctgagcaagtatagcaaagtaaaatggtgtctttggggttatttagtagctcagaaatacaaggttaaaagaactaagaaatacttgaaacaatttsatcagataggaaatactgaatttgaaaattttaattactagaaattcaattaggtctaataaaccatttgaggaattagtaaaagaaaaatggtttaagtttggaaaaaaatagacaatgatgtttagaagcatgctaaagaaatgagaaacagccaaaacatcaaatgttaagtttttgacctttttaataactaatgctgatgctcagggaccttttcttgctcaccttcttagcgatagttcttttgcagttatccctcctatcttcattatctagcagttttccctctacttgatcacatccaaaacaatttttattcttcccctactcccaatactgttctgtcttatctcagacagcacttcccacatattcaagccaaaaatttggaagtttaaaaaatgttcactgaatcgtaatatgtaccaaaacctacgttaagtgtatagcatgatgaacttttacaaaaattgaatgcacctgtctagcctgtaccctgatcgagaaatagaatatttctgtggcatgttgggcagatccaactaaggtaaaaaatagaaatggtaaaaaaagaaatagagggctgggcgtggtggctcacgcctgtaatcccagcactttgggaggcagaggtgggcggatcacgaggtcaggagttcgagaccagcctggccaacaaagtgaaaccctgtctctactaaaaatacaaaaaattagcctggcgtggtggtgggcgcctgtaatcccagctactcgggaggctgaggcaggagaatcgcttgaacctgagaggtggagattgcagtgagccaggatcgcgccactgcactccaacctgggtgacagagcgagactccatctcaaaaaacaaacaaaaacacatacagttcactctcttaaccatttttatgtgtacagtacagtagtgttaactatatgtacattgttgtatgacagatctctaaaactttttcatgtagcaaaactgaaactctgtacctattggataacagctcccagagagagcttttaaacattcatcatttcatgtcattcacttgcttaaatggctccaaagccttccttcttctctttcaataaaatccatgctacttacacaggcttcttagatcccatatgatctaatccccacctaccttctgaccttagcttattccactttctctatgccctacggtgcatcaggatctttgtactagctgttcttctgcctatagtgttctttcctggctttgcgcatggctggctcctggtcattcaggcctcaggtttaaccccctcaggtaggcctttgactacagatttaaaatacctgcctggtttagctgcccatcaccttacttgaagtatttttcctagcactcatcaccatctgatgtatttcttttttgttgtcttcctcttcccaccatcaactagaatatgaattccatgagaaaaaggcccttgttttttggtatccctagcacccagaactgtgcctgacatattggagggcttcagtgagtgcactggttgaattcatgaataatcaaaaaagtgaatatggaataaactagatttctgattatgttagataagaaaagtttaccaagtatggtattttttcatctatatctaatgcccttctaagtcaagtcttactcatttagaaaaagcaaaaatgaacaacgaaggattaataggttggagtagatttggattagaaaaaggagtaagttggaggtaatacggtgaaggagtaggaagaaaaatatttttgagttggttattctagaaatctgtttctgaataagccattaatcttacatattttaaatgaaaaataagatggagataaaaatttattatagcaacaggcataaactaaatcacagaggtaaatactttgttaaagattattggtgggtaaaaggcatctatgtaggttgctaactgtttttaaaaaaaccccactattttctgaatgaaacttattttcaaataagttattaggcaaatgtgagatgccaaatataaacatgtatttatttgtttattttaactttttattttttgagacagggtcatgtcattccctgtcacccaggctggagtgcagttgcatgatcatagctcactgcagtcttgaactcttgggctcaagcgcgcctcctgcttaagcctcccaattagttcgcactgcaggcatgtgccgccatgcccagctaatttaaaaaaaawtttatagagatgggaacttgctgtgttgcccaagctggtcttgaactactggcctcaaacaattctcccaccttggcctcccaaagtgtgggtattataggtgtgagccactgctcctggccttaaacatgtaaatcacccatttattttatacatgaaaataatctgattttggtttaatttttttgtttttacttgtctcccctccccttaccccactgggcagccsctgaactagaatagtttcagagagattcccccttttccattacttttaattttgaaaaaatttcaaacaggaaagttacaaaaatattatacccagattccccaattgtcaacattttactggatttgctttatcacttatatacacataaacacaatattactttttctgaaccatttgaagaaaaattgcaaatattttatcattatctctaaatattgccagtgtgtgttacctaaaaacaagggcaatctccagcaaaactrtgttacatccattgaaatcaggaaatcaacattgataccatcctaccatttcacccattgaccccattcagcattcaccttttaccgatgaccacaatgtcctttataattaccctttccttttttgtccaggttcgcatccatgactacatactgcatttaattgtcataactgttgacatttttgaagcatatatattctgggttttttttttcttattgatatactaatacctggtttttattttatttttttaaagagatgggagcaaggtgtggtggcatgtggctgtagtcccagctattgaggcaagaggattgcttgagcctaggagtttaaggcaagcctgggcgatatagcaaggcctcttctcaaaaaaaaaaaaaaaagaaagaaatgtatatatatatatgtagagagagagagatgggaccaaattatcatgtattccacataccctgagacttgtattttcacttgagtccttcttgaacaatgtaagaagatatgggtctaccttacatagtacctggtatattacaaacatttaaatgtttttggataaataaatgtaagctttttagtaattttataatagtacattgtatatgtgtgctgtgattatttaatctmgtggttctcaaaagtgtggtttgaggacgcctgggagtccctgagaccctttcagggagtccacaaagccaaaactatttttcataatactggtaagatgatatttgccttttcactgtgcctacatttgtactgatgagtaagatcagtggtgcataaagtgcttacaccttggcctaaaactccactagtagccactgcatttttcaccaccgtacatacacgtcattaaaaaaaaaatgctagtttcacttaagaatgtccttgagaggctgggcgtcatggcccatgcctattcctaacactttgcgaggctaagatgggaggttcacctgaggccaggagtttcagaccagcctgggcaacwgcaacactctgcctctacgaagtataaaggtatattaaacaaaagaaatttgaaagagaatgtctttgaggggccagacatactggctcatgcttgtaatcccagcactttgggaggctgaggtgagaggattgcttgaggccaggagtttgagaccagtctgggcagcatagcgagaccctgtctctacaaaaaagaaaaaaaagtccttgagggaatagtaaaagttactaatattactaagttctttcagtaaaagtttttttgtttttttttgagatgggtcttgctctgtcgtctaggctggagtgcagtggtacgatctcggctcactgcaacctccgcctcccaggttcaagtgattctcctgcttcagcctcctgagtagctgggactacaggtgtgtgccaccacgcctrgctrattttttgtagttttagtagagacattgtttcaccatgttaaccaggatggtcttgatctcctgactttgtgatccgtctgcctcagcatcccaaagtgctgggatcacaggcatgagtcactgcgcctggcctagtaaaagattttttaaaataatttgggtgacaagatgggaagtattaataaagaatttgcgttgtgtactaaagtacaatggctatctccaagaaaaacacttgtatgtttatttgagtcgtgagttaaactagccacttttttctgggaacaccttttttttgttggtattttttttttcttgtgtttgagacggagccttgctctgtcgccaggctggagygctcggctcactgyaacctctacttcccgggttcaagcgattctcctgcctcagcctcccaagtagctgggactacaggtgtgtgccacgttgcccagctaatttttttttttcatatttttagtagagatggggtttcactatgttggccaggctggtctcgaactcctgacctcaggcgatccacctgcctcggcctcccaaagtgttgggattacaggcgcgagtcaccgcaccaggccctgttttgtgtgtgtgttttttttttttgagtttgggtctctgttgcccaggttggagtgcagaggcacaatcatggctcaccacatccttgaacttctgcgttcatgtgaccctcctgcctcagccttcctaccagctaggactacgggtgtgtttcaccacacctgtaatttttaattcttttttgtagagactgggtcttgctacgctgcccatatggtctcgaactggcctcaagcaatcctctcacctccgactcccaaagtgctagaattacaggcatgaatcactgtgcccagtctggaacaccatttttatgtgaaataatgacagggttattcagatttgggtatttggcagacattttcttgaaaattaatacattgagcctgtcactctaaagaaaacaattgacagcatttgttggcttaaatctgataaaattctaattttcaaatgaaaatttagaattttggaaaacttatacccagcactgtgagattgacaacttaaactgaaaagacttctgataagattggtggtgatatttacaaatgtgattttaaaaatattgtcaacatttgtaagatctggataacttggtgaactagtattttccaaataaccaattaattatgttagaaaataatgcacaaattaaaagatccattcaaaatttaaaatacaggctgggcacagtggctcacacctgtaatcccagcactttgggaggcagaggcaggaggatggcttcagttcaggagttcaagactagtctggataacatagcgagaccttgtctctacaaaaaattaaaaatcagctgggcatggtggtgcacatctgtggtcgcagctattcaggaggctgggaggtagaagggttgcttgaacctgggagttcgaggctgcagtgagcagtgatcatgccactgcactcatcgtaggcaacagagtgagaccctgtctcaaaaacaaaacaaaacaaaacaaaaaacaagagtgtaagatacatwaaaaaaaaaaaaaattaacacaacagagtataaaaagtctattagtatggtttcaggttctgcgttaaaactaaccttgaagaaactaccactttctgagttttaatgtagtatcaaagaataatatccatgaaaggactatttacatatttttcccttttcaactatacatgcgtataagcctggattttcttcatatactttaaccaaaacaacatattgcaagagactgaatggagaagcaaatgtgagaatccagctgtcttctgttgagctagacattaaagagatttgcaaaaatatagaataatgctataggccaggtgcggtggctcatgactgtaatcccagcactttgagaggctgaggagggcagattgcttgactccaggagtttgagaccagcttgggcagcatgtcaagactcggtctctacaaaaaaaatacaaaaattagctgggagtggtggatggctgaagtgggaggakcgcttgaggctggaagattgagctgcagtgagctataattgcaccactgcactccagcctgggcaatggagcaagaccctgtctcaaaaaaaaaaaaaaaatgccgttcttcccactatcttttttttgctttggaaaatgtaattattttttgtaaaaatctgttaatgttgccatgtggttttatttattatttatttattattattttttcatttttgagatgtagtttcgctcttgttgcccaggctggagcgcaatggtgccatctcggctcactgcaacctccgcctcccaggttcaagtgattctcctgcctcagcctccctagtagctgagattacaggcatgtgccatcacgcccggctaattttgtatttttagtagagatgggctttctccatattgatcaggcttgtctcgaattcccgaccttaggtgatctgcccgcctcgacctcccacagtgctgggattacaggtgtgagccgtcgcgcccggcctattattattattaatttatttatttytgagctggagtctcactctgttgtccaagctggagtgtaatggtgcgattatggctcactgcagtttccgcctcccaggttccagcgattctcctgcctcagcttcctgggtaactgggattacaggcatgtgccaccatgcctggctactttttatatttatagtagagacggggtttcaccatgttggccaggytggtctcggactcctgaccttaggtgatctgcctgcctcgacctcccaaagtactaggattacaggtataagccaccatgccctgctggttttattattttttaaatgaacagataaatattttaaaaattgctcagttttaatttctgataaggtagacattgataaatataacccacaaaaacaaaaagctctttggggttctctaatttttaggagtctaaggtagtcctgagataaatatatgagaactactgatttaatcattccattttgatggattttaaaattttgtccagttttttactactataagcattgctgcaatgtacgaatgtactttttttttacacatttgtgattgtttcagtaggataaattcctagaagtagaaatactgtgtcaaatgtcaaattttatttttagatgttagcaaattgccttttaacatagttgcactaattttccaacagataatggaagaaggtactctttccccatgtatggcattgccaatctcatagatgaaaacaattatgttttttatattttgtgcttttcaaaaattagtaaaattaaggatcttttcatggccagtagttatttgtctttcttattttgtaaattgcctttttaagtatcttgtgctttttcatgtgttgatcatccttttcttaactaatttggaagagctcttaggaaaaaatcatttttattggtcgtagtgctgaaaatatttttctgtttcttttttgtttttcttttcagtttcttattttgagatttaaaatgtcaaagggagtttttctttattcatgttgctgtatttatttatgtttcccattatggcttttgggcctcacctactccaaattataaaaatgcttatctgtattttcttttcctgattggtgatttttaaccagtttgattgtttggttgattgagacagggtcttgctctgtcagactgaagtgatcctcagtctcagactcaagtgatactcagtctctgagtagctgggactacaggtgcatgctaccactactggcttttttttttttttttctgagacagagtatygctttgtcacccaggctggagtacagtggtgtgagcacagctcactgcagccttgacctcccaggctcaagtgatcttccactttaaccacctgagtagcggggacaacaggcacatgccaccactcctggcttttttttttttttttttttatgtggagacaaagtctcattatgttgcccaggctagtctcaaactcaagtgattttcctgccttgcaaagtgctaggattataggtgtgagccaccgtgcccagcctcccagctaatttttaaattattcctagagacagagtcaacctatgttgcccaggctggtcttgaactcctggcctcaagcagtcctcccacagtgctaggattataggtgtgagctactgtgcctggccaaccagtttgatttaaattaaacccattctagatgatgtgtgacagctcaattttaatactaatctaaataggacctataattgtatgtaatggaaacttgattaatttcagaggaaacaatcagtttaaagatgatagagcaatttagagatgtgatgtatctcatatcccactgctttaaccccctaatattaacatattaacatttccttttgtcttttatttttttttagttgaggaaacgtgtgaagcttgaagggaaagaacttgaagaatacttggaaaaagagaaactaaagaaagaagctgccaaaaagcttgagcagtcaaaagagtgagtcattttcagacagattataaatttatggatgcaatttgagaagaatgtgtccttgacttaaatgtttcattgaaaatatttttaaattttcgtaagacttaattttgttacagacatctttcaaatgtctagaataccagatcctgtcagtgctaatattattatgcatttatttgttatgttttataaaatgtcagtccaataaagttgaatgttattccagtcatgcatcacttaatgatggggacagttctgagaaaagtgtcgttaggggatttagtcattgtgcaaacattaggatatatgtttacacaaaccttgatggtatagcctactgtgtatccagagtatatgatatggcccattgttcctaggctacaaacctgtacagcatgttactgtactgaatactgtaggccattgtaacacaatgttaagtatttgtgtatctaaatgtatctaaacatagaaaaggtacagtaatcttatgggacctctgttgtatatgtggtctattgttgttgaccgacataactgtatattatcatttaatattgaattaataatattgagtatggattcagtaataaattgataaatattaatttaaaatatctttgaaactttatgaccttgatctattctaaaatcctcctagggcagatatagattccagtgatgagagtgatattgaggaagatattgaccagccatcagctcataagacgaagcatgacttgatgatgaaaggtgaaggcagtcgtaaaggaagttttttcaaacaggcaaaaaagtcctatcctatgtttcctgccccagaagaaagaattaaatgggatgaatatggagagattatcaagtatgtgagcaaaacaaacttttctctcttacaaattggaggtattaactgtgttatcatttcatttcagtgaatttgatctttcacttgatctttctagtcacatgtatggggttagcttctgagtacctcagcctgaagacacagaagacttgtaacttgaaacataaaaatagagatgctgagaaacatctagagaatattgagagaaaactggcagtttatgacttagttgtgtaaaggtttaaaaacatgatcacgtgatcaagacttttttcccccacttaaaaagagaggaagatgtaggataggaagaactttggggctgtgtgtggtggctcatgcctgtaatcccaacactttgggaggccgagatgggaggatcacttgagctcaggagtttgagaccagcccaggcaatatagtgagacccccatctctatctttaaaaaaaaaaaaagaactttggatggctggtgattgcatttccaatggattatgtcttaagtattatacaagttttatgagattaagaggaatgtgagatagcatgagtgaaatcatggaaaaatctacaaaatctatactgactattagaaaaacaactgcaatcacatgttgtaattgcaaatttgaaaacactactatcctgtgtggaaaataaaaaaagaaaaacatgatacaggccaggtgtggtggctcacgcctgtaatcccagcactttgggaggccgaggcaggtggatcatgaggtcaggagttcaggaccagcctggccaagatggtgaaaccacatctccactaaaaatacaaaaaaattagccgggcgtgatggcaggcacctgtaatcctagctactctgggggctgaggcagagaattgcttgaacagggaggcggaggttgcagtgagccgagatggcgccaccacactccagcctgggtgacagagggagactctacctcaaaaaaaaccaaaaaacgcaatacatacagccatctggtaattgatatgaaattgcatcagctttggatgaaatgtatatttaaatcttgagatatgtgaggactccaaaaattatgccacctactagtcatatatgttatgtagtattagcttgctttttactgcttctaattagagacttattatttagaccagaggatttcttagtgccagagcttcaagctactgaagaagaaaaaagcaaattagaatctggtttgacaaatggagatgaacctatggatcaggatttatctgatgttcctactaaatgtatttctacaacagagtctattgaaataaagtaagtgcttttgtgacattttgaaaatagattataagataaaatttcaagcatttgaattatataatttacattatgtcaagcaaaatttctgaatattctttagtaagtttgtgcttttaaaatwttatttttgtatgaagagacttgtgaagtatggtggcatgatattttctcttcattaatggtatttgaatgccaaagtaattgaattggtggtggtggggggtgcttaaattgtaacattaaattgtacatttatatgaagaaaaattatttttggcctttttattctgtaagcaggtgaaagggaataatgtgactcacagtttaatttttctgagtaactgcttgtttcataaaatatactccttaacttaaacatctctaagaccctaatgtctggaaaatactgttgtgatctgaagtagttagaaaccttttttctcccgctttctacttagttaaataataccagtaagtgatcattttggaatttcttttaagtcatcagagaacaaagttttttrtttgtccagtaatatcatttagtatatatttttgggtgtagataaaatctaaataatacagatagggccgggcacggtggctgatgcctgtaatcccagcactttggtaggccgagataggctgatcactcgagatcaggagtttgagaccagcctggccaacatggtgaaatctcatctctactgaaaatgcaaaattatccctgcgtggtggtgcatgcctataatcccagttacttgggaggctgagtcaggagaatcacttgaacctgggaggtagaggttgcaatgagcgaagatcatgctactgcactctagcctgggcaaaagagcgagacccaatctcagaaaaataaaaayaaaaataaaataaatcatacagatactataacatgtgtatttctcaaatcctagtgttatatattgtatacatgataaaagccatttttttttagaattatgagaaaagtaatcttgaataatcatatctaattacagagcccgggttacctacatagactatgaaggacgctctgatggggattccattaaaaaaatcattaatcagatgaaaccacgacagttgatcatcgtccatggcccaccagaggccagtcaagatctggcagagtgctgtcgcgcctttggtgggaaagatattaaagtgtacatgccaaagctacatgaaacagttgatgccactagtgaaactcacatctaccaggtaaacatgccaggagttgccattgagtagaaataagtactttttgttgcaggttaggacagataacattagaaataccgagatgtgtgagacagacatggatggtctcctgccctagcagacctcatagggtatggggcttagaacaaggaaataccatttatcatgttgttgtgccactgagagaagaagtacaggatgctatgagagtatcaagaggggaaaccacccacatttagaggtttagaaaaggtttcctacaggaagtgataactaatcctaactgatgtttagatgggttgtcaggacagacagagtaggaaagggggggaagagcgttctaggcagagggaaccatatttgcaaaagtacagaggtgaggaaaatgattaagaattcaaaagttttagaagaattcccggatatcaaggttctactcctaattggaacaaatggagatggataccaaatataggactagcacagtagagagataaattttgtctggtaatgggagatggtgtcagtttaaggccagagtgatgtctatatctggaagaaatggatgtgcacataccaggcaggaaatttattctgggcagagtaagaagaagcaaccttccaagaatatggagatgtgaaattctgtggtatattcaggaaaggacaagcagttcagtacctactgaagtatgccaagtactagaggatgggagtgatcagtggttctcaaccttgactgcacataagaatcatctggggagcttcgtgagggtcagagggactcagtttttctggtcttaatcttaccagttatgttagaaacactggatatgacrctctgatatactttttgttttaattgccatgtgattccattttgtagtcagggttaagaatctctattttggaaagtaggcaggggcccaatgatctgcaggtaatgaggtcattgcaggtcattgtgggactcagatgagtgaaagattttccaattttaacatattaccagaggtagaaaatgataataggttatatttaatttgttaatatgtattctgtgggttttatttctctccycctcctttgcatgtctaggtgaggttaaaagactcacttgtcagctctcttcagttttgtaaggcaaaagatgctgaattagcttggatagatggtgtcttagatatgagagtttccaaagtggacacaggggttattttagaagaaggagaactaaaggatgatggagaagactcagagatgcaagtggaagctccctcagattctagcgttatagcacaacaaaaggccatgaaaagtctgttcggagatgatgaaaaagaaacaggtgaagaaagtgagatcattcctactttggaacccttgccacctcatgaggtaaaaaaagcatgtgcttttttgatttcttcctgaatttgtcatccttctagttttcatgtcttttggtttttttccccccttctaaaactaagtgggtctgtggaaccttttatatttttaaccatttaaaatatatgtcagctgggggcagtgactcacgcctgtaatcccagcactttgggaggctgaggtgggagaattgcttgaggccaggagctctacatcagcctgattatagggacaccctgtcagaaacctagtcggcatggtggcrtgcacctgtaatctcagcttagaaggctgaggcaggaggattgcttgagctcaggagttcgagactacagtgagccacaattgtgccactgcatctagcctatatgatagagtgagaccctgtcttgaacataaaatatgtctcacatttgggctgattttggagtttttaaaaaagagaacttgtgacatgcttctgtgtgtatgtctctgtgtatatattaattctatatagctaaggaatgacatatctttagcaaatcttttaaggtacataattgtttcatgattttttttttttggtctggatttttaaattttaagtttgatgattgtgaggatcacctgcctgcttccagtcaggagatttatagttttctaagaaagtcatactgttttttttttgttttgttttgttttttgagatggagtctcrctctgttgcccaggattgagtgcagtggtgtgatcttgtctcactgcaacctccgcctcccgggttcaagcgattctcctgcctcagcctcccaagtagctgggattacaggcatgagccactgggcccggctagtttttgtacttttagtagaaacggggttttgccatgttggccaggctggtctygaactcctgacctcaggtgatccacccatctcagcctcccaaagtgctgggattacaggcgtgagccaatgcacccagccaatagtcatacctccatttttttatgttattcagttcaaataacttttggttttgatatagttagaaatctttaagtatagatataatttagtctagcatttacatattcttgagaggtatctagttaactagcaagattctaggtaattaaacttggaaaaatattaaaactatgaatcctacatgcatgtcaagtgatgtcttcagccctactatgaaattaagaatagagagacagcctctgttgttggattcccttctagtacaaccctcaaaattgggaggaggaataagaatatttttttcttctgtgctaaagctaatgctcttcaaagtaatgtcaaagcagaaagcagcagcattaggcaagaaccactttcgttactgattgtagaacctatggcatccattacatttgctctgaggaaggagggacagggaaaatgggattggggaggaaaygtcttttgaagtaagcaaatgactgggatctagaaaatgaatttttggttcagtcctgcccatggcackctagttgaccccattatgcaartgggtgagtgaagagcctaacattaccaaacgtctctgttatgatgaggcatgactaacaaaactgattgtgaaacagaaaatgtgaagggctttgttaaataatgttaaataatggggtaaaatttagaataacaacttggaatgtgatttacagtcttgaaatgatctgtcaaaggayttcagggaataatagaaaatctcttagagataatgtagtattttactttattcagtacagttgtatgtctggtgttttacttgaagttattctttcccctttgaccttatctaaggttccwggacatcagtcagtttttatgaatgaaccaaggctgtcagacttcaagcaagttctcttacgggaggggattcaagctgaatttgtaggaggtgtacttgtttgcaacaatcaagtagcagtccgcagagtaagtgtgttttcaataagggctgaattgaacacatacgtctgatgttttgtcattttgaaattctgtaattcttgwttggtattttcacaaaactgaagatcagtaatktatattcangatcatgacctcaaaggcttacagaagtcttattgacttgaaggcttatgaaagactcttgaagaaatgatatataattttattgtaaattttaattatttgaatcttctgacatttatgtctatgtaaaattcatgacttcaatattatatccatatgctgtgaatcagagcaacccatgtcctgaccaatcataaagtaatctatttcatatatttcggttattatgtctgcatattaatgaatagaaaaygtactaaagaattttttttatttggtttctagacggaaactggacgcattggattagaaggctgcctttgtcaagatttttataggataagagaccttttatatgaacaatatgccattgtataaaggacatgatgtcaagaagtatctgcttgacctttctaagaaaaagggattcttatcttactctgagcttttgatgttttgttttgtaacatacaaaaagaatctgccagaaaamcttacatgtatcagatttttaaaaatataaatagagaacattttgcaaatgctcaaatgagcattctatcttttggctttcagagtgatagagctcctaacaggtgtacaggcccaagagttgaaggtgattggttttctttacagactccttgttctctagaagggctttttacttgaataaaacaatgcaacttagcaaaccaatttatggccttagagaaacatttttgcatgagttcttacaaactgtttgttatattttctggaatgataagtgagaattatttagaaaagacatgctccaaaaaaaaaacaaaactgataaaacagtttttcgaaacttacttttaaaagcatacgtgctatgactctctccagtttgaatatgcaattgttttcacaggcaggatgtctgttttctgcctgtatttcccagtgatttactctagggtaaggtagtacacatttggttcagaaattaatttttatttctcctatatcttgttttatcaagattttgttgtggcatttcaatgtaaattataacaccatcatttgagtatacataattcaaaagaactacttgatgcagtatagtcttaagggttctgcatacattttagaaacatcttagccgtaagttaggtcctgtgttaaactgtttagtgctctgtttttaagaaaacaaatgttgaacctcacacttttatgtggtgacagtgtaatttaattaaaaggtgtaaatgktttcatctcttaggcttgctgtctcctaaggtcacccaagcagtggttggattttatacacattactactaaaataatactgaagttggataaggttatcctttctgtatttgcgtctttcttgtgactaaccaccctgatatagtattaaccactgtgttcaagagtaaaaacaatatatgcaattttcattgaacttaaagagtgaaaaccatgtaaactattgaaactattgtaatccattaatgcttttttagaatggcagaccttgatgtttatttctcaaatggttaagccctcttctttactcttaatttttttttgagacagagtcacccaggctggagtgcagtggtgagattttggctcactataacctcttcctccagggttcaagtgattctcccacctcagcctcccaagtagctgggactacgggcacatgccactgcacctggctaatttttatatttttggtagagacagggtttcaccatgttggccaggctggtctcaaactcctgacctcaagcgatccacccacctaggcctcccaaagtgctgggattacaggcatgaatcaccacaactagcctacccttagatttttggaaggatcgatcttatttaactatgtgtggaacaacccagtaatatcagactcgaattactatttcattctatttcaaatgcttataaagctactattgtagattatagtgttaatgcaaagtttacagacttttgatatggaaaaccagataaaacaatgttacaaaaggcaaatataaagagtatgttttctttttagtgctttggaaaaatttcacttaaactcttattactgtatagattaagccctataatgctatttatattccaggggaacgaaaatctgaatttgttttatgatttaaagcatctggtttgcatattgtattgtaatactgatacagtttggctgtgtccccaccaaattgaattgtgttaatagttcccataatccctacgtgttgtgggagggacccagtgggcagtaatttaatcatggtggtggttaccctcatgctgttcttgtgatggtgagttctcatgagatctgatgggtgtttttttttgttttgttttttgttttttgagatggagttttgctcttgttgcccagactggagtgcaatggcacacgatctcggctcaccgcaacctctgcctcctgggttcaagcgattctcctgcctcagcatctcgagtagctgggattacaggcatgcaccaccacgcccagctaattttgtatttttagtagagacggggtttctccatgttggttaggctggcctcaaactcccgacctcaggtgatccgcccgcctgggcctcccaaagtgctgggattacaggcgtgagccactgctcctggcccaagatctgatggttttgtaagggaattttccccctttgcttggcacttcttcctgctgccatgtgaagaaggatgtgtttgcttccccttccaccatgattgtaagtttcatgaggcctccccagcctgtgggactgtgagtcaattaaacgtgtttactttataaattacccagtctcaggcaattctttatagcagtgtgagaacagactaatatgaataccaatactgaaaaattgtttcttgcctcaccttgtcctatgaacaggaattaaattttaaagtattgccttaagatggctgtgctaaataataatcattgcaagagcaatacttttacctgtttctagatgacaatattactaaaatttctcaaatgaagactttgttttagcttcaattacttcagaaaatataaattttaaagatgactatgagataaatcatgaactcagtggaattttcagatgagatggggcgcgttcagggtggtatgactgtagacggaattttcagatctttgttatttagaagcaagtataggtataacgtggactatcaactgatatctgcaaataatttggttaaaatgaaatttgattgtagtatttgttgctgtaggattataaatgtcaaatatcattgtaaacatttctatatttttagaaatatcttgggtggcctgaaacagaagtgaggaaatcaattttttaaggtgagccatttggcttttttaaaaaattgagattcaacttacataccataaagttcactcttctaaagtgtacaattcattggtgttagtatatttacagagttgtacaactattaccactatataatcccagaacactttcatcactccaaaaagaaacaccatacccactaccagtcactcctcatgcccccttcctatgacccctggcagccattaatctactttctgtctccttgaatttggattttctggacacttcataaaaattgaataatacaatatatgaacttttatgtttgacttctttcacttagcataatgttttcagagtgcatcactgttgtaacatgtatcagtaccctttttgtgactgaatattattccaccgaatggatataccacattttacttatccattcaaccgttgatgtacatttgagttgattccaaattttggctattaagaatgctgctctgaacattcatgtgcaagtttttttttttttgtatgtacatatgttttcaattttcttggatatatatctaagaattagaattgctggatcatacagtaattctgcttaaccttttgaggagctgccaggctgttttccaaagtggctacaacattttgcatttccaccagcatgtgtttgagggttccattttctcctcattcttgacaacatttattactccctttttaaattttagtcatcatagtgtgggtgaagaagtgtctcactgaggttttgatttgcatttccttaatgactgatgatgtggagcctctttccatgtgtttattgactttttatatattttggagtaatatctgttcatatcctttgtccattttcartttgtttatgttcatatcctttgtccattttcaatttgtttatctttactgttgagatgtaagagtttttttatatattttctggatactaaaccattatatattgatttgcaagtattttattccattctgtggcttgtcttttcactttcttcgtagtgtagtttgaagcacaaaagtttttaattttgataaagtccagtttgtttttttcccttcagttctttgtgcttggttttatatctttttttttttttttttttttttttgagatggagtcttgctttgtcacccaggctggagtgcagtggcgcggtctcagctcactgcaacctctgcctcccagattaaagggattctcctgcctcagcctcctgagtactgggattacaggcacccaccaccatgcctggctaaatttttgtatttttagtaaagacatggttttgccatgttggccaggctggtcctgaactcctaacctcaagtgatccaccaaccttggcccccaaaagtgctgagattacaggtgtgagccaccttgcctggccttggttttatatcttaaaagctattccttcattcaaagtcacgaaggtttacacttaatttttttctatctaaaaaaccattgcttcatctaaagtcatgaagatttacactctttttttttctaacagttttacagtttaggctcttatcattaggtctttcatttattttgaattattatcattattattattttctttttgaggcagggtctcactctgtcacgcaggcttgtgtgcattggtgcaatcacagctcactgcagcttcagccttctggcctcaagcagtcctcccacctcagcctcccaagtagctgagattacaagtgtgtgccaccatgcctgactaatttttaaaatttttttgtgaagacagtttctcactctgttgcccaagctggtcatctcaaacttccagactcaaacaatactcccactttggctgcccaaagtgctgggattacaggcatgagtcaccattcctggcattaatttttgtatatggtgtgaggtaggggtccagtttcatttttttgcatgtggatatccagttgtcccagcatcatttgttgaaaagactatttcttcattgatttttttctgccacccctgtttaaaatcagttgcccatgagtgtatgggtttgttcctggacttgaaattatgtttcattgatctatatatctatgctagtaccacatgtcttcattactgtagctttgtagtaacttttgaaattggggaagtgtgagttccccaactttagttctccttcaggattgttttggctattctgggtctcttgcattttcatgtgagtttagattctgcttatcgatttcttttttttctttttttttttttttgagatagcatcttgctttgtcacccaggctggagtgctatggctcaatctcagctcactgcaacctccgcctcctgggttcgagagattctcctgcctcagcctccagagtagttaggactacaggcgcgtgccaccatgccaggctaatttttgtatttttaatagagatgaggtttcatcatgctgaccaggctggtctcgaactcctgacatcaagtaacccggctgcctcagcctcccaaagtgctgggattacagtcgtgagccaccatactcagcctaagattcagcttaccaatttctgcaaaaaagcccactcatttttaataggaggtaaaaagcagttgacatttataacttagagtcttttaatgttagtgctgaaagggactagagagctcatctaattcaacccacttattttagtattgaatgaatgaccctgtacaaggaaagggatttgcttgagatccacacagctgtttaaaggcagagttgggattggaaccaagtcttagagaatccattgttgcttctacactgcattattgctttggttccctagtgtacattcactttgcttaggagtgatatgttcagtttatcttctctaagaatggcagctgttatttaggacagtggcatgctgagaaatagattgatttctattctatactgtgtccagtaaaggtcgggggagaaagagtaaatcttatcttcttctgtacttttctttgattaatgtaagagtctagagttttatcagaagattattgtcctttaaaatattgatggactgattatcacttaaagggtataaacagtgggtagtaattcagtgattgagaggttaattgcaggttttttttttttttttttctggtaaccatagaatgaatgtagaatgaatttggattcaataatgggaactaaggtcaggcgtggtggctcacacctgtaatcccagcactttgggaggccgaggcgggtggatcatctgaggtcaggagttccagaccagcctggccaacatggtgaaacctcatctctactaaaattacgaaaaattagtcaggtgtggtgacgggtgcctataatcccagctacttgggaggctgaggcagtagaatcgcttgaacccgggatgcggaagttgcagtgagccaagatcacgccactgtactccatcttgggcgacagagcgcaactctgtctccaaaaaaaaaaaaaaaaaagggcagggggagcggctagagaaggaacattcaaatcttcccacgtgggcaagttccaagcaaatgtttatttttttacctcctctttggtttttgtctcacttgaagcactttgtgtttatgggaaaataccaaaaattaccaaaatttaaaaacccagggctttgctggaagtgagggtatcttcttggcttttcccttttcctccccaccactatacgcacatgcacacacagctctattttttggtgcttttcgttcattattcactccatttcattttagctcttgaagtcaaaatgggattccaaagagcaaaatagaagtttggagagtttgaaatctctcctcgtggctggacgccgtggctcacacctgtgatcccagcactttgggaggccaaggcaggcatactgcttgaactcaggagttcaagaccagcctggggaacatggtaaaaccctgtctctacaaaaaatagaaaaattagctgggcatggtggctgtagtcccagctatttgggaggctgaggtgggaggatcacttgagcctggggaggttgagactgcactgagtcttgaatgaatgaatccatctctctttctctctccatatagtcaaagagaaccaaaaatgtatgtgctttttttgtgaaattgttaaggattccatgatcctactaaaatttttgataatgataatttcaagtggagaatatataaaggactcgtgaggccttcctacctcattttctgaggttatgttgactttaatatccaatgtatcataggtgttttcttttttctctgacaattgttatgttaaaaacaaaaagaagcacatactgtacagtcaaaactatcagacgtaactctgtgggaaactttattccaagggtgctgccactgcccttgttttaaatatttttggaacttcatttctcttcaggtctatttaataagcttgttaggaatattgtaaattattttagaa

SEQ ID NO: 94939 - DNA, 122220 bp, Homo sapiens
  misc_feature (1)...(122220): n = A,T,C or G
ctacaatatggtggctgggtttcccaagatcaacctaagagagggcaagatttaagaaagaacaaaagagaatgagcaagagtacttaagagagaagctgcagtctttttttaacctaatataaaaaggaatataacattgcttctgtcacactgtatttgccagaactgagccactgaggccaccatatactcaaggggaagtgatatacaaggtgtgaatatcaggaggtgagggtcatgggggccatcttacaggttgtgtaccagaaatatattctctgtatttcaaatatattttaaacaggaaaacatagcagaatattacaggtaaaattgcacagacatataggtgatgaaatcaaataaccaagaggaaagcccttaatattaaaactcaatgtttaaaatgaattcatgttatgtagaggtggcttttgagacagcattttgtgggcacaacccatgtaatagttattaaaatggttatttctatgcttattttggaattagtgtcaggttaatgctctagttctcaacataattcagattcctcaccaccaaaatctaacaaatgaaaatagtcacttgctatagatattgtctactctttttaactattaccactggcatcatttgacttttcttcttaactaaaggggaaataatgtacttttaattactgagttaaccatactctacttataaactaacatatgtctctaggtggttcaatgtgattccttaaaataaactaacagttaatataaccatgaaaatttaagcttctacctctgttaagactttaatgaataaatattaatttgtttaggaagacaaaattgtacatctcctatagcttgaaaaaccagcaaaaaatatagattattatccccatctgaagcatggcagaaatttcctatcctgtttaaagccaatttcatgctattagcttcatttttttcatttgtatgtaatagcaaaattagacctataataggaaagccacatattatttgttgtatcttttcttaaattatgggttttttttttattgaacaccctttaatatatatacatctcaggcttaaattctttaattcttttttacagagatcgatttttagttttccaaagctctgagacccctgggaaagggatgttgtgatgagcagagaagaatgcttaaggtgaagaaggatctgttccaggcctcctagctgttgctagttccttggcttgtggcagcacagctccagtcttacatggcattctcccttcctcctcccctccccgtgggtgtgtgtgtgtgtgtgtgtgtgtgtgtgtgtgtgtctgtgtttctctgtatgtgtccaaaattttgctttttatcagggtaccagtcatactggatttgctgtccaccttactccagcatggcctcatcttaactagttatacctacaacaactgtattttcaaatatggtcacattctggggaatcagggattagaatttcaacatatgaagtttggggagacacagttcaacccataccaaagcccggggagtctacttgagtccactggcaatgatgagccactaagtaaagattttttgtgtgctgttaatggtttttctgttttcttttagtcaggaagctgacatgttccaacaggtcttttaaataagtgtgtcttagttgttgcgggtaatagtgactgaaggggctctaacctggaggcagagaggctaattttaagctgtttgagggctataatctagtacatagtctacaaagagctacatgatctggccacctaccttttcagcctcagggtagtccattctctgcgctccacccaaactggctttgactcagcatcataaacaccccaggtcctttcctcctcggtttctttcagcactttgttccattatgcctagattgctctctctgcttcacttagttaatgcactgcttcagagcccaaggtaaatagcacttcttcaagaaatcttcacttgagccctccagactagatctgtctctctagttatttgctgttttaacttttctttcatctgtgaaactaccacaattgtagttgtatgattaattttacaatttgtcatttactctctgtctgccttgttagactataaattctgtgaaggagtgaaagcatttatcctatattgccacagtataatgccttgtgcagggtaggtccacaatacatatctgttgtataaaagaggtaataaaaacctgtgctagggtgggagctatggaaatgcaaagaaaggacagaggaaaggtttaggaaatgttctgacttagcaactgcatgtggtgggcaaggaaggagaaatcaaagatggtaccaagatttcaagtgggagagaaagatagtaccactgatagaaatgaagaggctagaggaactaggttgggagccccatctcaccatgaggtggatggtgagacaggcaagtagaaacatgaaccacttaaagaaagaaaggtaggtagacagatatttggttgatatgtgggtcttatgctggttcaggaaactcccaacaatcactgttgagggaaatgatattctaacttatttggtctgcatttccaatatacatttacagtcatttttcatatgtgtaagtattttttatttttgaaacattcacatttaaggtagataatttggaaaataaaaaaaataaagaagtccttgtaggacaggtacacataagtagaaattggcttgcctacaagggaaatatgtaaattgatataatgcttctggatgactatttgaaagtgtaacataaaacacttaaaaaataaaaatggcaatatacctcatactggatcatttacatgttttggaatttattcaaaggaattaaccagatatgtgtaaatggtttgctttgaaagatgcaatctctttatatggatgtgacagctgcatggttaagtttccattcaataatttttaaatgtttggtcttattgtactaataattttaaacttcaggtcacactacatacactgtttcaagctctgcttttttttaccctatctttgccataaccatatattaggttatgtttcaataacctaataattaggttatttttcaataacctaataattaggttatttccatttttcttttataatcttgctgtgataaacacttctatacataaagccacttcatccaaaagtggtgatcagatgtgagcacaaagtcaaattgctatgtctttttagtctcttgatacattaccaaatgatcttccaaaaagttgaaccaatttatattctcacaagcaggatatgatattttattgtgtcaccaaattctggccaagtttaacgctatttctggttagatattggttacttactggggccagtcgatgtcaaacaggcatttgtctgggctttcagaaaggaagaaggaaaggaaatcaccttaatcacatacctatgattagtgagacaaatgatatgcacaaacaaatgggtgcacagaagtcaagaagtgaggtttgaaaacctccgcctgcatttcagaagttgtatggaaacacctagattcccccggcagaaatttgctgcaggggtggggcccttatggagaacctctgctagggcagtgcagaaaggaaatgtggggtcggagcccccacacagagttcctactggggcactgcctagtggagctgtgagaagagggccactgtcctccagacaccagaatggtagatccactgacagcttgcactgtgcagctggaaaagccacaggcattcaatgccagcccatgaaagcagctgggagtggggctgtaccctgcaaagccacaggggaggagctgccaaagaccatgggaatccacctcttgcatcagcttgacctggatgtgagacatggagtcaaaggagatcattttggagctttaagatttcaccgccgtgctcaatttcggacttgcatggggcctacagctcctttgcttttgccaatttctcccatttgaaatggctgtatttagccaatgactgtaccccagttgtatataggaagtaactaacttgctttcaactttacaggctcataggcagaagggccttgccttatctcagatgagatgttggactgtggacttttgagttaatgctgaaatgagttaagactttgagggaccggtgggaaggcttgattagttttgaaatgtgaggacatgagatttgggagggatcaggggcagaatgatatggtttggctgtgtcagggggtgggggtaggagggtgagcattagggaaaatagctaatgcatactgggtttaatacctaggtgatgggttgatacgtccagcaaaccaccatggcacacatttacctatgtaacaaacctgcatatcctgagcatgtactccctaactaaaaaataaaaattaaaaaaaaaagaaataaagatgctatgttgctggctttgaagaaagagtaatggggtaatgagccaaagagtgcaagaaccacagctctagaagctggaagaccaggaaacagatcctcccctagagcttctgggaagagcatggctccaacaatactttggtgtcggcccagtgaaacttatttcaggcttctgacctgcataactataaaagagtaagtatttgttattttaagacaccaacttcatggtaatttgttatagaagccatgggaaactaatacaacatgttttggatacatagcaagaaaagataggggaaatcaaaaaagttgctgcaaaagtaatgataatgttatcattgaataaaattttccaaacccctgggaattttttactaggaatttataatctgaggatgttttgttgttgttctaatggcaatctccctatttttaggcaactccaaaatctgcacactaaaataaacaaaatgcagtcagtatatagtttccaaatgcctgaccatagaatgaggctggcataggatatttttaattggtccttggatgaagtgagaaaaataaagacaatgtaatgagttttttcaaaattaaatttatttatgtatttgctcttatatttctattattatcttgtaaaattatatatgccactgtcgtgttataattttaagcaataagtttagaataaggcagtaaaattaaaagctagcaattggttccagaactttttggaacttttactggtctattaaattcctaagtttagtaaccatttacctaatgcagataatcacgagaatttttctaccttattaattgtattagttacttattgctgatgtagcaaattaccacaaacttacatcaacagtgtattatcttactcttttgtaggttaagacgcctgaggtagatctcaccagaagaaagttcactcacttttggaggctctagaggagaaactctctctttcctttttccagcttctagaaacctcccacattccttgacttatagctccttcctccatcttcaaagccagcaacagcaattgagtccttctcaaaacacatctccttctttgactctatacttctgcctcacttttccatttttaagaattttattattaaattaaaattttaattgagttatttaacaatcatattcaacagtttgataaatatgactaatcttaaaaattagtgtttttttgtatgtgcttttatcatatttcataaaattgaaaatttgattctaaagtatgtcattattttataaacttctaagaaaaattgttgtcaattaaacaatagctcactattaaatcaaattaaaaatttgattctaatcaaataatgaatcattgttttatgtgctactatggaagaaaagtcactgccagttaaactacgatgatttttttttactacttagaattgttactttatgtttattgaaataattttcttcagcttaattggacttatatttttatcatacatcatagcaatatgaagagctacggccaagttcatgcagtcacaggcaatgacaactatatcaccaatgctgcctggctgagagtgatttaagacatcattgattggaaggtatatttttatttgagagaagttaaaatgtgcatgttagaatcaatgacattatatattacggagactgttagattatgttgattcttgattcccactctttggtagtaactgagatggttctggatgggaggtgatttctgctttgctgggaaacacattgcacatgtttcctgtttggtgcacaggacagggttcctcagttagtgaataagcctggtggattatgcactcaactcgcacagctatgagtgcacactcgtgcagaaacagacactctccttgccatctgatgcctaaatttaagtatatgcaaagatttcctatagcctaataaatagcaaaggtctaccatgggtagttacagaaaatagacatatattcccagggagaaaaaaaaagcaggttttcaaaaaatctgtttgaataactaaaaatcgctaccatttattcagggcttactacatgccaggcactatggtaagaattctgtcaacatttcccccatttaatctcccacaactaacaaccttacacagacgatgtaaatataatccttttataaatgaaaaaagtgaaactctagactaggtaagtgatgtgctccaggaaacatgctaggagggggcagagctaggttttgagtcctggtttgtttgagtctaatcagtgtactagacagtcttctatattctacattgattatatctaatcaaataaataactgcttccaacttactgaaattacattaaagttggagggaatttttgtatctctactataactcayttttcttactggataactctaagatacctcaggaaaacatactttatgaaaatgaatataattaaggaataatagtagaaagcatagatttatcttttttccctaaattgagaatgacttaaaaatcaatttcccaaggacacctgtcacctccaattacccatttgaaaattattcattctgcctcatgactacacaataatgtgtatattatacatcaaaaccacttttttgaaaaatgattaaacaaattaaaaatagttcttatatgaccacagaggaaatctataggaaaaaatagttatcatacattaaaatacaggggcaagtgatttactggtgtacttcagatcacatttctataatttgtaaatttattctttcatgcaatagatggaactgaagttaggatgtttcaataaatcagaaaaaaaacagcctaataatctctttctatacatcactggtctatggcaatttgaacagtcactaatgttcattctttaatttagcgagtagatattattttcttaccatttttccacagtactgattcttcacattcctaccactaagttacataaagcaatgattctcaaccttgaccatacattggaatcacctaggagagcttaaaaaaatattaatgctggggtctcaccccagagcttatgatttaattgattgggagtatggcctgtgcatcaggatttttaaaagctcctcaatcatccccagatgattctaatgtgtagccaaagttgacaaccactaatatgaagagttagataatcaaaaacacatctgtcagtttgagaaggaaggctgactcaaatagcttaacagtgatacttttgaattagctacagatttctttgtgtatattatatatgttcttataacaccatagataatggagacttagttatgttgccaaatacactaggcatttcatgaaccaaaaaatataaccagatccttatctgattataactttgctcctaaaattatcttatttgtttttagaattatataacaatttgtgtttggatcataccaccataaaatccactactactactgtcttgggggtgtacgtgggagtgtgtagtaaaaaggtttaaaatttataacttgccatcttgggcagyaatcctggccaagtttcttaaaagacaatttgatacactaataaaacttctgccaaaataatcttttacagagccaaagtaactttaggtatgataagctggccccaatgcatgaacttatgaaacaaacagacagtaacaggctatctgtacttctgatattactgttttcttgaaaaatatacatagaagaaagtaagattttgtataacaagtggtagagatgcccccaaataatactttctattcacatgtaactttataatctgtaaagcttctttacaataaaattccttatttggtttctgtggttatttaaagtcacttgactccttggtaatgttcttaaataaatatctttccagctcaagtggtatactaataaggtaatttaaaagaaaattcatgattggttgatgagaagctgtcatgatgctgtcaagaaagttaaggtaactcactatgatgtttatatgtagcattattgcagtttctaactagcacatttacctctggttcagattatacatcaatactccactttacctagctcctttaatattatgccttctaaatagacaattggcaactacaatagcaaatactctgtaagaggaaaatatgacctcttaagaggaaagtgtcatctactgggacttgatgtcagcaaatgaatattcattcaaataaacatctgttacttccacaagccactgcagtaaatcagttttaagaagctgtacagagatgaataccatatcacctttcctcaccccaaatcaatctctttaaactgggatccctgttgtctggattttacattgcacataccacattaaaacacattgtagctaggcaatacagagcctgtgcatgtgctcctgatgtcagtccccgatattggttttaacttacttaatatttgcagtactcaagttacatgtgtttgtcaagttatgtggttgagattgctgcagtgtcagtcctcatttgtagtgtctttaacaaacaagtgcttgttcctgtagcaaactgaccatctgtgcacacacacacttatatgtatatacgtatgtgtatacatattatatatatatttgcactctgttcgattagagtaagtacactcagattaagtcattagtccaaacactatttgtgccacagtagacacagatgcctggtgatactgggaattttccccagacaactcctttaaataactaacaattatttttatatactcacagttaaatgcacaaataacagcttatcagtgatttagtgttctttacagaaactcagagatttcagcattctataaactatccctcagcctacattaggcacacatgaacttcttgttcccgttataaagtgaagggtctaatcaatgttcctaaatctaaatggtggatttaaaaaaatgtaaaataaattgttaaattttaataggaaatgctttgtatttaagatttggccatatcttctaatattgaagtgacagagtaccaagatttatttttcataatctcttactttttatagtccacktggggacactactcttctgttaagagtcactgacctccatgttcctcaccaataagaaatcatttttaagttacttcagttgttttcttctaatgtaagtggagtgtgtgacgatatagacatttgatttaataaatattttaaaatttagctcaacattataatcgcctaaatgggatagtagaggaaagggacaaagaaaggaaatgtcataaagagaatgaactagagagagtttggtagaagaaaaattgcccgggaagaccacaaattgtttctgatttttacaggagcttctttaaacacatttcttcctcattggacagtcactgtcaatcccactatccaaaggctgtccaaaagcaacctcctggggatgcctgaaaccacagcacttccccactcttcactggctgtcaacatctccaggctgtcctaracatctcaatcctttcatgccactgtggggccaatgatgctgttaatttcttctcctctttctcatctcttcacttggaatgccacttttttcttcagaaatggcagcgcacagcagccaagagcatgtgttttggggcacagtccaacatttactagtcatgtaatgtgacctcgggtatgttgctttctttctctgtgcctcagtttcttcatttgtatttattaacatataataattggggttattgcgggtattacctaagtcaatgtatataacagacagcataaaaaacagtaactgctacagacttgtttgctatatttattcaacaaatgtttactaagctccaacagggtgctaggaactggggatacaactgtgatggtagcaagtgagtgagagagtccaacatctgaagtatcccagctgaaaggttgaattctgaattctatttttttaaaaaaagataacctaccacaatgtgaaaataattaaactgctgctatttaaccaccatataattatccttagaacttgttttctatctactcaactagtccctatttcttcagagactgctctgtgtgcatgcatgcgtgtgctcatgtgtgtgttgatggacatgtcacctatattcaaaaatacagttttctctctgcaggactagatattacaaaacacagttttttcatttgttgaataggtactcaatatttgtttgctgagtcagtatataaatctacctttcatatgctctggcctactctctaatgcatttgaaggtagcaaaacaattccaaggggctacttattacctaaagaataggtaagtgaaattcagccattgtcttttaggtaggaagttcctgtttttagaccttgaggccatccctcttaaactatcctcctagattataaatcctttagagcagagatgccatcctattttgtttggcacatatcactctagagcctttgtactatacaaagtcctttaaaaggactttatatatttattatatgaacaaataaagtctcagatatgcatgtaattgtatttcctaagttcagttttatgggactttttgtgtgtatagcaagagtagccataaggtagtaataactttgttttttaagaaattcttctaagaacaagaaaaaaattaagtttagaattaatctaaccagaaagttgaaatctcacatgatagaaacaaccttattaaaaatgaaaaatgacatcaattattttttactcaattctaaacaacttgaattgctgatgtattttttcccatttaaattgacagctggtttggatacacatatgctcatatagccaaaataatggggaaaaggtggcgctggttatggtatcctttacataagaaagacattctaatttttaaaagctaaattgaattttaacagttaatcgactcatgtggatacatatggacttaaatcatcactggcataagtggtgcctttaagcactgttagttttgttgttgctgtttctgtttttaaagatgctaacaaccatgttagttaattcagtgtgttcaacattatttatttaaacaagagcataaatcatagggattccagaattggaaaggactttcagactcttcattttactgataaagaaactggcatctagaaggctgaagcattttaactaggacttaaacttaagatgctgggtttctgggtcaatgaccacgatgttttgataaagtagtagagaaagttggaccaaatgtataacagttttattttccatcagttcttttaaattgctctgccaatgagtctgagattgattgaggtgattgattttaatcttaactgccagactttagctttatagaacacagaacttgatctcttctacgcagacattttattaagcaggttagaaaaactgtgctgctctgctacacttttagaaaatagcgtaagtctacagtccagtactcattctctgatcatgatcttattagaaattgggtgagaaaatgtggtcattgttctccctgacatttatctcagaggttagagtcatataccaaacatctttaatttatttcactgtatgaaactactgtcctttaatttctctaaatacctttcaattcctgtatgcttggcctatgctgtctttaatgaaactggctccataaatatattaggcagtgtgaaaagataatttttcttgttgttattattccataacatttccttcagttggctctctctgagtgtgaatgaaggtaacttggtctcattcaagaattattttactaaatattatatgccacgtatgccaatatactgtcttaggcacaaaaaatggatatgggaccttccctccttctagtagggggagaaaaatattgcagaaataatcacacaaataaatatttacttataaattgtgataagtcttatcaagaatatataggatgattatatagagaatgattattacaggattactgaacttatactaccatattagagaaggtctctttcatgtttatgaacaaagatgcaaaaagactgttaaagttataataactttctgatgacagtcttttgacaatctctacaggagctggtgacttgggagactggactctgtgccctggtagataggacagcatagcagaatgggcatagaattccaaagtgctttgcacagttctgtcaagagctacctttaagactttaggaaagtgatttattgtctctaatccttaatttcatcggtagaaaaagtctagtacctcaacatccttttctggattattagtactgatactaagtggtcattcctttatgaatctaagttggagatgttccttacctctaccacacagaacatatattctttttgaaaattctgtatcactgtttttttaactcattcacattactctgggatatttactttgtctgagttattttgggatattataatccagagaagttaaaatcatatacactttgatattttactaggcataaaagatttttgagatctttataaattataatgagcctttaaaatggacctgaataaaactaaaagtcttactcttgaaacagaaacattctgtaaaaatattttgttttactactttagttatatagatgttcaactggcacataagcctgattatcatatcaaattaaactactttatttgcagccccaaaagaaagcacactactccttattgagtcttttctaattagataaccatttatgcagtatggaagaggtagccagaatcacaagcaatcaggctacttattccaaaataattgtttgcatatttcttccaaatctctattatacatttttcatccatcatggatacaactttgttttctgaagcagaaaggayacatttaacctgattttacagaagatgctataagacatctcagaaaaatttaagtgacaatgttaagtaaaaatataagttaaaaaatgatgtatgacacttttgttagtctttttaactaagcaggacatgagctgatttcatagaaaaggattttctgacaaggaggaattgataaactgttaggtataatactcaccattttatattcatgtatcatattctatcgagtgaatgaaccataatttaccaagcatagtccttatgttggacagtttgagtggtttcmatttttatatagtataaattatactgggataaacactgtcaggcatatagcatttaaaaaatattttggattatttccttaggatagattcccagaagtagaattactaggttaaaagagtatgaacatttttatgattcttgtaacacattgccaaattgcttcccaaaaaggttatatcaatttacaatgccatcagcaatataggaaagtgcccttctcataatactcctccaggtatttggcattacggtttttagatttgcaaattttgagggcaagaatgttgcacctcattttaatatatatttcttacatttttaaaggcaaagataaatatttttacatgcagcttaataacttcgaatttctaacatgttctttaactattttgatatttttataagcctattcagaattatatgtgatatatactaatcattattcatagtattatacaaaccattttatctagcctgttgtttcaacttgctacatgtacatggttcctttaggaaggcatattgaggcttcaatttttgtatctggtcaaatgcgttgtttcctgtaattttttgtgttgttgttgctttttagcatagtatatcctaactctctatctctgcatcatgtactcaaattattctaattttcttaagtagtgacttttaaaaatgttaactcttgaattcacttgtaattatgttgatgtacgaaataaggcatgattttaagtgaccttttccatattggtaactagttatctcagtcatttattgcataatacttcttttctgtatgttttaggtaaaatctcatctgttacataattaaatgatctaattcttggttactttttttcagtgatctatctgtccttgagccagagcttattgttttatttaatgtgtagtctcttcacgtgacttttttcagtatttaaaattggtttccctattttttcttacatcaaatttaaagtcctgacaaattctaaaacagtttgcttgaactttcatcatttcttttaatttatgtaagaacttattttaaaaaactgttaaaacaaaacagcatttatttttgccaaatctacacccctgcatttattcacatcttttttcccctcataaaagtagtacctgctcattaaactagaaaaacactgaatatagtaaaaagaaaataargttgttcatattcatagtcactctaaaatctaggtactggtcaaccttttgttttcagacatttttgttttgcttattgtaaaaatatgatgcatattcattcaacaaatatttatagatgatttactttgtgctcggtaccttgagaggtattgaggcaggctctgatttcccagtaactaaaatagacaaacttctaccttaagtgtattttataataatctgtttttgtattttagcttgcttttcacaactgttattttaataatggcaaatttaattatgtgggtgaatcagtatgtgtaatcatttgcatattgttggacatttccartttttcagtatcatttttctcacttttagaatgtttccttgaagtacatttcttttgaaatggagaaatctggtcaaagggtatggccacatttaaggctcctgaaaaaaatttccaaattccttttcgaaacatgtaccaattttcattcctactagaaatggacaaagggattttttaaaaaacaatttgccaggaattattataataactaaaaattgtttttgttattttgatagatatttcatttcaactttcctttctggataactagcaagactacatttttgttataatgttaaatatttctttaaaaatttttgccttttgacatactaaggtgctcacggttttgtttcatgtgtacaggctcctyaccatgacatgagccttttttggtatataccttccctgagagttatctcaaaagagaaatacagaaaataatcactgagttatctgacgtcaaaccaaggcttatgcacctttccaactccagggcccagcccttggtgtaggacacagcaggttttcccctcaggatgcagtggaagtgcacccagatgtcaagcggcacattggattctgggggtccaaagacactgggactaacaatgacaaacaaggctgtgtaaactaaggctgagccaagaaataccttcctagtaaaccaatccagtctttatgggtagagaaagaaaatttcttagccagagaactgaggatacaagtaactggaaagcatcagaaacagccagtaaaaatgaagggactcttagaaaagttattgactggaaggaaacaaagtaccttaaaatcaacaaaataaattcatatttattctacattttttacatgtgagggatgctgctggtcatggtggataagtagaggtctataccccagcttacataatcattcaattcagaaacttcttaggtaactcagtgatagatcctgtgaaattcttagttatacatactcacagttatgtacacagataacactgagactcattgaaaggcgcaggaaaaagcatctcccaaactagggaggtgcaaaggattctggggtctgccttatttgcccttaggcaggcctctttttgtcacaacatttggtggataaggggataagagataatcattgtaatactgcaattggattcggcatcttccctcttaccactgcccttctcagggttgtgagaggctggcaggaccccacaccaacaagagaaaataaaagagactgagaggaaacaatcttctttgtggtagctggtgtctgcttgtggaactattctgagggaccttatgggaaaagggccctttttatattttatgaaataattgcattaggtcaaatttgtatgcttccaagagtgcctgtgaaacatgatccttaatttcaaggattgacatagcaaaaacaagagagaaaaaataattacaaaacaggttgtcacacaaggaagaactaaacattagaaacaatttacaccttacaagttacttctggtggaggtgatgccaagtcacctgggagaggagctgtgagctgaaatcatttgagcaaccccttgagtcagctgaatgaaggcagccaggcacctcacattgtaggggcagggcactactgcccctaaccttatggagccattcattatctttacggtgactttaacaataggtattatttgttgaacacccaaattccaggtattttgccaagagcattatctatattatctacattatcactggccctagtgctctctccaggaccaatctaatgtttccttctttgacctttacctcatgccccacaattccaacctgaattaatagttccattattagttaattgatgattagtaatgctcttttctcattctctttacttctttaatacagcacttctcattctgcaggctacgtttctggctgccccactgcacaattgagcttggttaagagcatgacccatgtttcactccagtttcccaagcagttagtagatcctaaatattctgttgggtgaatgttaagttaaactccatgacttcaagttcgccaaagaatcacggaatcatggaatttttgagcaggagaggacttagaacctttgatacaatctccttttacataaaagtaattgaaataacttaacttgcctgaggtcatatgaacttcgtagaatgaggattagaatacacttccctggcttttcaacccaatactatttcttctgtagaagatgttaccaaacaactaaatatctttctcccctaagctccttaccccactaaatcctatcagcaattggcctttgggccttcaggctatttctgttcttaaatttcctaaaagaacccatgtttaacgtacagctttccttttctgtctccccattccaaacaaagcaaagcttcaactccaaattggctggcttttgctgtaacatcacatcgtgtaaagctgggggaaaattctgcttttattttcactaacaagcttttcccacaagcactctttgacccagccaaatcaaaatgcttgtccacacacagaccatgatcttttttgaggcatgagatattctatctgttcattctgagtggaatatccttactacttatgaacctagcgaactttaatgaactgttccccttctggactaggagctcttagcacagagtagagacctggctttagtcacacagcaattgaatgagtgtatgtccagcacctagcaacatatagccctcaataaagttaactgaatgactgtgtctttggaaaattatggaaatgtaacttactctttagagttgctatcaagcctttaccaaaagttttctattaggagaaatagtaagcaaatacgttggctcactcagtcttttcttctttcccttaactctatacatcttttgactgccattctcactccctttgtgaactgcacattctcacagcacccctgcccctggacacttgtgggagaggaatccacaaattcctttgaggctccatcaccggaacaagttctcagtagctggagaaggyctgggtggcaaacaggaagtttttgtattctggctactttgtgccgtggggtaaaaaccgcagagtccacctggagactgcaaaaagaatggtagaacaaacaaaactgtcactatctccacctaaagcttttctgggtggacattctgactcaacatcactcagaacttttctttccagaactggctcctcatgtgcaagacagaagagtcccgcagaaaagtgtcatgttttagctctcatcgccaccccccaaccccaaactcttctccttcacttttaagaatgttgagcgggacattttaaacactgttttggatttttaaggtttcaaataatccgaaggacacttccctttggcagcgacagttgcaagctatgagccaaaaagaaatagaggttgttcccctaatctccaaatacattctaccctcttcaattcccaggaccccaacttgtcccttcctccagcttacgcgaggggcaagtggcagctcttctccgcctgcgtgcctggcctcgtcaacaacacccattagtctcccgtctcccggggcggtgggggactcccaaccacgcgcccagggcccttgnnnnnnnnnnnnnnnnnnnnnnnnnnnnnnnnnnnnnnnnnnnnnnnnnnnnnnnnnnnnnnnnnnnnnnnnnnnnnnnnnnnnnnnnnnnnnnnnnnnnnnnnnnnnnnnnnnnnnnnnnnnnnnnnnnnnnnnnnnnnnnnnnnnnnnnnnnnnnnnnnnnnnnnnnnnnnnnnnnnnnnnnnnnnnnnnnnnnnnnnnnnnnnnnnnnnnnnnnnnnnnnnnnnnnnnnnnnnnnnnnnnnnnnnnnnnnnnnnnnnnnnnnnnnnnnnnnnnnnnnnnnnnnnnnnnnnnnnnnnnnnnnnnnnnnnnnnnnnnnnnnnnnnnnnnnnnnnnnnnnnnnnnnnnnnnnnnnnnnnnnnnnnnnnnnnnnnnnnnnnnnnnnnnnnnnnnnnnnnnnnnnnnnnnnnnnnnnnnnnnnnnnnnnnnnnnnnnnnnnnnnnnnnnnnnnnnnnnnnnnnnnnnnnnnnnnnnnnnnnnnnnnnnnnnnnnnnnnnnnnnnnnnnnnnnnnnnnnnnnnnnnnnnnnnnnnnnnnnnnnnnnnnnnnnnnnnnnnnnnnnnnnnnnnnnnnnnnnnnnnnnnnnnnnnnnnnnnnnnnnnnnnnnnnnnnnnnnnnnnnnnnnnnnnnnnnnnnnnnnnnnnnnnnnnnnnnnnnnnnnnnnnnnnnnnnnnnnnnnnnnnnnnnnnnnnnnnnnnnnnnnnnnnnnnnnnnnnnnnnnnnnnnnnnnnnnnnnnnnnnnnnnnnnnnnnnnnnnnnnnnnnnnnnnnnnnnnnnnnnnnnnnnnnnnnnnnnnnnnnnnnnnnnnnnnnnnnnnnnnnnnnnnnnnnnnnnnnnnnnnnnnnnnnnnnnnnnnnnnnnnnnnnnnnnnnnnnnnnnnnnnnnnnnnnnnnnnnnnnnnnnnnnnnnnnnnnnnnnnnnnnnnnnnnnnnnnnnnnnnnnnnnnnnnnnnnnnnnnnnnnnnnnnnnnnnnnnnnnnnnnnnnnnnnnnnnnnnnnnnnnnnnnnnnnnnnnnnnnnnnnnnnnnnnnnnnnnnnnnnnnnnnnnnnnnnnnnnnnnnnnnnnnnnnnnnnnnnnnnnnnnnnnnnnnnnnnnnnnnnnnnnnnnnnnnnnnnnnnnnnnnnnnnnnnnnnnnnnnnnnnnnnnnnnnnnnnnnnnnnnnnnnnnnnnnnnnnnnnnnnnnttgcagaagtgcagtttgaattctgcttttcccagggtggcagctcggtcttggccgggatgaatcttcgctgctggccgtggaaacagctagagcagctcgttagttgatttttaaatttccaagtgttgtgtttaaaggctttacgtgcactgaggaggaatcgccaccttaaataagcatatgggcgattaacagggtgtgttttcctctcggaaagggaatttggtagctttgaccaatgtcagtgtgtaaatatttagacgttattagtgacttttaaacatttttcagcgagatstgttatttacagtgtgtcatatgttattaatgcttgttgcctaagttccttggcaaatctgtttcatgccttctgagaaagtagacaattgatagattgtccaagagacggaaaaaaatgtgagtgggttttctaacttgagttcggcaaatcccttaacgctggcgttgtgtgacacatcacctcccttgtacgtacccctgttgtacgatgaaataagtgtgaacacttttgaagctttttcattacaagacgattttagatgactagaagaaaatgctgttggtttatttcctagatttaacattttctcctcctcctcccctgttctctttaaaagttttccaagagataacttcaccaagatgtccagtgataggcaaaggtccgatgatgagagccccagcaccagcagtggcagttcagatgcggaccagcgwgacccagccgctccagagcctgaagaacaagaggaaagaaaaccttctgccacccagcagaagaaaaacaccaaactctctagcaaaaccactgctaagttatccactagtgctaaaaggtaatgtgtaaaagaaggatccagcacactttgtcaggttgtcytccaggtggttggacgcttttgttggttttacctcaatagcagtagttcagaaatatttacttcattatcagtttaattgtacttgaatgagttgtcattctttaggtggtatgtaagcaacattactagaattatacttttaagcaaacttaattctgtacttcggtaacttcagttaagagtgtccttgagtagagattagactaacattctgacagattgtttaaggagttggcaaggaaaatttggtgaacccaaattagatggtactttggggatgttccttttatgagtcataatcttctttaatgaaattgacacttccagagattagcagtgcctctcttcatgaaacttaatgatcagaaatgatcatatttgctagaaaatttgcaawttcaggcctttgctatatttgaaagcagatttaaaattgtgctgcaaatctgcttacagttttacaaaacatgactttcaatcgtatatcacaggtaactttcctggttaaattatgattatcccttcctgtgcttgtgagggcaaatcaaactgaaaagtagccctttacaatttgaggtgtcactagtgatagaaaacttgcattgtccttgggcctcttcactctgaaacttgtggatgtgcttgacaagttaatactcaacagcaggagaaacatatttaattggatgtaagtgaaagatcatttgtttcctattgattgatgttttctgatggagaaaaaaagattctgtcaatgagactcttatcagtggtagtagtagtggaatatccacaaactctagtaattatacataaaatgtataatgtttacagcattaaccaattttgacattttgttaatttttattgataactaaaggaaaaagaatataaaaactgatcaaatattgcattctgtggtgattcataaatactcatatttttctatggattttcacccttattgtctcagtaatgaagtattaataacttgataatatttttgaatggcagcagtctttgacataatttaaaattctcaatttggtatagtgttgatgcggaacatattagacacatctaaagttttgaaatcatcttaaatttgaatcaaatcagagaactgcttttctcccccttaactcaggcctatgtattttctcctctttctctcaatgtttattaaatttaagtgctgtacctaaaatcagggaaaacagaaatggttaaattagaatgtcaagtagtctttgaaagtttttcacaagtaaagatatttgtaaattttaaactttttttttgacagataaaatattgtcagaactgttaatgtgctcttgcagtagcctgttaatttttacctcagtaaaagtcacttcaagtccttgtcaaatattccagtgctttccctcctccctttttgtctcatttgcatataagcttgaaaagagaatttctttggtaaaaagtgttttgaaatagatattatattctttactgagtactagtggatgagtatttctccaatcaagtgtaaatgacttacttgtttgcagcagcaagtgagaaaaaaagctgcaaagtttctgttaagggatttgggttatgcctctgagaacaaagaggaagcagccatgttagcattactgaaggcagagccagccttgcatttaactgcatggtggtagagggcagtgtaattccctggttattctgtagactatatcaaatcctttttgtctcttctcatttcactaacagaattcagaaggagctagctgaaataacccttgatcctcctcctaattgcaggtaagaaatgaattttgttgttttggtttcaaattgtggaaaaataccaagagattgatgtattgtctggatatgtgtgcagcagaggagacaacatttgcttctttacagctttgcaagtgcattaaacaaaaattgtagaaggtgaactagataaaattgggagaaaaaatactttttagcataagtatacattgtggatttatgaatatactgattttgtgcttctgatattcatatgaatggtgctgatttttgttctgatgtatttctgtagagggtgttttttcagaagtatactgaagaaacttctaaaattttgctaagctttaaagttactgcttgtgtgtgcaatctgaactgaccttccacatttagaaattgctgaatgtggtgttacaaaatgtaaatgcagtaaataagcatatagttggttctgtttgatttattcagttactagccttaaggacaaattttatgggctaagctaatggttttagtggtcgttttctacagaatgcattgttggaattatttacgttttaagcaaatgtcctaattgcttgggaacatttttagtaattttggtggttggaatatgtgtatgaaaagcagtaaatgaattggaattgtgggaattcattttagtggaactcaggtagatgaatttaagattattggttggtataagatacattaaaagtagctggttgattattttttctctaataatttttttcatttcatttgtatagcgctctattctttttttaatgactatggcttacaaaattgaacacgcatagaaaacaatattgtagatagtttgtgaagagatatgtgctcaataatgcgagtggctgcaaggaattaggcagttttatggtttgataggacaatgttttcatgtttaacctgtatttttgctacaagttgtattcacttgggatgatcagaccctgtctctgaagtctgcttgtgatataatagggtataatccagttgcttcttattgtgtatgttaactggatcctcagataaggtgatttgatcctgatttatccgatgaatgaacagtttgcttgtatttgtaatttcagttcaaacaggaaacatgaatgtaaactaattttaaggagatggtggtatgtgagatctcaaagtattacttaagagctatgctgtccggtaatgtagccacttgccacatgtggctattggcctcttcagttgtggctagtccaaaatgagatgtgctataagggtaaaatttatacacattggattttaaaaacttagtacaacaaaaggatgtataatactgcattgacttaaaaaaagttcattaatattaaaataatattttggatatatttggctatataaaatgttaaaattaatttcacttttttactatgttaatatgttattagaatatttaaaattacgtatgtgacttgcattgtatttctattgaacagtgccgctttagagaacaagtaaatgaaagtattttccctccagccttctaaatggtgtgtcaaatctgtagccatttagggaggtcaagttaaatttgctccctggaagaatcacttaacttgcagagtgtattctgatatttcccattatgaaaaatgtaaagatctatcaattcagaactcttaaatgttttaaaattgcatgtagggtcaaacatttttaaaggtttctgttgattgtctgcaaatgaaacaaactaatgtacgtgcataaatctagagagcctagtagacatgtattaagtgccctcagagcaatagcctagtgttgcagttgccaaagaaatctactttacatgtttaactccggaatgtttcctcaaggtcactgaggattattttagagggagtagaatctttcaatgagataggaggtttcacttgtctttctctttatataccagatttcatttaagtccttgaaataatgcttcctcatttagtgatcagactagtgaaacatcaaaactttgggctttctgtgaacagtaacatggaacacctcatccctgctttcccttgtcacaacctgtgatgactatcaactgctgcaaatgacatctttcagttctcaggttcttttaatagatgagtttatgtgtggctgtggtatgtgaaaaacagacatacagtatgtcttagtagggaaccaggataagtggtttcttattatttggaggcagtgttttaccatatgcctcacatgtaaaatatccagatactttgtcttcaaattcttgtgggtggaagaagacctagtttttgtccttgagtaggaattggaatactgagtgtttagtaaaggtgttttagaaytttgacaaataaaaagcctgaatttgtattgtatttttgccttcatgtcagatctgtgacagactgtggtgttatgttcttttaattgacaagtgcgtaaatgagaattttagctttacggtgattgtacagtttaaatttattaatttatgctataattaaaaatggaatctatattcataaattctagaatatgtgaattcatattgcctgagatctatgaaacctaatacatttggctttcgtgtgtagttatttaatcagaattccattacagttttgaatatgatttttacaagcttgtcaaagtacatgacagatttaattcttcctcagggaagaaatgtaaagtatatctgtgtacattcaggaaaaagttgaatgaaacacaagaaaactcagcaaaaccaaaattattcagactgggatgatttctctaaaatcccttcctgtgttttaattaatgaaatattctttaattagtatatagttatgtctagtacatacatacccagggtgatcttaagatagatttaattgaattgtgtatggctttatacatgttttaatatattttgatagcattgatatttcttttcccgatagtgtaaaagtttgataatgacgttatttccagtgatttgatgttattttaaatggttttaggtattggagggccatgggccatagtgtactaaacatagggatatgtttatttattggtttcagtttatgctgtttacataaagtataaataatttatacatcaatgagagtcaagggaaattgtgttatgggcatttccctatttgtatttattgagaattgttgactagaattgtttagtgatgtgttattaagacatttactttccatctgtttcccagagggtgtccttgtcctctcctagtcaccacttgtgcaaacagcgaaagtttagaaaggtactggatttctaacttaacccctaatttctttccatataggaagaagcacaaatatactgacgaatattttaagagtgtatgttcagattgaatctatactggagatatttgggggtatttgtattaataaatagtttcttgatgtgggaaaggccatattgggggatatgtattacagtttcaagttaatagtattaatatattgactagcaaaacctgagatcaggtgatttcgttgactttcttctttaaaaataaaaaaataatgaaatcataaaagaagcagttgtttctaaaccagtagttgataatctctagattcctcattagcctaattgtctgaggataaattctgctttcttctgagggttgctaccactttccatcattttytagggcggactagaactttgctacttaaaagagtgagctgctgactgtcagcatctgcgtcacagatgaggttgttagaaatgcagactcttgcttcccccaacccccaacccagaatttgaatttaacaagattcctggtgaattgtatatataagtaggtttgaaaagtgctggtactggagcaagactgtctggtttcagatccatgctctgtcactaacttgctatgttattaccttagatacattttggaatatttcggttcttctcctcagttgtaaagtggggattaaaatgatacccccctttataatagggttattgtgaggattaaatgacttaatgtgtttaagttttgtagcagtgtaaatcgagtcagtaaagtggccacagcaagataaaaatgggagagacagtgtagcctgtagtgatgtgctctcactgttgctggcattttctctagtgcattgacatcttatgtaattttatcttagtcagttcaccagatwattgagtacaagtacataacaagcaatttgttttttaatgtcagtaaaagcagttcctaggaacttgcgtaaaaaagaaaattagcctaaaaacttcaggcatagatgaacaaataytgtatyccttttaaaggaacatgcataagatkaatgatatttaattcaatagagaatattatgattgtccagtaaagtataataaacaatttttagatgagtaatgattatattttccccttttaaaatagaagaatttgtgattttactgtgaatgggattatatcagcagttgtaaaattcacattctggattgctgttacctgcattacctaaccccatagcattctttccatgtctgtgaactaaggagaaattttgaaagcttttttctaattggcgtatgaaagcaggtaataattgaaataacatgtgatccctatattagctttgttggttgcttatagagtacttggttttaaactctctcacacatgtagatagactgctttttcttctttacttaatacatttgattgtttttgttttagtgtttgctacaagattgtatctcattagttatctagtccttttattttcaattcttcaaaaaaaaaggtcctggaacccgctttttataaaaattaaatcttaattggaagctcgactgtaaaacagataaatacagaactactctgacaaagtatttttcatcccattatgccgtgggtggtcatctacagatagtttgtattattagttttattgttaataaattcattttggcatcagcataaacctcaaaaatcatgagggtttttctggggacttgggcgttagtgataattttaaatggtttatgatcaaagcaaattgacgttttatttttcaacaagctaatagtttcttcaacacaactgtaataaagtacttttttcatgctgtattataatatttgtctgctttctgcaagagcgagtgttccttgaatggagagattgtctcattcatttttgtatcttttccttacttcacatggtgctttgcatgtgaaggtctgttaataaataaattgaagtctctcaaattgacatagaaatagcaattccaggcaaaacaatgacttcagagaaaatttattaaatatcctatacattctttacctttttcataattatgatacttaatatttaataacctattcaaagtttacctagctactgtttttgcttataagaggaaattgatactcacagtaggcctagttatttcctccatacgtgccagtgtagcagaaatactcagtactctgtgtgactggaaacattttccaaaagagtgaccaactgaaaataatattcttcccactaaacttcacatttttattaaggatctattaagttcaatgcagataatgtaattagaaggtgggtaaaacagcatgtgcttttaaaaaaagttatatgtttacttcgcagctacatgctcacataaccagtcatattcctctcataaccaattagtactttatgctctccttaaatgagttgctgtaacaacagatggatatgtttacttttcaggaaaatcagcaagtcttgcatagagtgtaaggacattcagattgagaatgaagaacttgtcctttcagtctcttcttccctatcaatatgagataaaaacataataaaatcacttgtaaatctagagaaatagaaagtgatttttttttccacataccaattttgacaggtaagtatatttgggcattttaattggaatctggaagctgaaacatcttcaaacttttaacctttcttttgccttttgatcagtggttctcaactgaggcaatttttgtcctccccttccccagccaccaggctaggcgacaattggtaatgcccagagatattttttgcttttcataactgaaggagaagggggctaccactgacattagtaggtagamgtcagkgrtactgctgaataccctgtaatacataggacagacccccacaataaagaattatctgggccaaaatgtctagtgctgaagttgagagaccctcctatagatatttgttcctgtactttgcctcttgaatttttgaatagtttgcttttgactgttttcctgtcttattagtgatgcatccttaatatattcacctacaccttcctcagctgattsttcacttcctgctacttctatgcgtagtttacatatgtcttatattatttgtcatacgtgtgtgttattttttrtgtgaaaccacaggaatgactaccttgagtacttgctaaattatggtcttctgaggccagaaatgcttacagcagtattttatttcttttaggtcttgtgccagttaattatatccctgcgtgatctagctttaggctggttatatctattatgttctactaggagtactaaagtaacatcatggagaaataacattggacagtcatcaaaattcagtttgacattgaattacacacaggttagaaatgtgtgctcttcatttgggttttattttcatcattatgacaatacacaagttacttcaatttttacaagttcacaatcctttatttgaaacccttggggccagatgtgtttcagaatgcagaaagtttcatgttttagaaaggtagtatgatgtgtttgtggtactttatgtaatctgttccacagtaatgtttctcgacattactgtttccacaccaaaaatgtattaatattcatacaggtgggataagtggaagctacaaatagtttcaagtcagttcacatttagggttgctaccaaattattttgtaacaaccttattaaaaaacctttgatttttttttcttttttttcagagttttgggattctagaattgtagataagcagttatggccctctataatagttcccccttatctgtggggaatacatttcaagactccctagtggatgcctgaaagttgagatagtattgattatatactgtgttttttcctatacatacatacctatgatacgtttacataagggttacaaattaggcacagcaagagattaacaacttcccattggcatatccaaactgccagcatcactactcttgggctttggagccattgttaagtaaaatgagggttgtttgaaaataagcactgcagtagtctataaccgattttgatagtggagtctgatagccaagaccactaccaagtgactagagcaagcttgttctacctgcggcccttgggccacctggtggccaggatgtctttgattgtggcacaacacaaactcataaactttcttaaaacatgagattttttttgcgattttgtttgtttgtttttttagctcatcagctattgttagtgttagtgtattttatgtgtggcccaagagagttctgctgctgctgctgtggcccagggaaaccaaaagattggacactcctggactagagcatatacagtatggataaactggacaaaagtatgattcaagcccaagtggatggagcagggcaatgtgagatttcatcgtgctacttagaatgaggtacgatttaaaacttaagaattatttctggaatttttccatttaatatttttggactgtggttgacctagagtagctggaactgtggaaagtggaactgcacagataggtagggactgctctgctacttctgttacgtgaccatgactgaaattacttactactcatgatgaaagggtattttcatttgctttgctttcttttttacctgtttcctaatagctgattttggtttctcagttgttgtttttggtttgttgggttttttgtcttgtaacttgtatgcttaagagttcttttctcttaaggtgaaactatcagtgtctactcgtttttaagttgttctttgtttactgggttgtttttccactttgctttcaaatactcttttaatcattccattcattctagatacacagtattacacagaaaggaagataatctttaatwcttaaacacaagtattaagtaatacttaatactttggatgtattttgccttgcattatttaagtgcaattagactataaaaggagatgttaaatttttctggttgtgttgtgattacaaacaaacctagaaggctcagtggctcaatgtataaagatttatttctcactcatgtgaagaccactgtgggtccagggactatcttgggcagctcttctctgtgttgacttatatctgtgtatcttgtagctctgacatttggaacatatgcctcaagcaatcctcccacctcagccttccgagtagctgggactacaggcgcaccccaccatgcctgactaactttttttttctttttggagacagagtctcactctgttacccaggctagagtgaaatggcgcaatgtcagctcaccgcaacctctgcctcccgggttcaagcaattctcctgcctcagcctcccgagtagctgggactgtaggcatgtgccaccacactcaactaattttgtattttttttttagtagagacagggtttcaccatgttgatcaggctgggatttgctttttccagtgagtctctttggaagagtggctgctccactttacaaaacagaactaatgttctcagggcaacctaccacatttatatatttcattttaaattgatgacattaatgagttttatgaatcaaatatgtgccttgcatcttgtctaaatgcagtagtaaagttaaattgtaaagccttgggatttttatctctgttgacattctatcagttttataagggtgtatagagaaataacaaaagcttgtttatcacatctgttttggatgtgcccgtcggtaggtggtgataaagtaataccaatagtgaggatcagcttagggtcattcaatttgtaaaaatcccagttccttctttttggtccttgatgtatataatacttgttttaactttatggttattcacaacaaatgaagctttgaaaggaactgtggtgtagtctgccttttttggaagcttttggactagttatgccattccaaagtttttttgctgctttagtgttccagagcaaatatactctgtcattctgtttaacttccagcttstctggggaaaaataaagacatctctagtccaaaattgcttttgggagtatagttccacatcttttggtctgaatgaaaggcctagggaaacatgaattttgttacctttttattttattttccttcacttataaatcatcatcakgatccccctttacatccatgcgtctcactttttataaacactgtttattccctttctgaggatggttatttgtagttagttttgccatttacagtcttataggtcctttacaaatggatcattttctcacattaaattctagtaggtcaagaatccatttattcagggtcccgaagagaatcgatctcagaagattgtggctacatattttttatggcttcctattgctttctgtagtcttcttaatttaaacagtagcaacagcaaaatatagagggtaccataaggcattggctttatgatttattcttgcctcatacttgtttcttagggtattggtgttatttgttagatttgtgatatatatgcttgtactaaatttacctggtatcacaatgagaagaaacctggcatttgaaggctttgaacgcaaactcagagacatgtaatttatatggaattcaatggcagttttaactagtgtgcctttaatttttcttcattttatgtttacaccagtgtccttgtaaaattttaaaagacatttttctcatcttcccaggtgcttactatccacatttccattagaagatgccaaatactcattttcttcttttgaaaaccctaaaataagcacgttgcaattatcacttttcccttctgccgaggtttcttaattttggagaacttgaaacatatgcaaaagtaaacaggctggtatgatgaacccccatatatataacctttatccagtttcagtagttacctaatcatggctaatctggcttcatctatgcctccgtccatttcaccctcccattattacattaaaaaaatctcagacatcatttcatctatatcttaaaacatgcaagtatttcactatgcactttcaaaagataagactccttttaaccattgtgacatcagcatgcctaaaaattttcagtagctccgtaatcagtcattgtttaggtttacaaatgggtgttgtccttccttccccacagttatttgagtgaggatacaaataaagtccagttgacctttgaacagcatggatttgaacgagtgggttcatttatacacgacttttttcaataaatgtattggaaaaatatttagagatttacaatttgaaagaaacttgcaggtgaatggtgtagcctagaaatagtgaaaatattaggaaaatattaagaatccacaaaatatatgtggatactagtctgttttatcatttactgctatgagatacacacaaacctattataaaaagttagaatttatcaaaacttacacagtcatttacagaccacacatggtgccatttggagtcaagagaatcgtwaatgtaaatattaaatcgtaactgcataaaattaactataacatactgtattactgcagtaattttgtagccacctcctgttgctgttgcagtgggctctagtgttgcaagtatcttcttaaaacactatgtgatgctaatcatttctgtataaacagttcatcactccagtaaattgtgtattgcggtaaaaagtgatttctcctggttctcgtgtgtattttactgtgtttcgtgcaatactgtaaataacaccatgggacccatggtgttagtggcactagtgatgctggaaatgctcccaagaagcagagaaaagtcatgactttacaagaaaaagttgtaattgcttgacatgtactgtaggttgagatctgcagctgtaggtgcctgccatttcagacaagcttacaatattgataaatacagtatagtactgtaaatgtattttatctcccttatgattttcctttgcttattttactataagaatacagtatgtaatacatgtaacatacaaaacgtttctgttattggtaaggcttcaggtcaagaataggctattaagtttttgggggcatcagaagttatactcaggttttttcctttttttctaatctataaggttctcagtgttgtcttcatttttgcaatttatttattgaagaaactgggctgagtttccttagagtctgttttgcttattggatttctgtggtatagtttaatatctttcttcatccttagtgtttcttgtatgtttgggagttagatcaagaggcttgatcaaattcaggctggatttttttttttttttctgacagctaccactttttgtttgtttgttttgttttaacgaaacaaaactcctggtgtgcttttctatcaaaaggcacctaagatctggttgtttttctgtgatgttagcagccattggaatacagctctaaacagaaacttattctcatctcctatttggttacctggtcatacatggtaaaggtaagatatgtgcttaatttttttgtcttaccagttttttcttctttttcaaaataatgagttggtgtcctagtatccttttcagaatgattgtcacttcataattgtatttcaacccattgtagtacttcagtatattgctgttatcatctttatagaatttcttaatttaaaaaaaacttcagcttaaattgctttgctctaggaaaccttagagggtaaaagtcatatggacctatttggtgtataacaatgcgagtacatacattcaacttaaccattgctctaggtattattttgaaaactgaatacttattgaagctgttgtttcaaacatgacattctcctagccacttccttgtcagttgtcagagataattaagtcttggcattaggagaactgagagatctttattataactataggtctgctttaagttttgaattaaactgagggggtagtttaaggtagaacgcaaacctttatcagaatcaaattaatttgtcacaataattgaacttaaatattaaccctgttgttaatatacaagaagcatcctcctttgtttagtgtttctcatcaggggcatcttggttatttttgactggattgtgctttgacttggaagacattgaacatcctcagactctgctgactaaatgctatgttctggccaccaaaacctgcctcttcccccccatttccaggtatcttggaggggaggggctgtcacttggcacttgcaaattactggcctagattccacattgtagtgatagcaaatcataatgctgtaagaaaccaattttatatagcattactttgagtaatatataataatttgtaatagttgtgtttcttacataaaatgtatgttgaccaagatacatttgtgtgatttttactgcatatgtaattgtctgatatgcaaaaaaaaatttcttcctctagccctttagtttttacacctccccgcaattctgaaccctcatagtacatttgaactttgtgcatgagcttaatgtgtacgtatgcacacatggctcttataaatatgtgactctgtgtatccctttgatctttttattattaatgaatttttttttttccacttacagggaaacttgtgttcttaaaaggatttctgttaccccattgcctcaaactacactttttttttttacccttctaatctctcttcaattatttaacctctttccttttctaagagatttttttaagctcatttaattctttcatctttttctacttattatccactatccagcttcccatttatctatctctatttattttttttctgtccacttttgtgtcttatatttctttcatatttttgttatctggcttttcctctttcattttattttagaaaggtcatttggtaatactagctgttagtattttttcatatgacttattctgtttcttttttgttttgtatgcgcatgttctcttcagtttcatcttctttcctgatgtacttgaaatgtgtcttctttctcccactctccttagtatttagtatttcttcatgtatgtgatatatattcttttttcacccttgtgttgtttatcccttctcatctcccctaggctctcatgccacattgtatcacagctgctttttggtgatggatttcccttagaatcctagtggttgtctatcaaaagtacctgcatttagctctcttaatttatctttatttttatcttatctttattttttcttccattatgtagaaaagtcttatgttgtagcaaaagtattgtttcctattacctgagtaaaagttgggttttctagattctgcatctttgtttacatctctcgttgcctaggatggctttcatccttcaagtggtagtgatcttttaaagcctatttcagatgttacatctttttgtgaagcccttcctgcacatatctcttttgagagacatttgtactactaatatttaattcactggtattgcctcttgtcatgtaccctttcatcccagctgaaccgggcactaggactgggtatagctcttatatttctttatattttcatctcggtaaaatgccgtagcactaactatgagaataattttaattaacttagttgaaagtagttctgaaacttgccagactcaaagtgtagagcacaacagcaactgtgcttgaccgtactccttggtttacatctattgtcttgacaaaaatattaatagcatttcctttcacttttagaaatactcgagtttgtatgataaattttaggttcactttaccctcatgctataaattggtggtgttctggttggacttggtgaatcaggagattgtataatcaacaattacccaaagcagagattctgatttagtaggccamgggtggcctactaaatgtgcattttaagaaggcatgtctaaggattcaggtagtagtgtgagaagcagtactctgtttctggtactgaggctaatggtcttagttgggataaggagagtggggaaggggcagggggagatgatgaaattcatttatcctctgtgatgctatggaagaacaattaagatcatgtttccyacttgattttagtkgctagtcatttcttaatctaagcaccccctataatttacctatgtcatcatgcaaaatcaccattggtaataatgtgggggcgggggaagtctatacaagaatattaaggccctgtgcgtgagcatgtctatagttaaagacttaatgagaaagcatcaaattgtggtgcaaacagctgaaagtagaagtaaatcagaacgtaataagatgcaactttggaggagctcaaagcaacagatacgtttttatccaaaaaggagtaaaacaaaaaaatcgtcaacggcagttccttcagataatcaacagatgattcatttgaaaaccataattaactaggttgtttgtaaaataacttttttcaatttatactttttaatgtttattaaattacttttctctatagatatgcagataagatgttttaaatgtgtaagtggtataaatgtcccatgtgtcttttattctagagcataagaaaagatgggaagctacctcaaacttgttttgaggcaaatgtagtatgaatccctaaacataacaccagtactgctaaatgacagttatctaatctcactgatgaacaagaatatgaaaattataaaaggtcgaatttatttattrtgataagagaataatacccctccacaaagggtattacatgacygcaaagaatggcagttcctagtactctgacgttccacagtaggctaaagaagaaaaactgaacatttcaagaaataccacaataccaaaaaaagcatttggtatagtttatctcctcaccagttgtgagccttttggttgtttccaccttttgggtactgtgaatagtgttgctgtgaaggattcacaaatacacatctgtttgaatacgtggttttatttcttcactgtatattcctaggagtggaattgctgtgtcatatgataatttctctgtctttgtgaggaaacattgaactgcttttcacaaaagctgtaccattttactttcccagcggcgtatgagggttccaatttgtccacatccttgccatacttattttttgttttttttcattataggcaccctcccgccctccacccctcccaaaaaaaaagaaaaccaaaatataaaacagaccttgttgtacatcarggacatccacatgactcagataaagggctttggacttagacaaatggaagttcaagtcttggctttacaattgagtaactgtaaaagcttgagcaagttatctcctctgattctcagaaatgtgaataatacctgtttcatcattcttaagtgttttagatattatgtaactggtatattttacatataatgatataaaaagcagttatatrgacaaataaacaggcatgtttatgaaagaacattttgaaaaatgaagtattaaaaccagttgtaataacaagatatacttttgaaagtggttctggcccacaaatagcaatgatcagtgatacagaataaagaatattaatacagtttggtgattgttttgtgtttccagctgccttttgcaatttttgttcttggcatttaacccaatttctagatgtattagatacatacatatttatagttttaaagttttgttcactaggtgttcagaataagactcactgtattataaaacaaacacctctttaaaaaatctattaaagtagctttctacaacatggggttaagattattaagtgacattgggatacatgaatagtgatttaaaaaactgttaatcacaacttctataatctaaacataagatggatgaaaatcttacattttgtaaagggttaagctattggaaaactttgcaaataggcatatatattactggttgaatctaaaatgttaacactgtacaactccagggggtaccattcatactgtactctgtattcagcatagcacagcacagagtaagtatagtataaatggtatcccctgagttgtatagtgtggtggccaggattagaccttaaagaataaccttttttttttttttttgagacagagtctcgctctgtcgcccaggctgcagtgcagtggcttgatctcagctcactgcaagctctgtctcccgggttcacgccattctcctgcctcagcctcctgagtagctgggactacaggcgcccaccaccacacctgactaattttttgtatttttagtagagatggggtttcaccgtgttagccaggatggtctcgatctcctgatcgnnnnnnnnnnnnnnnnnnnngcttccaaagtgagagtaactttttaaattcataagcaaaatcgtaaaggcattgattgaaactgttatgtaaagtaagaattcttgtgctttgaaaaggaacaaaattttaagcacattagcatttgatgtgtgtttaaaatatttgcatcaacattacaaataatgtatgttgtgcatcatcaactcatatcagtaatgaagatattaagatttactgtgatgagatggagaatatgacacactgactcttaaagaggcaaaaattggaaacaacttgggacaatttgcattacttggactctttcagaaacctgttgaaagttttgaaccactacttcagaagaatgcttaagaatttttggttttctgtactccagagttcctttaaagctctagtgttttagaaacatgagttactacatttaatgtaaattagagtgaggaaatgaaatgaggtaaaatatgtcacttaatcaggaaagagaggtgggagagaaatacagagtagcctccagaaagttgagagcttggatttcgaaagtagaattttcgagcttcttaaatggctggggaaaagaaacatacaattatgttttgccttgagtcccagaagtcctccaccccccacacccccaactgtgaatgtagagggtgggacatcaagaagtggaaatacaacaaaagagacaatttggagaagggatggattgatacagcaccagataagtaggtttgcttaagcataagagaaggaataggcagaaaagtgaagaaaaaaataaaggagattaggagcctgaaatggcctaagagccctgtcaaaactgaaggtaaggattcttacatgtaaaggccataggaaatctttacagggtattgaaaagaggagctgggatttcgaaggtgacagattagcatataaccagttgtggtggttatagagacttgggtaacaaattggggagggcggagagaaagagaacaagctggatgcagttcacctttcatatctgttaatatactgttttcaagtatggatgaggggattttaaatttttattattttttaatcatctaaaatggcaagactgtctttactattaagtatttgttgacgaaaagaaatgtgtttgtacatgtctttgctttaataatggaagtttacaaagaagttgtagttttccagctgttgcatatggagattgaagggcttgaatatcccaagcagcagacagtacagtatcatagaagcctagttggcattagctagaaatacatatggccttccacacctagcatttgctggcaaatgaaatagtagggatgaggttgactttatggctggcctactgatcacatctggaatgttttaatggatttctttttttactgaaaatgtatgcatatcacttgttggctgcataagagtactagtacacaattaacaatataatgccctttgatctagtttcatgtttaatctatattattcattaatgtttattttctrttgctcactgcgttaggtaaggcatcctaagaggttgtatgaaaaagtatagaaggataaagtacatagagaatgtttaagctggcagatacctatcaattcacaatactttttttgaagacaaacttaggaatgatkacgaacgaagaaaaccctctaaattcatagatttgattgccatgatttacaacagtgctttccaataaaaatgtaatgcataccacgtatgtaattttcagttttctagtagccacattagaatttaaaacaaaggaaatgaattttaagatttttaaactcaaatatgaaaaattactaatgtaatataaaaattaatgagatatttcataatttttttgtacagtgtttttgaaatgtagtgttaaaatatacaccaccttttaaggacttaaaatagccacaggtagctagtggctactgtattagcagagatttacaattgctgctctgtgttctttcacttatcttcgattatcttttgttccctcttacctctttttattgtgcatagatttcaagaactggggcacaccccagtttgtgaaaagatggacaacctttcttggctagagataactagatgtgaaaggtctgaaagaaaactcaacacccggtacaaaaatgcaggcttcttttcaagggtttttgttttgaaacacatctctctgcccatgtgtctttgttgttggtatcttatgtagtacatgtgtgctttttgttttgagagagtctctctgttccttttgagaatggagtgtatgtcctgaacatcacttttgtgacaggaagtataatatatgtgccttaattagtattcccagatagaggagtttatttagtaaggagcttatattagcctaaatatattttcattggtgttctgagatgaagtgttatttgttatgagtttaatttttttatattaacagcgtttaagcaaacatgagctaataatgtatttctaactgctttatcacattatagacaatcttgccattagcagtactcatgtttcagatgacctctaatgagcaaatatggtattctcacttgagacatttctagaagtactttgtaaataactttaaatcaaattatttatgtctacttttgaagaacttccaggggggatgacgctgtctcaagatttaaaaacaatctaattacagttggactttatttgatataaattaagatgtagttagtttctggatttttggattgtgattttactcagtacctgaatgtcataagtcagtttgctggttttgaacactgaatttgaatattataaaactttataaaacaaaatttatttgtttgcacatagtacactgtggaaccagactgtattttctaagactcctagccatggacatttttattgccgtttactttttccttatatgatgaattgttacaagtatcacttaattgcagctatacatgcccatttgaatatgatttcaaatgcattacttgttcagtgtggtaggtactattctaggtaatttacatgtattgttgatatttctgcattctctcaggaagatgttactatctttttagaaatgagaagaataaattcttcagaaattatataactagtctaaagacagactaataaatgatggaagcaagattcagttttaggtctgtctgactgaaggtcatgctcttcatcacactgcctgcatcaggtgtgaatgtgtgtgtgggaaggtcttggagaggctggggtggagagttaagaaatatctaatactgtgaagttaaatttaatcagtacagcataatactttgcttttctcttcactttctctgtattacacagagtttgaaattaattgactcaaagcaactttcagaaattataatttttagagttgaaaccaatggtgcagtgtgtagtagttctagttgtaaaacttgataacataatgttaatattttaaatttcttatttgtatgcaaaaaattacctgattagctgtagcttaagaaacaatacagctgagtgtggtggctcgcacctgtaatcccagcactttgggaggctgaggagggcagatcacgaggtcaagagatcgggaccatcctggccagcatggtgaaaccccgtctctactaaaaatacaaaaattagctgggcctggtggtatgcacctgtagtctcagctactcgggaggctgaggcaggagaatcacttgaaacatggaggcggaggttgcagtgagccgagattgtgccaccgcaccccagtctggcgaagagcgagactccatctcaaaaaaaaaaaagaattgcgttaagtaacttttgatttgggactaaatatgtttaatacaaggaatacttgtcagtttatgtatatgtcctttgcacatgcttacagcatgtttctttttaagaaggctaaggcatcatagcctcctatattgtgaaaaaagtaatatatatatacgtagtaggtgacaactaaggcctttattgtttcttggccttttgccaaatgtaattttgaatgctagtgtttgtatgataaatcttcagacagacaatgtcttacgaagaaaatattttggaaggattttaagtaaaacccaaaacttttatttgcatatacttgcatactgtcagcctakaagacaaactcagcactgtgtgtaagttacttttaaaaattgactttgaatgcctgtatcagaacttatttggttgcagcggcatacaactcaaaccaaaccagcttaagtaaaacataaatttgttggctcacataactgataaagtcagagtagatttggcatttggcatgctgtcagcatctgatttacctttccatttgcttgctttccttcctcttagttgactccatgattagacagactttctccttgtgatcataagataactgatagtacctcccagctgtgttcttcagattgagatgcagtgtgaaatagcgtgaatcttggccccagttttttcatcagaagtctaatgcatttcattaactccagctgagtatattatatccatatggttcatgcctaggccactgctctatccccaggataggaatggcattaattccattggaagcatgtagactgtgagaaggggtgcaaaggtgaactgggttaccacaagttaagtaaatgaagctgatgctgagtagcaaaattagtatgtatctttttggactgataggcattatctatttctccatagtccttacctcttcctattatgatggttcacttaactaatttatattacctgtgtggcaccttactgacatttgggtttgattcttctggtttataatttcctgttatctattgaataatttgttacggttatatagttatatattttttctatttaacagacctacatttttagctttaatcttttgtatatgtatttaatatttttrtgaatctgaagttacctttgtttgagttgtgaaatggcaaggatgtttataaagggtcaggttaattagtttttcaaatggctttaccaaacacaggtttatgtgttggttaaagctcagctggtagtcttgaactgcttctggcaatttcttagaagaggctgtagcccagattttggctcatgtgtataattatagctaagccaagagctgctgatgtaaacaccagtttatgggctaaggactgggaggctgtcatagttggaaccaaggaggtccaagcctagtccttctgaagaacagaattgggaggcatttccagagtctcttactctgacagcaaggyagaactggagagggtaaggaggcagaagtctgtagggtcagaattcgtatcaccaggataaaataaacagtgagagctagaattgagcacaaatagtacagaaaaaattccccagtcaagattcccttgagctggcattaggtttaaggccatagagtttgcttaaatagacatactttcacttgttttaaagtaaaggcacacctccctgttcaatgtatatgcattctgttcatattgtttgtgatttcagatttttgttgccttccaccttttgccgttccagattccatgaaggatactacttctggatctaggatggccagataaaatacaagatacctaattaaaattgaatttcaaataaacaataatttttataagtatgtcccaaatgtacatggagcacacttatatgcatgttaartattaggaacatgctaaatatttctcgtttagctgaaattcaaatttaactgagtagtttctgtttttctgtaattaaacttttgattttgagataattatagattcatatgtggttgtaagaaagcagagagattttttctatatttttatttgctaaatttgacaaccctctctgggtcctttcatcataaagcaacccaacctccaaacatttgtgttttgcaaatagtaaatattagttagaaaccctttggatcctctgatacttcagagaagactgacttttgaaagatcagtttttaaagtaagatactactaaaattacttaaacattttcaatttctcagagtaaaattactttaaaagccatgcagaatttataatacctaacaatctaatatttctagcaagatactgcattggaaatgttaggaaacaaataatttagcttgaggcatctctgagcaggtaatattttgaaccattcagtctcaggtctctytcatctcccagtccttcaaagttcttccacctcctttgacctaaatttaatcatttttttttccagtagtctgtggtgactttattagtgatttcataactatgggattacaatttggataaatcagatcttaatgcycactgcccctttgagtaagctgagagaaagaagtgaccctgcaggttttcagaatttttgagcctaattaaaatagcttgctaccttatccttttccctcatctgtacagtaggtagtatggcctggggagaaagaaggctagcgtgttttccacgcaattacttagccctacatgttsctccctattgataatcagaccttgtgagtactttcatcattttataaatataagagagtagactggactccggaaaagaagagraagtggagataagtaaaactgtgaactaagtataattgttttttttttttttctttctttatacttggaaatacctgggcaaatagctatagaacattgttctctaatgagatggaaattggagctggaaccatttgaccttccattggttgaactttggtctccagagttaccatcctggaaggggcagtgtgtcaatgtattctttctgccaagactgtggagggggcccarcagtgaatggaggccagtagagccaaaggtgctgctgcaggtttctgtctacactagtgctggacaggagaactttccacaatggtagaagggcttgatatctgccacatgtgggaaatcgaacacttcaaatatggctagtgtgaataagaaactgaatttataattcaattttaattattttaaatgtataaatagccacagctaacatttaatgaagtcttgaacccttatcaaggaaggtttctacaggaaaagtttgttaatccttattcttcaagcatccactgaaattaaagccaaacaaatacagtactttgtattctgaattgtctttttaatctggcttttaaaaaagtaggacttgaaaagtattgagatttaatcagtttaaagttgggcctgggtgataaaaataagcagttgtgacattatgggatctctgcggtatagacaaatatgatgggtatgccaatcaggcatatgttattttgcttatgatgttttgtttcttctgcatgaggwttggatggaagctgtgcaaataattctgctaatatttattgaccaattactatgtggcaggcaatagtgtaagtctcaaagcagccttatgaatgttatcctcattttgaggtgagaaaactgaggtacagagagaagttcttccgaggatcacatggttggtaaaaggtgaaagcaagatttgaaatcaggcagtctggctccagagttcatgctcttaactgccacactgcactagtcttgtaaattgttcttaaagtggtcatagatgcttcgtatgtgcatttctagttctggctgaggtccaactggatatatacagcagtcctgactgggtaagggaatgtttccctgttccaagccatgctcagggcagcattaggggcagccccaggttctagcagagagaggaattaggcctggctgtggcggagtctctagtggtgagaggaggatggaggatttccttagtggactagttaaagggaacgtcagtgggaatgcttagagcaggtcagagagcactgggtgtgcctaagtcaggtatgtatcccacaagcaaatgttaaacagttattgagagtgatggtttaatttctttagagctaagcttgaaataattttgtagacagtgaccgtgattctctgttgcagtctttgacaaagtcagtcttgcagtatgtgctttttttttttttttatcagactaggstataatttgttttatttttcatgggaatgtaaaattagttgaatgaaacatcattggatcttgatgcattaaatattatagcagtgctaaggatacttattctaaaacaacataaacagataaccatttgtataaaatcgttaaaaggtaaagaagtagttatttcttctagccagttcttctacattttgtcacttgtccttctcctttagaatgttctatctagtcccagattttcttccttagtaattgttaatgtaatgctagagtgatgttttccccaggtctgtaatatttttgatgctaagagattggacacattataaaacaaataactgaaaatcagtgaccttttatactatttatctataaaaccaactttgaattactaaattatcttaccatttttgtttattttggcatatacaccaaaataaaaaatgcagtttttacccattcacatgcagttcttacccattcttgattacagtaatgttttactaaccagaaacaaagtaagatggaagtccaccacatactactactcctaccataatggtgtaataattggaaaatatatatttatactaggctttatttatactaggctttattattttattttattaattatggttctctatatagttcttttttgttcagataaccaaatatatttcagtatacaccaaaataaacacttcactgcttgaggtcagtgaacatactattttctttattttagtgtttgtttttctaacttctacttaagtgataattgtgacaatttcttctgactcccgtactgtaaagtacaagctaagactaattcctttatgaaatgtaaaatgtactattttatggatttgttgataactagaatgtaagtttgtattaataaagtgcactggcacttagctatatactttataaatgctttttctattattaatgtatagcctatttttcttgataagctaacttttccagttttttaatactttttttactcttcatttattcttctcaagtgtatttgtattttgatattttaaatactatttctgctttgttttatgctacccagatatgtggttgcaagtatgaacagattctagtcacatgcagtttttacccattcttgattgcaggaatgttttactaaccagaaacaaagtaagatgaaagtccaccacatactactactcctaccataatggtgtaataattggaaaatatgtatttgtactagctttattattttatattattaattgtggttctctatagttctttttcattcagataaatcagtaggcttaatttcaggtgtgtcagctagttacagggttaatatgttactatgatactatttcttgtcagtcatattctgtattttcaatacagattatttttttgggaaggattatttttttgaggtcgtcactttagctggtaagagtagtgggtgtacaagtcgcgctcttattgcagctggcagcatgtcagtcttataatctgaagagtagtggttgatattcttagctgtagaagaaatcagggaaatcaaagggatatttgcatatttatagattctgcctatcctcctgaatctgtgttctctaatgtaagaaagatgatctgagtttcacaggtagatataaaaggaaaatagtagatagcagaatttttccaaatgtcatcttatactttactttttctacatttgtataaacagtgttttctggtgggacttcagaataactaaaacagcctgtgactgatacaatcaatttaggggcaaaaatgtttgctaagaagaggtctgatgttatagaatgttgaaaatatttacctcctgttgtcatatcctcctcttttttttttttttacattttgcatggatgtgtttattggcaacattcaaatctgcctcagacttttatgcgtgctttgagtacctctttgaaaaaatgaacctactgatttctttactagtgagtgtcttgaattaaaacttcctgctgaaggcttgccagcttcaacttcgcatcatacaacagccagagctttcacagacttatctaatataagcccttcacttaataaaattaaagagagactaggtgacttgagcacagggtcttgacttttttttttttaattagttagagccagaacaacaattcagatttctaggcttcagtcctgtcttaatctgttttgtgttgttgtaatggaatgcctgagacagtaatttataatggacaaaattatttgactcatgttatggaggctagaaaatccaatatcagggtgctggcaggaccttctttctaggatgctgcttatcccatggcagagttcaagagagagaggtgatggggagaaaacgggggtgataaggaggtagggagagataactgcacacaagggcaaaagggggccaaactcagtcttttataattaactcactctagggtggagctcccgcagcccagttacctctcagaggttctacttcctaatactgtcacagtggcagtcaaatctcagcctgagttttggaggggacattcaacccatataacaagtccagtactcttcccagtgcacctaaatcaaaactaagtcaaaaattttttaagaaaaataatgcactggctgcacaggaacgatggtatagaagtgccattttaactgttagttgctaggtaatgtctttctattctttaacttccagcttaatgccagccttgtgtgagctgtaacaatttaatcattcaggtcctctggcaagtagtgttatagaaattggatcataccattatttgttgtttttattttggcttttaaaatgaatgaaccatgtgtcctccttttaagtgattttaggaagagcaaatgataaggatggactgtaacattttttccagttacttaatttcactttaagaatagtgatttttatttgttttaaaatttcctgagtgagggttgttaggcaaaatggactccatagagtgtatcatattttcctgtcactttagtgtctcagaattaaaccatcattttatgtggaagcatagctccgctttgctctactgcaaggtagagtgctcagttattaggttggaaggaaacaagttaattgatgttttcttttgagagagggcaatatgatcagtcagcaactccaggtttttgtcacttgtgatgacattttttaatagtattcatgttcctttcttgcgtcaacacttactacattaacaacactgattagtttcagtaaatgtacatgtataacaaagtatacatgtactagtatatactgtaaattttcaaatataactgaagcaaatattttgtcttatgcagttgacagggtattggttagttacagttgtcatttgaatcagtgctgtcttatttacattattttctagatagtttgctatgtattttaggtactttaatagctctttaaattaaagaatgtcaagggatgtgtgtggctaggtgggtgtacacacacacatacatgaggtcgctcatggattcaggtttgtgagtgtaattgattttaagtcatttatttgacaaccacacattgtcacataagcacacaagaggtttaacatgtaatggccacaaagtaatctctttgttatctatgaagccggtttggaatgtctgactgagtaaaatgagtgcagtatattctgtgtaaactaatagttcaaaatatacatatacccatatccctagttgttagttatacagatatttagttgtaattacaatctaggttttgaattatggtgttaaaccatttggtggcatcacacattagactaaagttttattatctaacccatgtataggcatgaatttagagatactaacaagtattggtatttctcatattgaatatttatggagcccctactatgtgttagacattgcttggtatttagaatataccagtggacaaagtcaggccttgtccactcccatatagtccttcctaacaagggatcaggaagacatgcacattaatttttttattttttacatgggagtctcattatgtttctcaggctggccttgaattcctggactcaagtaatcctcccacctcagcttcccgagtagctggkactacagtcatgcaccaccttggctgactacattaatttttttaaattgcaaatatgttaattgcaacaaaggaaaaatactgagtgttatgatagtgaaccataggagttgtgttatctattgctacttaacaaattaccccacaatttagtggctttaaatggaaaacattattatttcatactttctgtaagacaagagtttgggagaggagtagctgctagctgggtggttctggttcagggtcttccatgaaattgcagttaaggtatcagcaggctgtaactgtctgaagacttgatgagattggaagatctattttcaaggtggctcactcacataaaaagctgttggcagaaggtctcagttcctcactggctgttggcaaatggccctagtttcttgacttgttggcctacctgtaggctgcttaagtgttctcataaaagggcagttaacttcctctagagtaagtgacctgagggagggaaggatgacatttccatgtaacctggacttctataaacctgatgactgggtttcaagagcgaatattctgaagcaggggaagtgggaagaagagagggagctcatgggtgtgtatatgtgtgcagcagatgaaatcctcattactttttttgacctaggcttggaattcatacagcatcacttctgctgcttttgttggaggtaatcagaaagttccacccaaattcaaagggagcagaaatagaccatgcctcttcatggaggaatggccaggttctgaaaaagcatttggaccaatattattcatgtggtcatttttggaaaatacagtttgctacagaagggagagcaagagcagatgctggaagatcagtaacatgcttctaatagtctaggaaggatttgatggtagtggaagtggaggttgtaagaagtagataatacaaaaggtgtgccgaagtatggatagcatctgttgattgaaaagatgtggatggtgaaggagatgtatatgtcagggatgatgcccatgtttctgacgtaagtattaaatgcagtgccatattcggagataggaaatcctggagggtgtaaagatggaagttttagtttttgttttcaatggttgtggttgtggtgggtgggggaacattttaagttcatttctgaacaaagtgagtttgagttacttaagggatattcagtggaaatggagtgttgctagttggctacatttcattctgatacaactcagagaagcagcctgggttggaaattatttgagtattttaggtgtatasatggcagtatgtatcaataaagttcacttaggtgagtgtaaacggagaggatgaaaagaggggaaaaaagctttgagaagagttaacttttaatgattgattagggaaggctaaggtcaactttcagtgattgattagagagggctacatgagcaagcaaggctgagaaggactaacctgagagattggaagaaaacaaagaggttgtatgtcatggaaacctgaggtagaaagtatttcataggtgtgccaggtaagttgaggactggataatctttattgattgttgtctcttggaggtgacttcagcagagctgttttattattttttaaatttttattgatatagttatacatgtttttgagatacatgtgatatatgatacctttatatgatgtataatgatcaaatggggataattgggatatccatcatctcaaacatttatctttatgttggtagcattacagatcttctcttcgagctactttgaaatatataataaattattaactataatttcccactgtattattgaagtggaagtgaagtcaatttagaatggtgtgaaaagtgagtgggaaggaagagaacggtgatgcctgatgaagcagcccttaagatgtgtggtcaagcaggcattagagactgaggtcaatagctgcaaagaaaaacgaagtacagagttgtttttttcttaattaatatttttttcccttttaagatggaaggggttcacaacttttatatgcttatggtaaggatctgggagacaacaaaaagggtggaatcctatacatgtgaatttagtataaaattcaggacatgcaaaaacatatttaaaaattgaaacagcatttatggcccaatattttaagcctacatatagtcacattrggacattttaaaatgagggctttatcacatagcttatatgtgttctttgtgaactaaattggtgacttgcattttttttattttaatacatctagaacattttgtcaataactacagtgtttactgagacaaagtagggatagatgatagtacttaatgatttttgcaataaagactaacaaaaacaaaaagactacttattaaaaagaccaagtggtgaaataaatgataaaagtataatctggaggaaatgcagtattaaaagacagtgtcagaattcttggaaaaatgaacagttttcattatatgataaaggtaagatgattttttactttaaattttttataataacagataaggatggaataaaagcaagttaattggttttaggaagtcactaggaaaaatcgacatttaaaaaataaataccacaaattccatcaaaggtgaatggtaagagaaaatcttaaaagaatgcacagaagcctggactggagtataatcactaaaatgattacatggtccttgttccatatactagagatgatamccacaaaacttaagtcactagttcagcaatttatagctaactatgctgcaagtgcccaaactagaaactgggtactcttctcaccagcaaatgttgtttctgttatatagtaccatggagcatgttagagcaatgagaatgagtccagagtaattagccatgaagattaaaatttgttsaattcaactagctttataaagttataggaaattttagaaagataaaataaccacatgctacttctggcattcatatggcagaccttgaaataaatactagtgaacaatgtagtgggcccggtttcaaataactgaattttaaccctgaatctgccactgatttcactttgtgagcctgggcaagacactaacctttaccttctttatacctttttggggtttaaatttttttttttaaattttttagtacagacaggatctcactgtgtagtccaggctggtcktgatctcctgggttcaagcgatcctgcttccttggcctcccaaagtgctaggattacaggcatgagccaccatgcttggctaatacctttttgtctttatcaataaaaatgacagggttggagtcagagctataaaaaaactcaaatttattgtcaccaactatgtggcaggtcgtatcattttcttaatatttcttatttaatatgtaacaccctatgaggctgcttatgtcagactcattttacagtttagcctagataacttgacaattacctggcttataagtaatggaggtagaatcccagctcaagtctgttgacccccaaactgattctttttgcaaagcattagtgtttcccaaaccttagttttgtacagctttaacaactgtcgccctatcagtctcacgactattatgatttactagaaatttttctttaaatgtgtattcatatattttacttaaatatatttcagaaggaaactgcttgataaataagaacaaaacttaacaaaaaattggtatgaaagtctgaaaagataaggaactctttctcccctcatgggcagtggggtggatatatatgaaagataggaaggaccaagggcccagagagagggaacctctttaagttagaagccagagcctggaaatgccataactgttctaagaattgtgcttgaaactggcaatttgatcccatctgattgagaactttatatcacagacagagtagggagagtgaggagcagctggatttgatttaaaagagaaaactggaggtggagacagaattgggccaggaatgcaacctgtgttatagaagggcctgagactgatagaacattccctgagagtggggagaaggttaaagcctgaaggaaggacatagggatcgggagtatggaagaatcacaggggctggaagtttacattaaagtgggatacagtggtcaagactcctggaaatagatgtgtgcaggtaaaggctgaggtccaggaggggccagtgggacgagtttagagcagaaccagtaaagggggctcagaaatgaagccttagggatggttgcgtctgaggttgggatggtaatttttgagttaggggcatgaggggggtggaaaccaagcatgatccctcctggattaagccaacactttttcttctgaaactggactacgaatgtgacaattctgagcagttttctccaagggaagacagcgtgtatgtgtattgtctaaagtcacctcatggaaatgcggtaatatgcataccatccttttgggaaatgtagctttttctagactggattcatctatgccttcctactctggactcttccttgatccattttttttttttaatacggaagtgtcatatgttgcttatttaacaacagcataaaaggtttttttgtttttctttgtttgtttcctaatttgtttaagtaatagttagatctagtatgctttggacttaccttgtctttcagctccgaactaaaacgggtatctgctaactacaggatagggggtttaagatgcttttttaaagggagtgattgacgagggccctgttgctacaggattttttggttagaggaatcccagcttcatgtcagccatcatcttccagctcagtcttctgagcgtgactctcttttttctgtatttcttttcacagtgcctttactttctgctttctctttctacctrgaagaccaccctaattttgttttcgttgtatttttaacctagctctacattatggggctgctacagtgattgtgctttggcttcacttatgcctgtgggactttcattttctttactcttcttggtactgctggctrtcttctaaaatgaatgttcttgaatgtataataaaaacagttatactctagtagcaatttatgccaataaaatataaagaacactaattatgtttagagattctgtccaccttggaggaatgcattctggtgatgtacctgtatacataaatacatatccacacatataagcacctgtgtttacacatgtgtttaatatttttatctctgtgtgtgtgtatatatatatatatttgacctaggaagataatatttttatctgtgtatacatatatatttggcctaggattgtacagtttatctgggtgcagatacctatctacctttcagtgcagttaatctattcttgatgagcttttgtgcccgaggactcaggggagtatagtagtaaaactgtgccctttttatttgctgatctccctgcattttgtttcaatttctgtgtttttttttttttccattagtgagctgattctgaagagcttgaaggaagtcattttaattgaaggagttagggtttcttcctcacactttcccagtcctccaggactcttcatctttgatttcatacagttggtaacatcttaacaaatgaccatagtataataataaatatgtataattattttcttctgtgtctggagggtctagaaaagctcatgccttttatataggggagtgttattttcctcataaacaattacctgagttggatgtcaggatagatctaggttccatgctctcagatttttcattgtaaagtaaggaagttggaaatactacaactcttaagttcctttctagctctaaattttttttttgagatggagttttgctcttgtcgcccaggctggagggcagtggtgtgatctctgctcactgcaacctctgcctcccaggttcaagygattctcgtgcctcagtcttccaagtagctgggactacaggcatgtgccaccacacctggctgattttgcatttttagtggagacagggtttcgtgttggtcaggctggtctcgaattcctgacctcaagggatccacctgccttggcctcccaaaatgctgggattacaggtgtgaaccgccgcacccggcctagctctaaaatttatgagaatacgggtccctgaaattcttagttgatagacgctaaatcattggaacatgttcagccggtgctcaaaatgtgctgcccataaatgtcactcagaagcatattaaccttgcattaatcttttttctacctgtaatataaacttttaaactttcaaaattcagtgttcagtgtcatttttaacttggcggttgtttcatcttgttactttggaaaccacagcatatattttattttggttttgcattttgaaggaataatagaaactagaaaactcaggagatgggagcttcatttgtaattatctcaaaaattattttcattggggaacacaatgtaccagtgatttttttaaaaagtctacttactattagtttttttaaacataaaaatatgagctttattgagataattgacaaatttaaatatgtatagttaaggtatacagcttgatattttggtatgtatattttgatacatgtatattgtgaaataatcaccataagctagttaacgtagccttcaccttacatacttaccattttcttttaatttttttcttttttttgtggtgagaacatttaagatctactttctcagcaaatatcaagtgtatgatacaatattgttaactgtagacacgttgctgtacattagatctccagaacttgttcatcttgcatagctagaattgtgtaccttttgaccaatatctccccatttccccatacgtcaacccctgacaactagtgttctactctttgcatctctgagtttgactactgtatttcttatctgtttttgtgggaaggttgatgtattagtttcctggggctgccataaccaagtaccacaaattgggtgactttgaacataaatttattgtctcacaaatctagaggctagttctccagtataagatgtggacagggccgtgctccctctgaaatctgtagggggagcatccttccttgcctctattagcttgtgtttttgacgtcactctacctccattgtcacatggctgccttcttcctgagtatctctgtctctcttctcttcttgtaaggacataacccataaagattaagggccaccatactctggtataacctcatcttcactaattacatctgcagtgactctgtttccaaatatgctcacattttgagatactgggggttagaacttcaacattatcttttaggggcctacaattcaagctgtcacagttgattaaaagattttgatccttaataataatgtaataaaactagaattatttcctttctttttaattcatagtcatttcaataataccactacgacttttccatctgctgagcaaatcttatcaaatacttctttgtttcttgtgtctaagttcaaataaaagccatagtgtggattcagagggaatgcctaaactagtcttcatatagagctaagggaaaaaaggtaaatggttaaagtgggtttcatatgtaatgcataaggaaaaaagtaaggtagtcataaaaaatagacaacttgaaattcacctcattatatctggatttccctgacatgggtaaatctagtgatatggttgtaggwgactggatggattaagttttwtattaagtttttagagttagggaatggtagaggataggaaaggggaatttttatccttcctgttttgtaatattttagttggacatgtttcaatatttgtgtatgcatttgaaactgatgaaagggttattacatactttgtcaatcatttcttaccctactatatgtgaaaagtagtaattatttcagggaaaggtggtttacagaaataggataatagctacagcaatataccagtcttcgtgggctttcacatatagtaatgtagttgcgactacgaaacatgagattagtcaggattgtgatgtttttgctgacaaataagatattaatcctaatggagtattgttttcccttgtgaagtcatatattcatttaagttacatttttctgtctttatccragtgttaaaaattgattatccagataacctcaccattacagtgtttcttcttttctcttcttttttttttgttttcttttctttttttcctcttttctcttttcttttcccctccctccctcccttcctcccttccttcctttctccctccctccctctctctttcattttcactttctttctctctctcacatccgttccgtgccattccttcggtccgttatactttcgctacaacgattcttttaaatatacgcactgccttccttccttcccccctcacgccctgccgacctcccgcccgnnnnnnnnnnnnnnnnnnnnnnnnnnnnnnnnnnnnnnnnnnnnnnnnnnnnnnnnnnnnnnnnnnnnnnnnnnnnnnnnnnnnnnnnnnnnnnnnnnnnnnnnnnnnnnnnnnnnnnnnnnnnnnnnnnnnnnnnnnnnnnnnnnnnnnnnnnnnnnnnnnnnnnnnnnnnnnnnnnnnnnnnnnnnnnnnnnnnnnnnnnnnnnnnnnnnnnnnnnnnnnnnnnnnnnnnnnnnnnnnnnnnnnnnnnnnnnnnnnnnnnnnnnnnnnnnnnnnnnnnnnnnnnnnnnnnnnnnnnnnnnnnnnnnnnnnnnnnnnnnnnnnnnnnnnnnnnnnnnnnnnnnnnnnnnnnnnnnnnnnnnnnnnnnnnnnnnnnnnnnnnnnnnnnnnnnnnnnnnnnnnnnnnnnnnnnnnnnnnnnnnnnnnnnnnnnnnnnnnnnnnnnnnnnnnnnnnnnnnnnnnnnnnnnnnnnnnnnnnnnnnnnnnnnnnnnnnnnnnnnnnnnnnnnnnnnnnnnnnnnnnnnnnnnnnnnnnnnnnnnnnnnnnnnnnnnnnnnnnnnnnnnnnnnnnnnnnnnnnnnnnnnnnnnnnnnnnnnnnnnnnnnnnnnnnnnnnnnnnnnnnnnnnnnnnnnnnnnnnnnnnnnnnnnnnnnnnnnnnnnnnnnnnnnnnnnnnnnnnnnnnnnnnnnnnnnnnnnnnnnnnnnnnnnnnnnnnnnnnnnnnnnnnnnnnnnnnnnnnnnnnnnnnnnnnnnnnnnnnnnnnnnnnnnnnnnnnnnnnnnnnnnnnnnnnnnnnnnnnnnnnnnnnnnnnnnnnnnnnnnnnnnnnnnnnnnnnnnnnnnnnnnnnnnnnnnnnnnnnnnnnnnnnnnnnnnnnnnnnnnnnnnnnnnnnnnnnnnnnnnnnnnnnnnnnnnnnnnnnnnnnnnnnnnnnnnnnnnnnnnnnnnnnnnnnnnnnnnnnnnnnnnnnnnnnnnnnnnnnnnnnnnnnnnnnnnnnnnnnnnnnnnnnnnnnnnnnnnnnnnnnnnnnnnnnnnnnnnnnnnnnnnnnnnnnnnnnnnnnnnnnnnnnnnnnnnnnnnnnnnnnnnnnnnnnnnnnnnnnnnnnnnnnnnnnnnnnnnnnnnnnnnnnnnnnnnnnnnnnnnnnnnnnnnnnnnnnnnnnnnnnnnnnnnnnnnnnnnnnnnnnnnnnnnnnnnnnnnnnnnnnnnnnnnnnnnnnnnnnnnnnnnnnnnnnnnnnnnnnnnnnnnnnnnnnnnnnnnnnnnnnnnnnnnnnnnnnnnnnnnnnnntccttccttccttctttccttccttcccaacttttcttttaaatatgctatatctattaatgtctgtggtcatggaaccatataaagtaatttagcagtttttgaccagtggatttcttaatacttttgcagactagctttctatttgtttttattttatctttttcaaggattataagtaggttggaaaatacttctgggttttgctttcttaagtgatttttaaatgcatctaaaagtttagagtaaaagtgcccagaatccttgaccttagtcttccttctatgtgaaaccaccaatttttcccttttggtcacttttttactgttaagggtaaaaactgctctgccttaaaacttttgtgaaggtaaaataataatgtacgttaacattttggaaattgtaaaatgcagtacagatgtaataagatagcattaacagtaatattggaaagtaaatggaacattaaactttgatgtcctatgattaatattgttatggcaaacatactataagtttaggagtcagactgccatttttttatgaatgttaatagttattttataggaaatgtaacctttttggttagactcttgaaaataagattagtattattgctagctctatttcaggaagatttatcaaacatttagaaaaataaacacagttgattttcattattctcggtggtgttatgttccataaagttgtcaaacaccgaattagcgaatactgaaccattactcytaggggaaataaaagattatctttttttgatcttctagttaattatgtaaattaatacataaccattttatgtttctgttgaaaaacatcttctcagtgtatattgttgattcattaacatttaactcgtggccaacagcactataaccatgcctgaaggaagctcatctaaacatgtattttatcagtaaagcatgtcacagccttcttgcacttagaaacactagatagcactttagcattatgttggggaccatttcaaacaatgaaattactaacaaaaagcacaaaaatgcaaaaagcatggtactaagtaggctgcaaaaaaaaacaaaaaacaaaaaaaaaaccccacaggtttacagaaagagagctgaaacagaagacagagtgctgccttgttcaacctcagctgggactcaaatttttctccactctgcgcattgtctgtaaatgactgcaaaagcccctagtattgatttttggcttacaaataccagatgtccttcaacttacaatggggctatgtcctgataagcactactggaagtcaaaaatacagttaatgctggtaataaaccagatagtccccgaccaacagtggttccacttaatgttttttacgatggtgagaaagcaatatacatttagtagaaatcacatgcattcagtagaaaccataaccccgacatgagtaagttgtgaggagttccttgacttacagtggggccgcgccccaataaacccatcctaacatctgaaaatcattaagtagaaacatcaggaaccatctttatatttttaggagtaggtgaattcacagacacaaaatccccaaataatgagaattgactgtatgctgaatagtgagaaaatgatttggattaagttagtattttagttgttaaaatttgatttagttacttttatcttgaatttcttaatctttcatagtaaatagaacatcctctacttttgtcttctgatttctcaaacaatgtatattgccacaaaaactccattatcaatgatatttgttacaaatacttaaaattaatgctttcacctttcatttgataataaggagtttgctacttaaaggaatcatgaattgctttgtggcacaagaagacagaggaattcggccagtgtgaggcatcccttactttctttaacacagccgcctgatagaacrgtagccatgctctttaagtaactctactctgacaacctcgaaggatttctgggcataaaaattgggggcatccaatatagcaaaggggttgagagcatggactctatcttggtaccatcacttaccagatgtgtggctttaggttcattacttaaattctttgtgtgttaatttttaaatgacgatgataaaatatctacctgataattttggtgtgagaattaaatgaattgatacatggaaagttcataaactggtgccctccacgtaagttsgtgctagataaatgttagctataatcattactactattattattatccttaatttaagtagactctttatttctccctactccttactgtcacaagtgataaagcaatgggaatacctgtgttttatatttcttttgcatttgtaacctctcccagtactcatgtttgttactaatatggttagtcatttttctcctattsatactgtcgttgtaggtcaggtaaacatgtatgttcagtccttcactatgagtgagccaaaagttcatatgaagacttcagcattgagtccccaaaggattttttagaaagttcattaatatcttcatttgtcttcttccaagatgagcctcttgactgactcttctcagaaaatgattgacactttatgtgagagtaaaacttaaagtgagctatgaattaatgttaaaaccagattacgaaaaagtaagacttcatcctacsattctaccatcctattatccactcaccttgtacaaaaacaaaatccagaaacattttcaaaaaggaaggaaaattcagtcaagtattttggaaactgagttccagtcatcatggagtaaacaagcaataagcagattaggtagcgctgcaataaattaaaattgtaacagagctataaattagattctgaatgttttctaaatttattttcaaacttgacttttaatatatgtgattattaagatgtaatggtgatgtgctatgtagatatgaatctgttacagtaatctatttttctcttaacattttattatgaaaatgtgtaaacatacaataaagctgaaaattttagtgactacttatatgctcatcatctagattctatccttgagtaatctatttttataaaggtattgatgtaactattttataaatgaaaaactacacactaaaaaccaaatatgtgatctccagcatcacagaaatgaaataaggatttttttttaacttaggtaatattgcttgaactgtagtaattcaaatgtagcaatttcaaaggtagaatttcccatgtattactatactgcttcacatcagctctattaataaaagtagaacagttgcaaaggaacttttatgatctgttttgacaggacagacaatttaaaaagttgttaataaaggtttttagaattcactataagcctttcatgtggctttagttagccacatggagatacgttctgggacgaaagttggaagtattctcaagaagtaaaaaataccaaataatttataggggcacgagtggtttgaagtactgtttaggattagagtgggtcttggcatttgtccagaaaccagactactttgcacaattatacttgaattcctaatcatatccactagcctactctcttaaatagaccacagaaaccttgctcttaacatttaagacaatggagtgtcttgctttctagaaatgcttttatttttattaccactatgcaaataaatgtaattttcacagtgtcataacattgattttgtcattgaagatattatctattttttccctgacagtttatgttaaaatacatttagctttgttaggtaagagaactttgatacttccttttcctctttattgtgtatacaggtatatttgggatatatggcatttaagggtattcttttagaagacttgtctaagttgttaatagttgtaaaataccacatattaattttttttctacatttaaatgaccatcgtcctgtgttactggacttgtctcagaaatgagggaaatatagggccattattaattttgtatttgaatcatatcattggctattaataatcttctacagtcacatctacatatattagcagtgaagaatcatttcagtgacaatttgttagtcttcaaagagaaaaaagaaaaatctgagtttcataccaagtcttctataagaacaattctaatgtcaatgtagagccctttcttttttgtttttaaaactctctaagatagctctactttatatggaaacaaattttctaaagagcaggcaatggatttatggamatttgcacataaacgtgtaatcacattttgtctaaaaactgtaaaaatattttaacgtcattcaaaacatacgttaaatgttgagtaataccaagaagcaatttgatctcatttgcagggtcaacagagcagttaatacaatgacagtagatttggggaggcttttgcgtagaatcaaatctgttgggataatgaatacttaaatagttttaaacagcaggaaaagatgaaaaaacacactgaaaccctttggaggattaagttaaattttgaaaataatgattgaagctaatactttagatattctcatagaaacagaaaaaccagttgtttagtatagcaaatatagattacatattctgtagattgtcatggcatttttttgtaatctgattttttttttcaatttcagaagataatgaataaaccctaggtaactctttcatttccattcccttaacaaataactgcagtytctcatagaccattttgattcctgctggtttctctatcttgtttgtctgaaggtagagcagagacacctctgtgtattgtattttctgtcagctagttcttagatctttcaactatttttttttttttttaaatccttgatacatgctttccaaaggctgaggaaacagaaagtgagagaggggtgaaagctgyatataatggggattatctggagattagttaaagtttcactaatgccattaatttaaatatttgactccggccctttcgtgtatgagatttgttccgccattacttcaggtagatttcattacctcgactggactgcctaaatacaacttttgtgtcagtcaatatggttatacttatacttaatttacacatgctaatggcaatattagatctattgaacagatatcatcagtaaacagttaatgattgatattcaggtccaactttgattattgatcatataatattttgtgtaatttctgtggttattataaatatatgattgataaccagttattcaggcaatttgcatttataattttttatgtagattttactaatcagctagaaatatctcttcatgaaggtaattattagtaaaaaaatttgtgcagagaattgcgcagagtatcttaactttattctaacttatcctactactaggaatgttcttaataatctttattaaaaacttagtttcttagattgtctgtacctgtgttaaaatgtggtctacagccatttaaataaaaggtctctattttatgacttatgtgaatttcggatttgtaacgtatatatgtatgtatatttatgtttgtgcatttgtgcataagttaaatctttgactaaaagatggacctcaacaagtgtgggaaagtgttatagttacaatatcctgctttttgcttttctgtataagagacttggtagctgcatcatatatcatggtcatccaaacctcttgttttaaatgagagacatagttaatcataattaaaaatgctaaataaatttgaaataggaactatttgacccattaaataaaaagatcccaggaattcttagatgtaaagttatctaattcttgagatttaacttaaaaatataagtatttatttatgggtagttttaaatttgtctttcaagcattatggagattagaaattttgtgtgctttttttaaatttgaaggtccttaataaaacagtatgtaattgtgagaagcaagagtgctgcagcatgttgtgtcttttaaatatctttgagagtaacagaaaagcccaaattctctcctagtgtcgtttttaaaatcaagtattgaaactgaatatagttcagctaagctttctttgctgtcactcttaacattgccataactctactttcctagtcatttgattgtacagaaaaaagtaaattcttttactatgtaagtatacccttatcatcaatcatgtactgcataatgcatagaaaagaatacatgtaacattttttgaagcataacagtaacacaatactgatgatttctcacccagcttaaaaactagatggtatcattgaatctctatatgttgtctgtccctattcagtcactctatttcccttcacccagatgtgatcattattctaagatgttttcattcatttccttacttcttataaaaataatggtttctgaatgtattactaaacggcatatattgtttaattttgagcactatacattacataatgtaattacctattaatgtaattattataatgtaattatacttttttctcttaaatcttgttttaagatttatttgagtcttggcatgtagctatagttaaatttcatgctgtatacgattttattacgtggatatacttgtattcattgtagtagggtatattgggtgttccatgtttattttgttttttgtcactatgaacaatcgtactgtgaagattactgaacatgtgttctagtaatatgtgagtaaattctttcattgtatatctaagagtggaataggtgagtctcacagagaacgtgcatattcaaccatgcaagataatgccaaattggtgatacactgatacacatttccaccagcaaagtgcaatagttctctttgcgctgcaggtttatcaactctgacaatcttcagacttcttgatttttcctaatctatgggtataaaaatagtatttcatcatggttttaatttgcatttcctaataatgaggttgaacaatttttttatgtttatcttccattctcatttctgtgaaatgccttttttttgttatttgtccccctgcccccaattttgttttattaggggttcttatgtattgtggatacagatgccttttgtacatatatgttgcaaaaatcttctctctgttaatgacttggttcttttatggtatattagtgaaaagaactgaatttaaatggtagttaaatttatcagtctcttatatgattagcactttttgtgtcatggttaagaaattactytctgtcccaaggtctcgaggatatctttatttttttttcaaaggcttgcccttagtgttccaaatttatttggaattgattctttgaaaagggtaaggtagtagtccaatttcatttttctccatatggataactatttgttttagtaactttattgaatagtccagtggctagagtgccatctgtcatttcatgattctttttttgcctagttctgtgttgggctcttccrttctattcatcaagttgtctatctctgcacaaatagtacatgatatagttttaattactataattctaatgagtcttgatatctagtaggacaagtatctgtattttcattaggagctgcctgacgcattcatataaaatgagaatcagcttatcaaattccttggaaaagtattcttgtggttttaattagaattttattgaatttgagaaattagaagtagaattcttaaaaatgttgaattttctttttcataaacatactgtatcaccctcatttatttaggatttctttaattctgattttgctttgtaattttctgtatwcaagtattgtacatcttttgctaaatttatttctaggagtttaatatttttgatgcttttgtaagttttatctaaaaacttkttttttatctagcaaccttgtataaatgttctttttaattctaataatttgcttatacattacattctttgatttttatctgtagacaatctttttttttttttttttttaagttctgtttcttactttactgtctaggacaaccaagtcataattgagcttcttttcttgttccatgttttaaatggagcggtataaacttgtcatctttamtattgatgtttggcgtgggtgtttgaaaaggtattctttatcaattaattcggtcccttttttttttttttttgagacggagtctctctctgtcgccaggtgggggtgcagtggtgcagtctcggctcattgcaacctctgcctccagggttcaagtgattccccttcctcagcctcccgagctgggactacaggcgcccgccaccatgcctggctaatttttgtatttttagtagagaccaggtttcatcatgttggccaggattttcttgattccttgacctcatgatccacctgcttcggcctcccaaagtgctgcgattacaggtgtgagccaccacacctggctcctctatttttccatgaaagtattttggttgtctttggtggtggtggtggtggccttatgtaaactcttcattgggcattaaattttaatgaatactttatctactaaagtaataatcatatggttttgctttaatctattaatatgataaattgaatatgtatatttttcttttgtatttatttatttatttattttttgagacggagtcttgctctgtcgcccaggctggagtgcagtggcacgatctcatctcagaatgtgtatatttttctaatgtcagactaactttgcatttccaatttggcaatatatrttatcttttttcaatatgaacagtcttggatatgatttgttactaagagtcttacatgtgtgttcatgatttgagattggcttctttttttcttacacctaattagcctgtttttaatactggcctcagagaaaaaaaattatttttttattttttatttttgattctcagaagcgttttaagagtggaatgatctcacttgaaatttgatagaagtctcctgtaaaactatgtggacctggtggttttgtatttgggataaggtggggaaaaggtggaaattaactacaagtcccrtctctatattgtataaccagtattcacttagtctgttctttttagtaggttgaatttttctaggaattagagcatttatttttttcatgtctgttatttctgtcttctctctgtcttgtcacaaggtttctatgttttattagtcttgacccaaaaatttaaaaaaaattttagtttttattgacactattttgtgtttgtgttgtgtttcactagtttatactattacgtttgttaccttttctatttacttgagctaattttgctgttctttttgtaattttttagatwgggttcttaatttttagcttttcttctgtaatacaaacattaaagctgtacatttacctctaagtactgatttttgtggcctctcatactatttttttaaaaaatttgttaaaaattgcttttggacctaatgtattgttagattttatacatatgtccagtgtgcttgagaaaaatatctcttctctgattgttacatatagggtttgctatgttttcattaaatcatgttcatttattatgtggttcagatattctgtatcttcattttttccctctggttgtcaaaaacaagatacgtagaaatgtgtttgctgtattactttttatttatatattgctgtataatctttgctgtattactataccttgaggctattttattatgtagagcaagcttacaatgtttcagtagcatatatttttaccgtttttgtttttttgtcattttaaagtaccacattactctgtgtgtttttatttatttagtctgacagtcttttaagagtttggtttgtttgtattcattatgataggggtttgttactaccatttacttaacgactactttctgtttttctctttctgcgcccctcctccttgccttgcctttttgattgattgaggactgtttgcttattagttttggtgttttgttttgttttgctcataattccattccttctttacacccatttttggaggctatacactatttctgtatccttagtggttctgaaactttactgtgcttacttaaaaagaagtcgtaagttaataatcttaactcattctagtataagacaatgattgtgaaacagtttaattttaatcagctcctttcctgattaaatgtttccagactagtgacttttaaaatgccagttgcttctgtttaactcaaaagtttgtccggctcacaaatgccattttggaaatgccatgtagcctgttcttacaatctaagagtattctgcaatggaaaaccagcttcagggaggtgctccattaggaaaatctagaaaccaaaaactgtggataatcactttgctgaggttttcattccctgaagaagcaaaagttgctagtctccctttgaacaaattttatgcctagcttttcttgggtttagagggcaaaattaactttttttgttgaagtagtgtgttatgaaggctaaagcgaacatcattatttcaaaggaaaagtaaaatagaatatggtcttactcacctggtagcaattgcataaaataacgtgtatccaacattaatttttaatcggtaatatttttttcctctggagagccagcttctgctatctgataaaaaatatatattatccttttatatacatgggttacaaaaaagtcatttgactaacttattcaaatggcccctatttaacgaacctctgtagtagatagcgtggataagataatgaagtttcaaagaaacatttgagtcatttagtatttttcaatatctttatatcttaggactttctcatttgtcagtgtctcatttgacccatttctttattcttattctttattcttaactccagattttttaacttgatatttattttcttctaagaaaaatttaccatctctttgaaacactgtaatttggacatgcaaagaaaacaaagttgcaaaaatgtaattattaaatatgcctccttattcccaactgattcagaaccactgcaatttttgggcaagcgctttaatttaggattatcaaacactgtctcagcccaaaatctccttaagctgataagcaacttcagcaaagtctcaggatacaaaatcaatgtgcaaaaatcacaagcattcttaaacaccaataacagacgcagagccaaatcatgagtgaactcccattcacaattgcttcaaagagaataaaatacctaggaatccaacttacaagggatatgaaggacctcttcaaggagaactacaaaccactgctcaacgaaataaaagaggacacaaacaaatggaagaacattccatgctcatggataggaagaatcaatattgtaaaaacggccatactgcccaaggtaatttatagattcaatgccatccccatcaaggtaccaacgactttcttcacagaattggaaacaactactttaaagttcatatggcaccaaaaaagagcccgcattgccaagacaatcctaagccaaaagagcaaagctggaggcatcacgctacctgacttcaaactatactacaaggctacagtaaccaaaacagcagggtactggtaccaaaacggagatatagaccaatggaacagaacagagccttcagaaataataccacacatctacaactatctgatctttgacaaacctgacaaaaacaagaaatggggaaaggatttcctatttaataaatggtgctgggaaaagtggctagccatatgtagaaagctgaaactggatcccttccttacaccttatacaaaaattaattcaagatggattaaagacttaaatattagacctaaaaccataaaaaccctagaagaaaacctaggcaataccatttaggacataggcatgggcaaagacttcatgtctaaaacaccaaaagcaatggcaacaaaagccaaaatagacaaatgggatctcattaaactaaagagcttctgcacagcaaaagaaactaccatcagagtgaacaggcaacctacagaatgggagaaaatttttgcaagctacccatctgacaaagggctaatacccagaatctacaaagaactcaaacaaatttagaagaaaaaaacaaccccatcaacaagtgggcgaaggatatgaacagacacttctcaaaagaagacatttaygcagccaaaagacacatgaaaaaatgctcatcatcactggccatcagagaaatgcaaatcaaaaccacaatgagataccatctcacaccagttagaatggcaatcattaaaaagtcaggaaacaacaggtgctggagaggacgtggagaaataggaacacttttacactgttggtgggactgtaaactagttcaaccattgtggaagacagtgtggcaatttctcaaggatcttgaactagaaataccatttgacccaccaatcccattactgggtatatacccaaaggattataaatcatgctgctataaagacacatacacatgtatgtttattgtggcagtattcacagtagcaaagacttggaaccaacccaaatgtccatcaatgatagactggattaagaaaatgtggcacatatacaccatggaatactgtgcagccataagaaaggatgagttcatgtcctttgtagggacatggatgaagctggaaaccatcattctcagcaaactgttgcaagaacagaaaaccaaacaccacaggttctcactcataggtgggaattgaacaatgagaacacttggacacaggaaggggaacatcacacaccgggacctaccgtggggtggggggagcggggagagatagcattaggagatacacctaatgtaaatgacaagttaatgggtgcarcacaccaacatggcacatgtatacatatgtaacgaacctgcacgttgtgcacatgtaccctagaacttaaagtataataaaaaaaattaaaaagaaatttcctggaactagcatgtcagaataccattttatgtccagcttaaagtttagtgtgaaccttgaattttatttcatttctatttatattcaagtttctaaagaacaagtttccatgaacaaatgtggctttcaacaggtgaaatgatttgagtaatagaaaaaaattagaatttgaaaaatttgaagaatttaaaaagttaacatatttgaagaatatgaaatactaacattagggaagattagtttgatacttttaatttaggaactattagagaaaggggaaagacaactratattttaggtgattctatttagataaatggcaaaatccgccttggaaaagctacataataaatatacaagtcatttgtaaactattcggatcacttaggtgctttatggttagtattcatattttaaaattaatgtacattacagcaaaataactgttttgttttaatatttatatgcattctatataagggataaccttttgaattgtaaaaagtgaaacctacaaagtaaaacctacacctattatactatgatttgcatgatgtaaggctataaatgtatattcctttttctgaactattctttcaagggttgcagtagtactgtcagctgctgatttttctttttgaacttaaacacagcttttgtcattgtcatggaaatgttaccatgttctttattttaaaatgtatttataaaaaatrtgaattactttttaaatagtaataactactcttactagtgatatatattactttcagtagatgtattatatattactcttagtaatattatatatgtatactttaataaacatgtaaaaagcatgcaatgctaagctcattagtaatatattagtaatgatacatagcaagcttgttcaacccatgacccgtgggtcacatgcgtcccaggacgtttttctagcccaacacaaattcgaaaacttccttgaaacattattagattttttttgcaattttttttaagctcatcgggtgtcattaatgttagtgtattttatatgtgacccaagacaattctttttttagtgtggacacccctgatatatagttgtacttgattgttcccaagggtttttaccacaggaacagaggaaggtcacataataggtaatataagctgatgatgaattttactcataatttaatggccagctgtstcagaatttaagatttattttgtttggtgttgaactctataggtataaagtaagcctccaatgtggtaagtgatgtcagtacagtgcattcttcaaacagtaaagtcaatcctgatttcttgagtggtatgtttgaaataccaaattccttattgaaatggacagaatgaaggacttggctcacagcaggcaacaggcaacatcttgtacattctaatttttgcaaagaaagaacgaagttggaggactcatactacttgattctgacgtactaggtaaacatagagtaatcaaaatagtgtggtattggcatgggttgggcatatagatcagtgaaacagaataaggagcccagaagtagatccacacataaatggtcagttgattttcagcagaaatgccaaggtaattcagtagggaaaggatttcgacataaagtgttagaataactgagtatctatacacaaaatacagcaggtccttgaataatggttcattcaacattgtattgtacttacaacgttcatgaggaaaaaacctgattcctggcaggggccattgtgtggagtttgcatcttctcccgtgtctgtgtgggctttctccgtgtattctggttccctcctaaatttcagagatgtgcatgttaagtgaattggtgtgcctaaattgtccccacctgagtgagtgagggggtgtgggggttatgtgaaagtgtgcccagtgatgcaggagcatcctgtccagggatggttcacaccctgtgccctgggctgctggaactcttcagccaccctctaccctgaactggaataagtgggtaaacaatactctaacttgttttttattaacttttcttaactgtatgtatagctcacatttatttcaatgcttgatattagaaatattttggtctttatttagtaaattttggtgatgttgtgaccagaaatatgacataggaacttaaatcttgtttatgtcaattagcctgtggttaaattggtttcagtatatgtcatttcacataaagttgcagtttccaagaacctatccacaacattaagcgaagacttactgtattgaaccttgattgtgacctcacatcatccatagttatgcattgtataatgacattttgatgaacaacagtcctcatatataatggtggttccagaagattatgatagagctgaaaaattcctgtcacctaattgaggttgtagtcatcgtagcatcgtcagacagtgcattactcacatgtttgtggtgatgctggtggaaacaaacttgtgctgccagcamatataattatatgtagtacatacttgataataaacaactgtgttcctggtttatgtatttactgtrctttttattgktattttagagtgtactccttatttttttaaagttaactctaaaacagcctcaggcagttctttcargaggtattgcaggagaaggcattgttataggagatgacagctctatgtgtatgttattgctcatgaggaccctacagtggaacaggatgtggcggtggaagacagtagtgatatatatgctcctgagcctgtgtgagcctaggctaatgtgtatgtttgtgtcttagtttttacaaaaaaagtttaaaaaattaaataaaataacttttaaaaataaaaaagcttatagacaaatacaaaggaaaatatttttgtacagctatacactgtgtttgtgttttaagctcagtgttactacagaagaatcagaaagttaaaaaaaaattttaagttgacatagtaaaaaagttacagccaggctcacacctgtaatgccagcacttttaggaggttraggggggaggattatttgaggccagaagtttgaggccagcctgggcaatatagcaagacaccatctctacaaaaaatttaaaaattagcgggcatggtggcatatgcctgtagtcccaggtgcttgggaggctgaggtgggaggaccacttgagcccaggagttcaagattgcagtgaactatgatcataccactgcactctggtctgagtgacaaagtcagatcttgtctctaagcacaaaataaaagttatagtaagctaaagttaatttattattgtggaagaaaagtatttttgtataaatttagtatagcctaagtgtttataaagcctgcagtagtgcacagatacatcctacgccttcactactcacccctgactcacccagaccaacttccagtcctgaaagctccattgtggtaagtgcccaatacaagtgtaccactttttatcttttatatcatttttactgtacctttcctgtgtgtttagatacacaaatcacattgttttacagttgcctacagtattctatataataacatactgtgtgagtttgtagcctgggagcaataggctataccatataacctaagtgtgtagtaggctgtaccatctagctttgtgtaaatacgctatgatgtttgaaaaatgacaaaatccccgaatgacacatttctgaggtcatattcttgttgttaaacattaagtgacacatgaccatacaaaaattaattcaaaatgggtcattgacctaaatgtaggagctaaagctataacttctagaatataatgtaagagcaaaattttatgcccttggattaagtaaaaatctcttaggacaaaagcaagaaataaaataattggcaggtggaacttaaagtaaaagacactgttgagaagatgaaaaggcaaatcacagaaagggagaaaataatttgaaaacctctgtctgataaaagacttgtatccagaacatgcaagtcttaacatacaagtcttatatcttaatagacaaaccaatttaaaatggacaaaagatttgaatagagatgttactgatgaagctgtatgaataacagtggtgcttacacatcattagtcgttagaaaaatgcaaattaaaaccacgatgaaatacaactacatactgactagaatggttaaaataattataaaaaaacaggatgaggaaggatgtgtagccgttgaaactctcatacattaccattgagaaggcaaaatggtatggccacttgggataacagttttggggtttcttactataaacatacacttactaccatgtgactcagtgttactggttaaattacatcctccaaaatggtatgtttaagtcctaacctccagtacctcagaatgtgaccttttttttttttttttttttttttkggaaatagggtcattgcagtggaacgaggaaacatttttggggtggtggatatgctctatatcatggttgtagtgatgttacaggactatacatttgtcaaaacttagcagtgtttatttcaaaatggtgaataaattttataaataaatttatacttcaaagctgattaaaaacatttgaaaaatacaataaatggctacattgaaaatgtaatgaatatacttttagttcaaaaagtgggtgcagacgagcattctggctcctggagcggctgggagggcgacttataactagaatgcctgtggtcgaatgtaaaaacattgtcttaagagtgtacagggactggtgtggtggctcacgcctgtaatcccagcactttgggatttcgaggtgggcagattgcttgaactcaggagtttgagaccatcctgagcaacatggcgagactcccatctctacaaaaaaacaagtgtacaaatgctaattttggccatgataaaatttctaatagtgtcacttgcaaagtcraaaaattcatctcaataattttataatgacaaagacactgatgtctaggagttaaataaaattttcgtaaaatgtcatcccgtggtatccttgggggattggttctgggacttccacagataccaaaattctcaaaatactcaagttccttatataaaatggcatactatttgcatataacctatgtatatcttctggtatactttgattacttataataccaaatacaatataaataatagttgttaaactgtattggctttttatttgtgtgatttcttattagtttttttctgcatattttctgtttgtggttggttgaatctgtgtatgtagaacccatgggtacagagggctgactgtatttataatttaccacatggggtgatttttaatatctgtagctaataattattttaagtggccatttgactgtttccttgacattcctaaaaatttatatacttaaattggggaggaaaatatgtttgcgttcttcttagtggataaatggaagattgcgttatagtcatatattcatagagctttctgatatacccagttaagcaattttgatacatccttcttcgtccttccacgggacattgacctgtctctagttctgcacatgttacactgtattgcatttagccttttcataacaataaattcaattagatgtcatttatttcttttatccctactacagtgcctggcttatgatgtacataaaataaatattagtggataggaaaatttttttataaagaatcaattttttgccacagtgcattttttcatggttgacatttattcaagaagcatttattgagcaactcttatgtggaaagcattatactggctgctttgagatatataaaagaactataacatctaaacatttaatgttagaatgaaatgtaatttctatttagtataaggtatactamaaattataggatgaaggtgggtaatcactagaggtttcagatggatcataggtaaaaaatactggaaaaacagtttagtctgatgacaaaggaaatcactttttagtagctatggtattcaaaataatcatagtttaaaatgtcatttaacagtttctggaatttttataaaatcattctccttgctgtcatattgttagatccagagagttagactgtgcagtaaatgagctatttttttaccttagaaaagcagaagacttgaattttcataagtagactcttagaggttccttctgatgcttcagcacatttccttttctccaaagaaatgcttcagggccgagtgcagtggctgacgcctgtaatcccagcactttgggagacccaggcgggcgaatcacgaggtcaggagatcaaaaccatcctggccagcatgatgaaacccagtctctaccaaaaataaaaaaattagacgggtgtggcagcacgtgcctgtagtcccagctacttgggtggctgaggcaggagaattgcttgaacccgggaggcagaggctgcagtgagccgagatcatgccactaacgacagagcaagactccgtctcaaaaaaaaaaaaaaaaaaagatagattttttttttcttcatatagagtgtcaaatagcgcttgaaccaaagccctttacctctcctcataggggcattgaacagtaatagaagcttagaacatactactttttatatagatgtcagtatagatctattttaattgttaaaatggatgtcagggttttctgtgagcagtgtgcaacataaggaatttttttttttgagatggagtctctctccgtcgcccaggctagattgtagtggcacaaccggctcactgcaacctctgcctcccaggtccaagcaattctcctgcctcagcctccccagtagctgggattacagcacgcaccaccatgccaggctaatttttgtatttttagtggagacagggtttcaccatgttggccaggctggtctcgaactcctgaccttatgatccgcctgcctcagcctcccagagtgctgggattgattacaggtgtgatgttgcacactgctcacaaaaactgtggtaagctcttttcaaataagaattatatttttggccagtgctttcactaggtgaattgaatgacaaccaaaccactgtcaggaggcagcgtggtctggaagagcagtggagtgtgagtcaaaacacctcatccttgccatcacaaagtgtggagagtcatctcagcagaccttagtactgttgactataaacattattgtgatatacctaccctaatttagactggaaagcaagtgtaaatgaggatataattgtggagccttctgcatttgtcaaaactaagaaattaatattggtaacttaatattaactaaactcctggctttataccagtttttccactaatgtcctttttgtttcaggatatcacattgcatttaattgtcacatctcttaagtctaccctatccccatcagtcattctaagctttccagatgtttgaaaattaatgtttgccttgtcttaggaatcagagaatatgtgctgagcattgctcagtctttccttgttaattcaagggtattgtgaagcatcagttaatattctgtgccttcagaggctgtttacatgtttaaagttttctgactttaagtggctgtgctcttctggttagccccccatcagtgtgacctaatcaaaaagccaaacagcaatctgtactagagttcaaaaagagggagaagtcccttttggaattagggaagtccttctatttattaattgaattcagataaagaatattgaaagaggcagtagtcatcagggaggtaggaagaaatggcatgagcaaagtcctgagaagttttctaaggatgctggtgaaagagtgccaaactggaagtcatggaacaggttagaattcaggttctgccacgtattagctctggagccttgagcaagcacctgacctcagtttcctcatttgtaagactagggacccatactaaatratatctaaagacctttcaattctgaacatccataattgagtcccaggccaaatgtgctaagtatctgggttggaagtagtgataaagaaaattacataatagtaggagctgtcagcttcactataaccccaaaggcaggtgccatcacatacagatggagaaaaattgagtaatttgcacaacgtcacacatctggtaaatgcaaccagatttttagatcttgtgtgatttccaagccttttcaatacagtttactgcttcctcttttattgttacaagaaagattgttcagaagarctttcaggatgtctggtgagcaaggaagcttaaaagtcaagtcttatgcctgcacaactagaaaaataaatgaaagtgccatttaaaaaattgttttaaataaaagtatataacaggttgagcatctctgatctgaaatctgaaatgctccaagacgtgaaactttttgagttccaacatgatgctacgagttaacctgaacacattttttcattgtatccatggtatgttctatttttttactaaatacttacatgtgaataaatataagaaaatgaatgcttactagtagcatataaattcaagagtaaggaatgatggtgatgccagtcaaccagattgtccacatgagtggctgagatacagtgctttctgatggcttagtgtgttcaaatctgtttcatgcacaaaattatttaaaatattgtataaaattactttcaggcttagtgtataagatgtacatgaaacataaatgagttttgtgtttagactttggtctcatccccagtatatctcattatgtatatgcaaatcttccaaaatccaaaaatataaaaaaagttaacacttctggtcctaagcattttggatgagggatacttaacctgaattattgtataatatttgataagacaaaaacacaagaaagtaaaatataataattaacgataatcaccatagacataatcaatgttatttccacccatcctcttttaaaatacacatactgtatacacatatacaaattgtttacacaatatgattactggtgtgtatgtatagttttgtgatctactcttctttcttaatctgtcatgaatatttctccatgtcattaaacagtcttcaaaatcttcaatttttttcagtgcctacatcatgattgattgaaaaccgtaagtgatttaaccgttatttcgttggacatttaagttattttgagtttcactattgttattttgctttgagccttcttttacaaaaacttttattcacgtctctgttttktgtcctaggatagcttcttggatgtgggattacttaatcaaatgactcttgatacatgtggctaagaatctttaaaaggctgtatttctcctccgatctagtggtatttgagcataactgtccctccacatttttcccaagtactacaatttctggtctttggtagggccaggttttgtgttaaagattatttttattttgttgagtttgagatgacggttggtcagaaaaagtataatgttcaataagtactgaaaaagtgaatagtgcaaaatatacagtgctacaactaaaaatttagaaactgactatatgtaatttatataaaataggatgaaatctctaagcgataaatatatatagtttgtattatctatggcactatgtatggcaagaaggatgccaaatatcacttcagggcaaacccagatcataagggatagaagtggaaaaaaagaatctttagtggcaatagagaatactagaggtgacagatagaatgcaggtttactttaataggagattgtgttttctataaggctttatcctaaggaagattcagttttaatttactgtgtagaaactactttttgtaatttcaagatttgtgacataattccactattatgctgatataattttttatgtcactagattagtgtattgatcttcttaatgcatcttttgttgttttgtatgcttatagatggtaacataattcctaaagtccctgtgaatggttcttacattaatcactatgttaaaagtcttaattgctcactagtttctgatttagcttactgtactctccagtaattgttcagttctaagaatattttatggcatagtagttatataatgtcagtggtgcactggttaatgttctagaattaataatacattttctcttttcatattatgtagaattttctaaatgttagaatttaaagtcagagaacttactaagtgtttacataggacactaaaataagattttaccttcctctagtagtataccttgtgtttatgcttttacgtctgctgctttataagcagaaagagagggagggaaatggcaagaaagcatacagcaggaagagctgagaatcttaaactgtcataatctactttttaaagacaaatgtgtaagcaaaattacttgtgctgtgtatgagtaagaaggttgtagagacgttttctcatttgatcaattttaaaaagctgttatattatgctgattattgttacagctttttgaggtggtgatagggargttttccaaggaggctggcatgcccctggctgagcccagcaaagctgcattacctcaataaattcaccacaatctaaagatgttaatgagttttggcaaaagttataatagcttcttacatctttctgcacaataggagtaacagttagagagcccaggcaattatgtcacatctgaggattggaatactttcttgttttcattctttttttccccattctttctgcatatctgctctccccgtctccagttgttttgaatcatggctgagcattttatcacctgatgagtttttaaagctctgtaagctcagaccaagccccagactaatacatcagaatctctaggggtgggacctggtattgggtaagtttttaaactccacaggtgattacatttggcagccaaggttgggacccatggtttcagatgtagtaaccacatcaattaacttagtacctcttaagaaggttgcttattagaataacctgggagattttctccacactgttccctcccttccacttcccttattaatttagtgagccagtgttaactgatgggaatatacacatacccttggatatgttgggacagaaaaaaaaaagacaacaatcaatttgttaagtactatttttcctacactctttttggaatatagtctgcttatataagtgactttgtatctatccagcattattttatgtggataattttgtgttgttcagtatttgcataatcactgtgagggcaaggaccttgtawgttcttctgttcatcactgtattttcagtacccactagtgcctggcacatggtagataatcagtaaatgttagaagagtgaatcagtaacactgagtaccccacatamgtgccagctatagtatgaagctttgtaattacattgtccaccaaggaaaaagatcttccataaagccacagataagcaggaaatagatttattgaattttgagtctttcgcaggtcagggattccgtgtaggcattaaggttctgaacaaaaatgtagcacaaaacacaaatacttgctagcagaagatacatttccatacctgccctcgtatatcaaactgcaaaacatacagaaaaaaactaatggacaaacaggtgctgttagagtctgtgtttagtttaagcctcatgataaactgggctagagcttgacacatttatcaactgttagttgtattttacctaatcatagcctgtcttaaaggcagaaaatgaaaacaagatgatctgtcacatatggttaagttgtaattcagatttacaatatattggcgaaatggcttcagttttggatgagcccttaaactgtacagtgtgcaaagaatgggggagggaagagacctaagaagggttaagtaatcttagccaagatttctaaaagctcttattaatctgatttttcagaattagaaaatctctgttgtcagagttctccagtttggggtktgataagaaagcatatcatagaaattactctgcctacctaaaatcctttatggtttagattttattctgtagtgcctttacagcactcttagtgcttcagccatagccccagttttgacttattgggcccctgtccctcttatttttcaaattaaaaattacacagaaaactattcagagtrgaaagagtataagtgaaaactaggtttccttttcactacagagcaccacatcctttttagaggtaaccagtattagcatttccttctgtatttttacagaaagagttagttcatattgccagcatacacatgcaggtagtttttgtagtttattggcatgatcaccacatgactagatgacgtctttagtttctaacacacttttcaaacccagcttctttccatatctcttcatgtaattaatctctcctctgctttgtttccatttgcttttttgtccctctgttaaacacctgttagaggtctgacatgtattattgggacttaggtgtggtggtctcatctcaggtatcatctcgccttcttactctgtactctttacctagcctggctcatcccacctgcaggacattaaggacctgtgtatcaaggtctcacaaatttatatctataggaccaggcccctttatcttacttgtctgtctctttgacatacttatcttttggatatctcataaacttcttagtcccagtgtatccaaaaccaacttttttttcaacatccatatcttagttaatggcatatacattatctcagtcatagcagtctgaaaactataagctattctcgaaaccctccttttcctcacttgtcctatttcaaaacgtaagtctggttgatttttgttttgttttgtttttttcctcctaaataactctcaagtccctcttctttgtctctggtaccatattagtctagcctatcatcatctttcacccagattactgcagtggtccacccacagcccctccgggcctcctccagaccattttccacagagcagcctgaggaggccttgcaaaatgtccatattagtttaacactccccctttgttgcttaaaatcttttgatagctgcctatttcttttaatataaagacaagtctccttcatgtagtcttacaaggtcctgcctagacgtttgttacagcttccctcattaggtcgtttcattgtacttcccatgttctcttcccttctgccacattgtgcttccaggccctgctacttgttcctgatggcctcagggcattttcctatgctttgaagtcctctttcccagccctttcctttcagcttctmctgataaacccccactggggtatttgaaataatcttttaaatattgcttcctctgactcttcccttatctctctaacatttccccggcattcaacaaggaataccttgcctttgtagcgttttctgttttatgtttttttgtgagtttatttgattaagatctatatcctcagctwggctgaaatctccattgtatatttagtttcttgtacagattcctagccccaaatcgtagacactcaataactccttaatgaatgaatgaatttgttttctttattgaatctaacaagtactgtattttgtatattgttaaagcttaaatactttttttgattcamagtaaattcataggttcacaaggcacagtatggattaataagcaataccatttcctggttggttgttatasagattacataagaattcacacatttaccaaaacgaggtcattcttgggaagaggagtaggaagataaaatcatgggaaccactagcacatacctaggtctgcccttttagttagtagaattatttttctacgttatttccccagccactcctctcaccctaattgtctgtattatagctttccctaattgtgaactcctaattgctttcaacctaaataaatatgattctttctaaaacactcaggaataacaactgttcacttataaacagtttttgaagtttggaaagcaatatagaggtttggctttactttagaaaaatattacagaagctacctgtgttctccgcctacttcacacatgcccatttagcatttgatgtacttcatataattaaatttgttctgcatcctaaggattttcctgagccccagccgccttgataaggttgttaaaatgaacaactcattgctaagattaccttttctccctctcttgggcagtagaactcagctgagagaatagcggcaactaggagaagaaagggtgatgggttgagatttctggagatttcagctgagggagtaaagaagcttcagaggataaagatattctttatgtcaccattagcagagaagtcaaggatctgctggacagagcagctttttgagtgtaggtattttagctaagttggatattatacaccacaatgaatgtgaatataaaaaacaagggatttaagtgtgaaattgtgaccacagtattggctaaagacaatatacttatagatgttgatatttaatttcaccacacccacagtttatcctggcatcccagtgcctggtccatagtagttattcacaatgttgtttaactgactggacttggatgtgtgtttgtgtgtgttttttaaattatttcaccttgtgtatggttgtacttgtagaaatgttttcatctacatttatataagtgtacagtactttgcaataaaaatacctgtaccagaattcttctcttacaaagtgtttcttatgattatacacaatagacttgactgcgtttggatgatgactgtcataataggccttaagatagacaaagcacaagctttatagtaatagttttgaagaaagactatatggtaattactagatcaagaaagcattattgcattatctgtgcagatagaagcctttaggcagatgccatagtttttttacttcatcagtctttttatatgtacacctgactgccagaaatagttattaattcttcaatgaagatggttttgcagactgaatttatgtgtatgtatatagcacgcacacccagccattttatttttatgttcaatctaattcctttaaacaaaagactatgaaatactactacttttctgtaggccatgtgataaggttgttagggctggacagaaagaaaaaatatatttatttgccataccctgaatatatgaaatgaagactagatttcaaaaatcttactttcaggcatcacagtaatttacaaaaaggccaataagttacacaagcatttgtagtaatttatgtaaaagatgtgaagctggtaagggatggttcaaaaacttacatatcagaatctgcttaatacaaattttaggaaaagaatccacttctttacaaggcaatactctgatcactatttcctgaacagttattgaaggtgtttcargcaagagttacatactagtatagatttttaatgcaaatggccatatttgttttgaaggtgataccttgtgggttttcttcaactctttcaaaacttgaattttatatcattttgtttttcctcccatccccacatcctaagtgctaaaagactctaaaactcatcttgtcacctgctgttttgttcaacgggattctcttcagaaatataatcctaaagtttgggagggactcttagagtagacacttaagcagagatggaacaaagaattaataatccaaattatatgaagcatttaaaagtctgtagagtagaagccattacagaatcacctttagtacgtgattagatacctttatttctgaatctgtttacattttatttttggcaggagctgggtaattaaaaatatttgtatggatttattgctttcaaatttgtggtgaagacattttagaagagaatcttagctctgcatatacgaccctaggcaagtcacttaacctttctggctcggtttctcatctgtgaaattgtgataaaaatactcgaacaggattactactattgagttagatgtgatataaagcacctggcaaagagtgggcactccataaaatgttctttctttctttagttatgttaatagtaaaatagagctctggtgtgctttgaaacttccttctttcttgtttcaacgtacagtaataggtaagacttgagtaataatccagtaatcctttcatgtattctagcttgaacatttttttaaaggaaataaaactatatatagttgaagtttcttcgtactttcttcccagtctcattccttttccttccggcccagaggcaataactatcctgtatttttggtccatgatttctgcatgttttcatactttcacggtgtatgtatgcattcataaacaatatgtgggatcttttttatgtttttaaaacttgaataaatggtattaaattacatgtttaatccttcagcttaacttttttcactcagcattatttttgagagctatctcttgctgaaaaatataggtcattcattttaattgctgtataattatctatttccttattggtagacatagtggttttatgcagttttttcagtattttaaacaatgctaggttggatatcttctcatttttaatattcttcttagaactcaggtgtgcttactgagttgcagcttaatccctgaaatgtgcattactgacctacaaacgtttgtaatgaactgatttataatcttaattacctaactcattccagtcttttctaaagattggtctaatttaagggctcctctttctaatctctcctacccccattactcatactgagatgctaacttgatagcctcattgtgggaaaagtcgtatcaacattaggaacagttattgcttattttggtgatattaatagtgattgattttaattttcaatattatgcattttaagtataccaattctgaagtatacttttgcaatagaatatgtgtgcaaattcttaggactattaaaatacttagtccaacctaatggagtaaccttttgtatgtaatttctttttaaatatgtatttatagtgaatacatgagctagttttataattactattctctgtgttttctagactgcttttttatgcagtgtggcattgtacctaaaattttgtatctgtttttaagtcaaaaatacgttttccaaataaaattttgtatagagtctgaagacactggatacatttctgagtcactgaggtatttccatatagtttggcacaatgtaaaaattgtgtgatttaacttaattatgactgaatcattgtgaagtgtctccttttattagccatattattaatctgagtgaatcttatctagttgttaaggttgagaaaagaaaggtggctgacacacccacatcctataagaaaatgtaatacttaaattacaatcattaaggtgtaactaattctcccatttagttaggatgttggtgatgtcaagaattaattaaaatactttgcaggggtgtccaggggaaagaatacagtcgtaggttcttgaagtttctgtttctggttaggccagtaaagccccttcctcatcctctttttctcttatcactagagacagaaactaaaacccatggctttaggctgttaaaagcataaaacaaaacagcacaacagcagcagcaaaataaggcaggttggacaagtttgctagagtctgtgtgacatttaaatatcttcgttaacccagctgtttaaggtatatgctcattgcttttcagaaattttgaattttaaaaatatctgaaaatggttgagtgctgaaagttaacagtgcaggcagttatcattgagaacacctgactttcacacattttaacaccactaacattggctagtcctttttattgtctagcaatagcccagaaatactcctttcctgtttacctcccagtttgtagtttctaatcatatcaagacctagtttttaatcacttttgctgaaaggtctacccactcttaaggccagggtagactccttgttttattttctttgttctgcttcttctgcctctgctgttccaggagtcttccattttcctatctgctgtgaaatgcttgctggtcacttttctaccttggttttcttttatccttacctcccttctatctggctgattggtgggctttccatgtgcctctctgtgcacaggacacctcgccatcacttttacaatgctgttccctcttagtcatttcttagtcgtttcaccaccctttaagtttccaggaataatctttttcttttcctctcgttctttgtgaccagaatttccttatttttacatctcttttctccttggtttataaagatatgtttgaaagagtaggaaaagatcagaggccagagtgaatacctgccaactacatgaactttgagagccagagtggtcaattcgaaggcactctggtttatgtagttttaaaatgtctaaccatatatcatacttttcagtattttttactgcagatatacagtaccttatttaatattatagaagaaatagtttaaataaattttgtggaccaggatttaaaccaccttagttctatggtccaaatgtgtttcaagttccaaaatacctgatttcagaacaaatttttggaacatactcgtttataaaagttagtaactctttttataaaccattacttacagaaacattgacctcttattttaatatataaatatttgcttgttctaaaatttatttgtattttttaaattaatagctttttctgggcagttttaggttcatagcaaaattgagtgaaaaccccttgtatctctctgcccctgcacagacacacaaccacccctgctattattgtcccacactacagtggtatagttgttacattccaatcgataaacctacattaacacatcattatcatgcaaagtccctagttttcatatgggttcactcttgatgttgtacattttatggatttttacacatatatagtgacatatccgccattcataccatacagaaaagttcactcccttacagatcctccgtgctgtgcctcttcatcccttccaccccactaacccctggcaaccactgatatttttactgtttctgtagttttgcctccagaatgtcatatagatggagtcatacagtatgtagccttttcatattgggttctcccacttactaatatgcatttaagtttcatccatatcttttcatggcttgatagctcayttctttttagcaccgaataatatttcgttgtctggaggtaccacagtttatatatccattcacctactgaagtaacatcttgatcaccttcaagatttggcagttatgaatcaagctgctattcacatctgcatgcagarttttgtgtggacataagttttcagttcatttgagtaaatacccaggagtgtgattactggatcttatggtaagatatgtttatgtttgtaacaagattgccaaactgtcttccaaagtggacatccagatgcataaaaatgaatctagatattttgcatttcctgtaccattttgtattctccactagcaatggatgagagttcctgttactccacattttcttcagcatttgttgttggtgttttggatttgggccattctaataggtgtgtagtggcatgcttttcttgttttaacttgaaattccctaatgacatgagtttgaacagtttttcatacgcttacttgccatctgtttatctttggtgtgaggtatctgttcaggtatttcacccattttataatcaggttgttcattttctttagttttaatggttcatcgtatatttttgataacagttctttatcaggtacatcttttgcaaatattttctccargactgttgcctgccttgttctcttgacattgtcttgcagagcaaaaaaaatctaggctgcagttacagatttggaagttaagagcatattggtgstattgggagccgtaaaactgcataagataaccaaaacagtatatgtaggtagaaaagagaagagtgtaaggtcttagctctggaggactggtgatatttaaagcttagggtgataaggaataggaatagagagtgagaacgaggggccaggaaatgtaggaaagctaacaaagtatgttattctaggaatgaaagagaaagtgtatcaaggaggatgtgattggctgtgtcaaatgttgctggaccagtcaaataatatgaagattgagaaatgatcattgggtgtagtgatgaggtcattggtgactttggataagagctgtttcagtggagtaatgggaggaaatgcctgttgggaatgagttcaagtaacaacagaggagagaaactgaagatagcagatgtagataagatttccaaggagttttgctgtcaaggaaagatgattgagatggaaactcgaagggagagagaaatagagattttaaaaaataataataaagttgggagaaagggcattgttggattcttattggcatcactcaccagagaaggaaaaatggatgatgattcaagacagtggaagagacagagagtgtcggtcagttgctagcctctaatatgatttgtttaaattacagtggactcagccctgcaactgctcatgtcccttcctgaccccttcccatcttgccgtatgttttgactaacagatggtacatttatgagaatgaaaagaggcccctaatccagacaggtagccaacactacctggattttaggactggattttagccttcacttgtcctaaactaggtgtctttgggtacagcaaagtaatcatactaccatagcttctctgcttagtctactccaagacaataggaaaagttatttactatcctgcaatagttaaatgtacactttgtcctatagttaaatgtacactttgtccgatggcaaatagcatgataagtgggaagagagcacatttaagaactaagaatttggtgtgggaatccaagctcttctatcaactggcagtaaaatatatttgaggagagtttaaggcgtatgagtcgtcttaccaacaagtaattatgagtttagattttatttgaactatctctcttgtttgtattttataaagtaatggtgtgttaagcgcagtgcaccaaaatgtaactaagacttagtagcacctaggactcagatcttggtttttcttacaacattcgcactgaaaggaaccctggctctttggaaaaatgtttgattccaaggatgggattccttatgccaaaggaaggaaatgcttaaaaaaaaaaaaaaaaagatgctaacatgttgcaaggatataggagtcattttgaaagggttccccatcagccaaatctgcaataatttgggtatcaaaataattaaagtcagtaatgacttataaagcattgggaaaaaatgagaccataccagtaatacttctgtacatacgtacaggcaggagaagaggctcaaggggtaactgttaagtgtagagaaagttctagaattggaaaatcatgattttattgctgtaacagaatacctgagactgagtaggttataaggaaaagaggtttatttggttcacctgatgggcatctgcatctgttgagggcctcaggctgcttcaactcacagtggaaaggcaggcatcaagtgcaaagagatcacaaagcaagaggaagcaagagagagaaaccaaggaaagccactctttttaacaatgagttctcttgggaactaattcattcttgctagagtgaggactcacccctgagggagggcattaatttattcatgagggatctacccctctgacccagacacttcccaacattgccgcgtttgggggtcagatttcaacttgagttttagcagggacagatcaaaccatagcaatcacaaatggatgctaaatcttgggaagaaattttgataagaagcaggatatttgcctggtcttgaagtgtctgtccaaatattgcttattggttgcagggaaaagatagtaactaagcagtaggaaaattggatagcagtttgtctggatgatgaaacttaacatcaccaatgaggtacaggtaggtgctgtgtgcctccaaatgtgataccatgagaaggacacatactatttcagccagacacctactatttcagccagaaatgcgttacatgaatcaaatcatgagsaaacatggcaagctcaaaatgatgagcattttttaaaaaagaagactagattctgcaaaaaacgttaatgttataaaagttaaagaaaggcggaaaggacccatattaaaggagaataaagacacaggaaataacgtggttccaagactgggtcctgcatcggagaaaaattaattttttaaaagggtattaccgaatcagttgacaacattataatacaaattgtactttaaagaattgtattaatgtatttactgaaattgtaactgtattgtratttataggagattgtttttaggaaatgcacactgacatgtttatggggaaaaggccgtgtgcaactttcaggtgactcagaaaaaagtatgtctctatgcatgcttgcaggtttagaggggtgtgtgtttcgggagagagaggagcaaatggggcagagcagaatgctaatggagactgggtaaagttataccaattttctttgtacttttcttgcatttcctctgtaagtttgtaatatttccaagtaagttcatacacacatgcacatgcaaacacattggggcttatttcttttatacttattttacttcttattgctctagattgctaatttacctttaacacttccctggttttaggatattaacattcattgctaatatatgtacatactgatttttaatttcttttaaatagtgctgggcctaaaggagataacatttatgaatggagatcaactatacttggtccaccgggttctgtatatgaaggtggtgtgttttttctggatatcacattttcatcagattatccatttaagccaccaaaggtaagaagcttgaagtgcattctttagtatttaatccttctcctctaaaatcggttattctagaacttaaatgtgtattgatgcagttattttgatttcattgcttttcatggattgatatggaaattttcgcataatcaagaattttaaaacagtaattgactcctttcacaaataatttgtaataaacagaaagagtttaattcttaattgtaaataaaactataccttgcacatcaataaagcagataaattttatgcttatgagggagaagatcctatgaaccttcattaataccttaattaataataccttaattaactattaaggtattaatgaaggtattaggataaaaagtaaaactgtttgacagcttccagaaataagggtttaataatgtgaattttgtgctgaatacctttatagataagcaaaaacttcatagccaagaagagggaaactaataatatttagtaaactcattttgtaccttctgtgggtatgatgtagtagtggaagcagaatgcctgagttttgttggctctgagttcatttgaagtatgaattagatggataacagagaacggggtgagttgtgccttctaatgaccatcaactttgcaaagcttaaatataacaattacttgaatggctccctccgctaacttctgtttctacaatggtcaagtcagcaggtaaaaaccactggaattaagcatgagcattattatgctgttgttacagagatgtctgacatagcaggggaaagtgtattttcaagtccatagcccttaactatggtgaaatgtttttcttttccaacatggtgacttttgttctctgtacttttaaaaatttatgttgcagtctataccatttaaaatttatgtagcctgtgtgtatatgtatatgtgcacataaacggatttattttgtgaataaaagagggttatttctcagtaacttattgtctaacaaggtaacgagtgccatctagtggtatttaccccaaaccgcagacaccatttactctcaattacagctgttagtgtttaaagtgctttaccgtgtggtcccatcagcatgtaagatcttgaaattatttttgcatatggggaagattaattgaagaaaaagactcttaagttttcctggacaccttttaatgaaaaacagaaattggctaatataagaatttcacactatatagtactgtataygatttgccgtaattttgatgaatataatgattataaatttagcatgttggttttttgctgaaattgcaatatatcatctaattctttagtgttcactctgttgctgagatayacagtattaaccattaagatctatagttggacaaatgaaaaataagatttctggtataatcttggtatttggaacaattatttctctgcaatgctaaatctttttgaagtttggaaaagttgagcttcttgaaggataataaatatttaatagaaatctgctcatgaatgctattctgttcactagttatagctgaaaatatatttgtaaatcacatatgtattgagcagtaacgtcagtgatctgaacataaattatttctatattctagagcagcattaatggaaatatagtaaaatctacatgtataattttaaattttctaatagccacataaaacataaaacaattttaatactatattagttaacccaacatattaaaaatattgtcatttcaacatgtaatcmgtgtaagagtattgttaatgaaatcttayacattttctttttggtactaactcttwgaaatctggtatttattttacacttctagttcgtctcaattcaccttgccacaatttaagagctgtatatgcacatgtaactagtatatgctgtattggtcagagcagttctagaggggcatactctcctcctcccccactaaactagtgtgttggtcccctaccccctccctgtcatgcattcttttcaggaagacacttttgagagcatttaatgttttcctcccagattcaacttttgcgctcacmgtacactgctagttttcaaatgatcagaaatttttttttttctcggcaactccarttatgaattagctatccarttagtgtttgtgattgttttgagacttggcagtgtttgttcttatgatttatcttcttttctcacacatttcagggatatattagtttcctttatccagtagctaaaaaccttgtttattttattttaatattttagcctaacaagacagtgaaccagctgtagaaataaaaggctaagaaacagaaaggcaggtagtgtgaatgattttaccaaccgtcttctaaatcctccagtattttctaacgtttggtaagaaattagctgaattgatactgatcttttctagtaagaaactgatgtaacttttatgttttaaaaaaaaatcttcatcagttcctcttaccttcggcaccaaaacatttcttttcttcctcactttctgtctttctgtatgtatgtgtacacacacagttgtatatgctgtggatgtgtatgcaaacagacrtacccacacacatagatggaattactgtatcagttatttaagtataactgatcagttcctcactttagttctttctatacagggtaaaaacaaaaaatttttttcaactgagtcaaaagcatttaattttgttattaaacctaatctaagtttagctccagtcaaataatttagtatcatctatgatatattacccttcatttttttttagtgttttaattggtaatacagcattcattttccttctgtttttaatgtgactgtgcttaggttactttccgcaccagaatctatcactgcaacatcaacagtcagggagtcatctgtctggacatccttaaagacaactggagtcccgctttgactatttcaaaggttttgctgtctatttgttcccttttgacagactgcaaccctggtaagcaaatctttattaacatgtacaataagactacaaaaacgagtgctttttttttttttttttttttttttagttagctttaaatgtagattsagaggtaaatgttattcatagaaagatccccataaaacagtttgtgaggaaattaccaatgccatttgaagtagacyaggccaaaagtttctcaataccttcatttaatttgttaatggcataccactctataattattttgtcaccrtcattaatggaatctctacttttaaaagtatttaggtgcacagaccacttctaacaagagtaaagcaatgtgtctgaaaccagtgcctccttttcctgctccttccatgctgctgtatgcttttagcaactactttaataatagaaggcttcttgttctcccttccttttttaattaattagttatataaagtgtagtagtaatggatattaaaatgatagccaatgagaattgaactagattatgattatataacctcagataaaatcatttgtgtataattcataactttaaaaaatgcctgccacatgtgaacttcagaaacttgggtagctgacttgataaagtgatgtttagacctgaaatttcacacattttgtttcgttatgtgaccttttttttttttttaagttgacttacttctaaatatttgataagtcactaaagactgttactgttgttaccttatgctcggcagagatacatatgcaatagatagtgacagatggatattcattgtggtatcctttattagagtattggaaacaacctcaatgcccattaatagatgtaacgtttaaaaagaatgtgacaactctatatgaactaatagggaaatatcttcaagatatattaagtataaaaggcactggaaaaaaatacatatacacaacataatattctaaatgcttgtcagtgcatgtaagaactctgggaagtaatgttgtaaatgggtaacaattgtttgccagggaaagaaacttctgagcagttggagtcaggaaggaagatagtttttttttactggctatggtttggtacaattcaaatattgtaccatatgtacatatttttttgtttttaaacatcaaaataaaaatttatatcaggttcactctctagttcagaattctacttaaaacaaaatggcaagtaagttttcaagtgtaaatattgatagtgattagagtcatatcaggcacagaatgaaggaagcattttatttgaaatagcatggtattgtaagactggggttttattttaaaattaaccatttttgaactattcataagcagaaatataaccrcctagtatacttccattttgaatgaaaggccaaaattacaaaatagtttttgtatattaaagacatatcttttataaaagtcaaatctaactttttatatatagctcaaaattcatttttttttttatgaaggggactttcctaactkgaatattaaaatatacrtatgatcatgttactttaaactttttcttttgaaaatttagctattatatatgaagatactgctgaaaaataagcatttcattttaatagaatattagaactataccttgaagaagataccacaaaatagcttttaatgttctttctgcttttccagcggatcctctggttggaagcatagccactcagtatttgaccaacagagcagaacacgacaggatagccagacagwggaccaagagatacgcaacrtaattcacataatttgtatgcagtgtgaaggagcagaaggcatcttctcactgtgctgcaaatctttatagcctttacaatacggacttctgtgtatatgttatactgattctactctgcttttatcctttggagcctgggagactccccaaaaaggtaaatgctatcaagagtagaactttgtagctgtagattagttatgtttaaaacgcctacttgcaagtcttgcttctttgggatatcaaaatgtattttgtgatgtactaaggatactggtcctgaagtctaccaaatattatagtgcattttagcctaattcattatctgtatgaagttataaaagtagctgtagatggctaggaattatgtcatttgtattaaacccagatctatttctgagtatgtggttcatgctgttgtgaaaaatgttttaccttttacctttgtcagtttgtaatgagaggatttccttttaccctttgtagctcagagagcacctgatgtatcatctcaaacacaataaacatgctcctgaaggcatagtttcctgtcgtaatattttaagtcagtcttgttagaaagtgtgtctgagatgattgttgatgaagtaaaaatgtggctatgaagattactaaagactagcacaaataaacccattcttaaattgaaaacatttaaaatcctattaaatgcatagagtttttttcctttgttattgaaagaatgaccttaaataatcaaaagtggattttgacccattggtctcaaacacataaagttgtacttcggtaatatgatgtttaagccaaaaagaatatgaaatcctggctcgctcactcaggaatctggtaatgtcttatggaacatgttgcttccaaattgatgatttttgttcagcactgggcaatattgtcagatggtaactgtgatgtggtagctagtctgtgatgcactttttacttctaatcctggtcttgaatgttcatgttgtgtattaccattcttactatggcaagtggccagcaaatacagccagaggcagagatgaacacagaaatctttgtctgccttgaaggtagactagaactgtgttagtgtacagatgtgatattatttctcaattggtaaaataccaaattgtaaggtttttagaaggttaaatttcttctttctagttgtaattctgaagtgttagatttcttgaaagttagaatttctttgcaatatttagatttgctaaacagagtataattgtgtgtggtggtggtgttttgttttgttttgtttccctgtgactaaggtaatcatctctggtcatgtaaccaaggttgtggtatatggggcaggtgtcttctccagtcctcaatatggaaatgaagtatcatcttaaaaatgtatagagtgaaaatattaacataaaaaatgcttccggataaagtaaaacgtgtagttgtgtgtgtcactagaatagcagactcctgtttgtcagtagaagtcttatatcagagtaaaattaaaattacacttacatatctgtttttcacttaaactccccacccccaacattattacagaggagcactatacaaaggtactattttgaagaattcagactttacctctgtgaaaacctaactaataatttataatggagtccaagtgaatgtgatgcaagtggagaccgtttaagttgtaaggttttttatcaaccgtagtttttcctccactgccaaaattgtacattctacaccctagagtaataaacttctctcttggtgctagaaaaacttaaatcatactgaatgttgggatgtttggggatgctatgattagacttcctttagttaccatgagcctaattaccaccgccaaactattttgcttacttgttggctgtgtccatactggtgtgggataaagtggagggaattggttacttaaaatatttgcagctcttccacaaactaccattgtggccttaaataagacactttaactctttgagttttagttggtttatatatgagacagaagagttgattggataatttccctcttctctgttgaccctcaagctcagtagttttaatcttgtaaattttgttgtgcttgtcctgctttttcttttggggaacaggctactctttgaagtggactagtagtatcttggtgttctaatgagtagatcaacctatgacatgagagccactgcatgccagggcactgttcagtcactgatgtgccttatctcatttgagacacctaaagaggtttaggagagcagacactgatgaatcttagttgacagttgacagtgtgcatagacaagtttaaataacttgctctatattacacagccaatacgatacttcctctccccctgcaccttcatgctttcccgcagtttttgtttataacgtcacaactttatattgaacacgcgcgcacacacacacacacacacacacmtacacacacatacacaagttataactgttccctataaaagtagatattcatagattatagcttctggagtttataaagtacaatattgcattttagcaaatctttattttaatattttattttagtctcaaatggaaccttacaaaatataactgctgtttgcaatgaatatgaggtaggtaggtttgtattctcccttagatatttgtcatagaaatactttcaatatcacagatttcactttatcagtttggaaaatgagataatgttatttcaaatttatttaaccatatattgcataatcacattagaaaatttatattgataartaaagcaagcatttaataaggtggtgttttctgatgcatacttaaagaacttggagtctgccccactaacttgtctaagtgttcttacaacaatataagaatgtgactgtatggtaagatttaagtcaatttcagtcctgtgactttagatagtaacctacattatagtgatatacgtgcaccacattaacacaatttcgttaacatttacattgtaaattmtttggacagaattatggcatgatgtgaaacgtcaattatttttctcaaatgtttataaattgtcttaagagagtgagataatggttctacataagcattatctacttatattccagttagtggtctttattttaggtaaatacaatatacaaataaattcatttgtttcatatttaaataaattactaaattttctcaagtaatagccaagtaaaaattacaattacattttagtagatattcattatttgaaatgaaacaaaatttttctaactagtttgtcaattttttcttgtaaagttcttcagtgatttaaatgtgtatctgcaatgtgtaatgggatgtttctacagagtaaactgatagacctttcaaagtggctataaaatgaatgactaggagtgacatttataactgcattgctgatagtaataggtaatgttaaagcctttgtctttgtcaaacagaatcaatcttgttaaattagaaatgaggagtgatcctgtaaggtgtatacctatcatatctaaggcatacacacacaagcctcacttccttctttttctccctgactctcttacgagagctcctaaactcataagcatttctcttaagggaatgtccttggaactccagcagtatctctcttacttcagtttaccacctgctgggctctcagcttctgtggttctggtaattcatgtaacaggaagcccaaggtgatttttaaatagcaacatccaatatattaataagaccatatattgaaaagctaagttttgaaaaaaaaaaaataagcaatacattacccagattcaggcacaagtacagtataaatagtctttagtagtctttgttgttaatttaactatacatgagaaagagtgattaaaccatgattaggcagcagagcrttggtacctagtcctggatatattttgaagtaaacagaacaatgcatagcaaaaggaatttttgacaaatgtaggtattatcattgacatgtatttacagaaatttaagttcacacgaaatcttcgtatctgtagggttaccttgttgaaatctggtgaagctaaagacaattacgcaagtcctccaaacacaggtcactaaaagcaacttttttccccaaatcctccaatctctaatccctaaagtttatctcaagtccagctcctttgatggaaacctttctgttacactgctctcacatacctgttggtctgtttctctgagatgccgtcttcacaaacaccagaaataataaaagggaatcaagtatatgcatatttccaagtgccaacaacaagccaggtgccttcctcaacaatgtgtgccctaaagccaggaattctttttcctttttcttttttctctttggaaggaggtagggggagatgaaaggtggttatgctatataactccttagctgatcttcactttgagtttatctgctctacaaatwttatgtgtttgctaattacaaggttctttctggcactgtgatacatacagagatgaatacattttcacatccttaaacagtttatcatttccctgtccagatagacttttccctttgctaatgtatatccatttttattgaatgacaaactgaacagatgttcctgatgatttagcaatgaaaatattagtataatatttagtaagttttactctctatatattaaatatgcttaatactatttgatgcttttaaaataattatcttaaactacacttagtaccctatgtttctagcatgcgttttggcattttattcagttttattccatatccatatttctggataatgagcttttggaggataatatctatgctttgtgtctccttatttcagtatctagcccaatatgtaacatgatgtatgtttgctgagtgaatgataattatatcatgggtgtaagtcttctccataaggttatccagagaccatgtgaagcatatctgtcatgtctcctttaattccccatgttgattcagtgctttgtatgtggttggtgccatatatatttaaattgttaaatttgaaactgttaaattgaaatatgggaaatagcaatgggttgttcatataacctacttaatgacaatgtgtttaaaatagagactgacttaatcttgtaattttaaactttccttaaattcaccagaatattttctgtcctacaaattttacataatttctcattatcattactgtcttcttaatggatatttctcctatccttttttattggtaaaaagaaaacaactaaatacatgtatctgcttgctgtattttaaggaaatctaatagaagaaatggaaactgatggcctttgagaacatcttttaagataaatattttagggaaagggaactagtataccatttggtaatgtggaacggagtactctggaatgttggaagtcgtttattgaaatatttttcaagtctttttgttttctgtatgtgtgtgtgtgtttttcacttctcgcttctgggagaaaagggaaatggagtaggatgaagagtcacagggtcatttttttctgtattgccccatgttatttctttgccagtaggttgaattgaaaggtaactgggtaagaagcaccctagtttyagaagtataatttcaacaacttctattttgtctcacaccatgagtatttcttaagttagcttagcaaactcagatatgttggctgctcccaccttagtccaagagaaggaaaaggtaaatctgtgaaggaatgggttgccgagaggtgtgtggtactaagtcctgacagctaggggcccaggtctgtaaggaaagtcagggattctctagtgattgagattggggtagttaggtcttcatatgagcatttcaagttttcatctacaaagtgatgaagaagagtattaatttatgagataaagagtatgaggggataacactgtagggctttcactggcaccccttacctgattcctttatcatcgtttgaagagcactttttagccctctgctaaactcttgctgtggtcacagaactctcaratggtgaagatcattttaaatatgcatgagacaccatgttttttcttccatggttatttttttttaaggacatatataatgttttacttgtgtatgtatatcatctcaattatgagcccctagaaataagggatccaatttatttcattcagtaagttattagttgtgtacactggaatattggtttgggtgcttaggattagcagtgaataaaatacacgaaaattcctacccttatggagtttactttcaattgctaggagacagaccaaaaaaatttaaaagtgtatatatatatgtgtgtgtgtgtgtgtgcgtacgcacacattctcacacacatatatgtatgttagatggtaagtgttayggagaaaaacaaagtagggaagggaaatagtgtgtgcagtgagggagaaagaaaggggaggttgaattacagttataacaagggtagtcggggaagacctcacctaaaaaatgagtcaagagctgaagatggtgaggaataagccacataggaaragagtcctacaggcggagggaataccaactgaaaaaatcttgtaacaagagcatgcccaatgcattcaaaaggtagcaagtgcttaggagggctggagcaggtgagcaactaggagaggaataggaggccaggtcaagaagatgacaggtgggcagatcacatagggtcttgtatttcattttaaggagtttggctagtattctaaataagatgggacaccactggaagctgtttttagccaacgagcaacaggacatgatttattagaatctgatcagtcagagaaaaacttgctgtggggctaaggaattgggagcagggggaccagttaggaggctaatgcagtaatccaggtgagagataccagtgacttcaacctgggtggtggcagtgtaagtagtaagaaaaggtcaggttctggttaaaaatagagctaagaagatttgctgatagattgaatatgtggtgtgaaaaaggagttagagtttagggcctgagcaaactagtaggctgtagttgtcattaaccaaggtgaaaaactcgagggtgaagcaggatagggagaaagattatgagcttagtttttgacaggttaagtttgaaatgcctattaaacatccaaatggaagtgcaagattggatatacaaatttggaattcaagagttctgggccagggatgtatatttgtgacacgtgagtgtgtagttggtatttatagctgtgagacctatgatcactcactcaagggaatgagtgctgctagagaagaaagaagcttaggcactcccagcattaggargctgaggagagatgagtcagcaaagtaatccaggaaggaacgctcaagaagtgaaaggaaaatcaggagagtgtgataacctgaaagggaagtaaaaagtttcaaggaggtgggaatgatctaccccatgagagactactgataagccaaataaaataaggacctaaatagccattagcaactcaggagtcctagacactggtgacttttatatgcaattttgttggagcaatgaaattaaagcttgattgaataaagtaacaaggaatagagaacttggagactcctgacaattttgcagtgaaatagagaagtagggagtagttggagtttctttaagatgggagaaattacagcatgtttgtatattgataggaaagattagagaggaggaagtggatggtgtaggggaggaggagcagtgtccttgaaaaagttatctgctacataatttattcagggtgttttcaaagttctgcactaccttggacatctgtctttctccctgactagagcagaagctctttgggaagtgcagcatccagcacttacagcagcattgtcattcaccaaattcttgagttcccctagataagcaagaggggataggatctagtacaagtgaggtgtttggcccttgttgtgaatttgcagaggacatgggcataggtgagattggagggtagatgtggttcgtaggaagttctttggtagcttctactcctccatgaaacgagatgttattggctgaaagtgagaatggggagacgacagttcatacatctgtgtgacccattaatgtccagcagagtaactagtcgtttgtggtcaagtgtaaaaatgaatgattgagttgtctatctggatgagcctttcgtttatttcatagttaacatgttaatgaacatgcaattaaaacatccatatcagctcgaatggctcctctttttcatcaggtatggtttagcagttgtttgaatctttagcaccttaatttttgtttcattcaagtgattttcctgaagtcattgaagaatctaccttgacaccaattttaactagagaaattcaattatttgctgaaagttaatactgctttaaatgctggacacaaaaatagttacgctgtgtttcccaaagaggtcatcatggtctagtcaggaagaggggtgtccaaggtgagttacacagagctttggaaaagcctcagtggatggtgtggcagatgacgtccctgagtttgctagaggaaaaatgactctagaaaactgagtattcttccctgttctattttatggatgtggtggtcagagaaggacatagtgaccaatttctgtgaccctcacttccaccattggtcccgtggcaagactcagttacaagccttctctccctttggattgtacctcactcaggaagtacggaatttgaagatcagatttcatttccagaaaatccataaggcagtcacagcttakgaccaaggctcacacctttttttctgcttacctttccctgctattgtcctgacttcttgcctcccaagattgatatgtaagaagtggggccatttttttgcttttctctgaaaaactagtcagcaaagaggttggaattttaattggtttaactacttaacttagaaagccaagagttaaatayttagaagtgaaactttttttcttttcctgattgggtctttctgaacaatatttttgctgtgattattgcacatttaagcccaactgtactttttatctgaaaaaaaaataggatatgactcttaactgtcgtaagcagattacaataatattctttagaacacgggtgtctaatcttttggcatccctgggccacattggaagaattgtcttgggccacacattaagtacactaacactataacggtagctgatgagctaaagaaatggcccatgcataaatatcataatgtaagaaagtttactaatttgtgttgggctgcatttaaagccatcgtgggctgcaggttggacaagtttgctttagaatatttcacatttagagtggtagttgctttctttttttcttatttctgaaggaagtcatgtcttgattctgttctcttccttccactcctactgtctcattcaggcccttggttattccttatctaaaggaatcttttaaaagttatcctcttgttcatccaaacaacaccaacccattcttcacaccactatcacattaatcttcccagagtaaactgtttatcaggacagtccctgcttcaacttcagtggttgtctgttgtttactgaataaactccacactccactttctgtcattacatcagtgtactccctggatgaagcagcatctatttcagtagcagcttcggatgcattcatttcctagtgaaataccagagtcactcttaccaggggcagcagttccgtatatcactgaaacatatttcctcagagaaagtgatagtgactcattgagaacatttccttaattcaccaactcttcttcaaggttttctgttcataggactacaactctttgatgccctgacgtttttataattttactactagcagttgaatgtattgatgcatgtaaccttgttgctagccatgttaagtttcaatcaagcatcagaaaatggtttgcttaagatacttggctaggcacaccagtattttaaatgtgaattgatatacttggtgcttcaagacagatggtgcattgcttctgtgcctaagagcatttggcagtgctgaaattgagccttctgttcgttcaaaataattcactgatgagtgggcaactttatacttttttgagggtttttttttttttttttgctgaattcgagtattggaagtgttttagcttacatgttagctatatgtaagtaccttcaaaaaatgacactacaggcataggcaagtacataatcgggataagtactgtatatcagtttgacatatggtgccacatgtttttatttttattatagtgatatgtttctagtaagatttacaagatatttgacccttcaacaacacgggtttgaactgyacaggtccacttaataatgcagattttttttcaaaatgtatcagaaaacttttggaaatttgtaacaatttgaaaaaacttgcaaaccatgtaccctagaaatattttttaaaatagttatgtcatgaatgcataaaatatatgtagatattagtctatttatgtgttaacctacttcgttatcadactcctggtccactgtaggctactacttttggggagtcaaaagccatgtgtgggattttccactgtgtggcatcacccccctgtgttgctcttcaagggtcacctgtttggccactttggccacatttaaacatgggcccaaacttttcagatttaaagttaacagactgatgttagttaagctcagagggaaggcttttcaatgaagtgagtttaagagatcagagaattttaaatctcatgttggtcacctttcctgtttcatgttgttaatacttctcctcaggcaccttgctaaaacagcgttttcttatttaaggcctggctggactattgccatgaatagtatctctgaagtctgtatttagagaatagcatctctgaaatcctatatattgttaactaaaattagaaatcatttgtatttcttttgacttgcagcttgttagaggcttcttagtcattagctagaaatgtattttttctcttcatgtattttcaaagaaggatttatgtaaccatgttgtcatttgggaggcactgagtgttaaatatcataggatgccagaagcccacaagaagataagaacactccagtgaggacctctgaagagaaacagcaaaagcatctccatcctgcactgagttgtgggttattattgtcatggaggtgaataaaggatgatttaggagatggtactataatgtggaggaaacatccagcccatttatggttcaggaaaaaggtttactcctttgagcttggttgggttaaaacattgtattgcctactctcataatgctggaagtataaagagatcaataaagtttcctcagattctgtaagtcagacttggctctattttcttaacatttccagggaagtcaagatcacaaaaagtggttgattctggtggtgggaatattgatattgattctataatattactgtaaattctttctccgagattaaatatattgtgcacaagtactctgaccacatctctagattcattttatgtaacctgctcatggactgatctttgaatagccacctcttagaatctgcaactttggacatgtctggaagactcatttcctgtctaggacctggcagcatgtcctgggaaaatggaattagaagacctatttaggaggatacacaaacacgtgccccctcccccctgcaaacaactagtgaattatctgagaatcactggaatctgcttcttctgcactgtagggacagcagccttagttccaaagttgggatcctgctgggaaatctttaaaatcaccatctatagagcatacccaataaaatctatattacacttatacaaaaactaattaccaagggttggggcctaacacattttgacactttctcttgaaagaaatgaatatggagatcacaacttttaaatgttagttatatttttggagtaattataggtcattgatttatcacaatagttttttagtgagtaaaacacttcaataataattgatattttaaatctgayttctgggtctttagaatactgaattccagagccagaatagtttaattaatttaaccaccagcctgtaatagagtaagctttcaaatgccttatttgctgccttgctctgtagcaaggaatttttttctttttacttctctgggcctgaattttctcaactatgtaattgaactaaaaacaatgaacaacgctgcagaaatgtagtgaaaggaaaatttacttcgtggtaaaacagtgggcagtgtaaagtatctgaaagacttttaaagcaataaaatatacaattttaaattgtatggataattatgcatttgagtgcagcatgaagcttcactgttagaacattgtttttgcttgtgctaataggttgtgtcgcatctttttttgttgtttttttgtttgtttgtttttgtctctgggctctgaagattgaagtttattaattgctgagaaggaaataagtgagtatatttctttttaaaaatttaacaacaccatcagtggtgcatatttatttaaggacatttggttataattaagcaacatggctgccttaagattattttagggccaggtgtggtggcccatgcctgtaatcccagcactttgggagactgaggcaggaagatcacttgaggccaggagttcaagaccagcctggggaacagagcaagacctttatctctacaaaaaaaaaaaattaaaaattagccaagcatagtcagcacacctatagtcaagctacttgggaggctgaggcaggaagattgcttgagccaggaggtcaagcctgcagtgagccatgatcataccactgtatccagcctggatgacagagcaagaccctatttcaaaaagaatatatatatttttaggattttacacttgagagctggtctaatgatttctggatgatgattcttatttccagacataattgaaagagtgaattaaagaatttagcattctgggtgtggcaggaacaacgtcatacacattcttggcgagaaaaatcatacatttcctagttctcgaggatttcttttagttccatgtttcctccaggccaacagtaagatgttttcacttttctttctttctttctttctttttttttttttttttcagaagaggtgtggtggaaaggtcttccagaaccagaggctaagcacacagcagtacaaatataaattctttattccagcttccagaattcctcctcttcagccttgcctgctcactggaataatgaagcaattaaacagtggtgtaaagaagttccatccagtggttgaagttcaatagaaaacaaggaaataggctgatgtatatcaaatacaccatcggcactctgagtccttcccaggttccctaaagggggaggaggggacaccgttttagatttaatttgtactgtacctgatatgattgtgataattttccaatgaataattgttaatcttacctaattaaaataattatatgttaaataaaatatgcagatgttaaattgacttcctcctggggccacttagcatttatttcttgttacctgtggaaggacagaaagcaaacacagaagccatgtttttactgatgctgctgcattgggaaagcccagggtaatagaaacattttgttttatatttttattccaaagtaaatacagtatattaaatgagcaggtttaaataaatgcttagtgacatgccaaatagcttacatatatgcttaaaggagctttccttctggaattaataaaattctaaccacaaggaggtgcagaagttaattcaagggatgtagtggaaaccctggaaggcttgcctcctatgtccccttccctcatttctcctcccctccccttccttcttcctttcttccctccaccgttgcctgcattcactataaaaagtaaataggaagtgagcacataattacatgttgctcctttagattctgaattagtgggatattttttgggatctctcaaaccacaacatgaaacagtttttcaccactcccacctctaatattccgtctttttatgttttgtgaattggcgagtgtttctaattgaacaagcaaaacttaagtatacaagaaatgtacatttatttaatcttttaaaaatctttttcttgatgccttgcataaaaaacaaaaaggtgctttttctttctgccccatcagaactgtggttatttttgggtgtgtgatatcctttcacacaccatgaatctccactagatgtcagtgtgtcactaaatgaaaacagtttagcatgctctccagacttgttcttgaaacgtactggaaaggtaaactcatttatagtttttaaccagaatgatacagagatgttttagtaggacaagttagtaataagtggtatttatcctaatgaatattaataacaaatgaaatcttctgcttaaaaaatccagtatctttcatctgaggatgttgaaatgcttatgaatattcttgcttttttgccatcatatccacaaagaattagaatgctaataagatcttccttttacagtagacttaacctgaattgcatggggcaaaaacgataggaccaagatgaatcacagtcgatgtatggtggaaccagactggtacttctttcattgcagaccctactctacctagataatgctgcctttcctttggtgtttatggtgtacttagatgcagatgtcctttgaagaagtctgtcatttgtattaatgccttccttattcaataagctcaacaagagtggaataagaacgatgagatagttggttaagttactgtggggatgtttataccagaaaacttaaaaagcaaagtgtatacaggaaaaagtactaaaattacttgtgcaaaagacatttgataataactttaaattgttttatgcagatttgagaatctgcattcataattttaagattttataatgattgcataaaaataatgctaagcaaccaagaagataacaatattttacatatactcttttagggacagtgaactcaaactaaagagagcctcgtattagttcatttactcaagtggagaaggaaggaaaggaagttgtaatttggtctgatggttgaaactcttaggtctatgaggattatggtgtaagttttacactgtataatttccttaaagagaagtctgcataaattctttatattaggccttaactagtgatttcctctaaattgtatgaatacacaggttacaactatgtaaaaagtatgtttgtgaataaagattaagagaatacatagaaaaaaaggttagagaataacctttctaaaaaggttggaaaataaagattaagagaatacacagaaaaaaaggaactatgggtaaatataatttcctctttatttggcaatattgtttttataaatataaagggaaaaattgtttttcctttattgtccgtgttgtaaaaatttgccacaatctcaactttagaagggcttactcatatcattgaggtgcattgtaaacaattgtaattcaagaagataggcttcatgcttagtttgtttaccagcgtttcagtttaaatcataaaaatcaaagtagaagtacctggtcagattttcaaactttaggtaaagataaatgattgcccaaatcccagcagcctctttgctgtagtatttagtgcattattggtgttcagtaaattttgatgaagaaatctttaataaatgaagccatccttagcttgtgttttcattttaaatggtttaattttaaaacagttactagcaaaatcaagagaataccaaaattaaaattgctatttattttgcatgcttggacctatatttagatgcagaacttgtattataacaaatcatgcatgcatcagattgaagtataaaatggtagcatttcatatatagaaaacttgtactatatgtcttattcaagtaataacagtatagtcaccattgaattatgcatgaaaactttatgaacagaaacacaactggtcagtgattatcagaataggctaaaaaacttgtgtattataattggctaaaaaactttaaaaaccatgccaccatctccatcctataatcataatatttggaaacttggatttccagatttgggcatagggtgtatggaggaggcaggagtgtttgattccaggactttccagggtactgtaaagtgctgatgtgtataggactttcaaaatcaccccaacccctaggtgtatatttaagttaatttttggactcttgaaaccactgcaatgttactggctagaccacctagaatactgggctcatactggtctggggttatcagatagttgaagaaaatctaggtgacaggtcagtggaggtgaattctttgtgcaatcatttcttgtttataaaggaaaggagtcaatatattcatgtctgatttgtagaatataaaaaatccagcccccacaaaaccttgagttactccaccagtttctcactctgcctagaatctcacattagagagtcattcaaggaaaaatgacagaaaaaaaaatccagtttgaaaatgggcagatgatctcactagacatttttccaagaagaagacaaatagccaatgactacatgaaaaagtgcccaaaatcactaatcttcagggaaatgcaaatcaaagccataatgagatatcttctcaccccagttataatggctgttatcagaccaatgaaaaacaatgcatgctggcgaggatttagaggaagggaaacactcccacactgttgatgggaatgtgaagtagtacagccattctggaaaacagtccagaggttcctcagaaaaactaaaaatagaactaccttacaatccagcaatcctacttttgagtatttatctgaaggaaaataaatcagtatatcaaagagatatctacactcccatgttgcagcactattcacagtagccaagataatggaatcatcctaagtgtccatcagtaggtgaatggataaaatgtggtatatatacacaatgcagttctatttagccataagaaatacacattttcactcatgtaatctaaaaaacatgatctcttaaaggtagaagtagagtagaatagtggttactagaggctgggaagggcaggagagaagggatggtagggagaggttgcttaacagacataaaatattacagctagataagagaatcagttctagtgtagtgtttcatagcattcttgagggactatagttaacactatttattgtatattttcaaatagctagaaaagaggactttgaatgctcccaacacaatgataaatgatagaggtgatggatatgctaattactctgaattactctgttaattatactttgtatacatgtatcaaaatatcactgtaccccataagtatgtacaattattgtatcaatttaagaaaagcctcatgagataaaggctttttatagaatatatatatatatattctatatatatatatggtcatctccagaaatctttttaatgccaatattatacgaattcaaagcacattgaattttaccagtaactatacactaaaacttattagctcatagaaatcacttcctgtccctgcgcctgcctgaaacacgttgttgggtaaataaggattttggtatgggagaggggagagaggcccagggcactgtagctactgcgggacaggacaggcccctgggggaacactccctcagaaaacaggagatcagcatcctttcagtttccaacttggacttgaaatcccatagggaccttcctaaaatgtagactgattctgtagggctggggcagaaaagtctgtgtttctaacaagttcccaggtggtgtctatgttgctgttatgggggaacaaacataatctgattgtccatggcaagccttgtaacccagcacccagaagtcctttaaaccagaagttctagcacttcagtgagactaagaatcacctggacaccttgttaaaaacagagatccctgggccccatctcagagattctaattcagcaggtgagggtcacaaatctgtattcttaactgctgatgctagggccaggcttcaagtagcaatgctttagacgagacattcccaagccatatgtgcaatcctgacagagcacctgatattccaatatatccttgagttctaagttataggtgttttgtgacatgctgcaaaggtgagcccaacattctcgtttttgccaaaataataattatccagaagatctttccattcaagctctcaagatgtctttcgtgtcttttttagctcagccactaacaggaagataagatttagtactgatggcttgtatactgttatcgggaggataaagaaaagaaattcagtgggcagtagatcatcatttcctggctgtggtgtgttgcattgtttgaaatccacaacttgcttaaggacatttagccagagttagcaatgatactgttttaaatgttgcagacttttcttggcaaaatctttccaaaattgatagaaatattttaagaacttggaaatgtattgaaaaaaatatccataggcaactggggaaaacttcttaaagttattatctccttagagcaatgtttattccattcttaaaggataaagatggagctaaatatagaagtattttaacttcacataaattaacatgagagaaaatttcagtcaattattattgcaatagcttaaaatacaaaactgttacttgatttttgtttccaaccagcagttccctctttattttaatcggttttattttcttcagtgtttctgaatgtattattatgagaaaatatggttatagttccttgacatttacatagcagtatttgataataatctctttaaggattatcacattttaacttttctcaaagattaaagcatattcaatatggaaattatatttttttcatttttaaaataagttttacttctttcattaatatacagttattctatttgagctgtagtgttctgtaatttgtaaaatttctctcagtgggcatgcatttaacaatattagctttccccactggaggtttgtgagagaactaataaagtattccatgccacaactgggtactacaattggaaatagctaagcaaccttggtttcataacataacaacatgtactatttgaaaactacaataataagatttaccaaatattgcttgttagaggctggtctaaatagcaaagcattgctattctgaacaaatctatccaaagcatatttttttccttccataaagtaaaaatctctaggttatctactatattggatggatttcttggataactttcaacgttaatagtttagttacatactattgtatcagtataaaagattttaaaatgagaaatctcctcaacctcatcaacccaattagttgccagctgtttaaccttgggagcattgcttaaccaatttcctttgttatatgttat

SEQ ID NO: 94940 - DNA, 13333 bp, Homo sapiens
ctcaacccagctacacctccagtcctcatctggggaggattgacagtaaatatttcatagaattgttatgaggattaagtaaaccaacatgaaaaggagctagcatagtgcctggcacataggaggcacaaaataactgttttctagtgtgtccatccaagaataatttgctacctaggagcctgttgttggtttccaatactattctccaataacaggagccggctccttacagaagtggctgattctagggctggggcaggaaatatacaaggtgagcctggaacatcttgcagtgccagaaagtaaggaagtcctcagaaagtgaagcaattggggaggtgtgtctcagtcagctgaggctgccatgacaaaataccatagacttgagggcgtaaacaacacaactttgtttctcatggtccggaggctgggaagtccaagatcaaggtgctggcgaggtaaattttactctgaagcctcttttcttggcatggaggtagctgcaatatccccgtgtgctcacatgatctcttctttgtgcacttgttggggagtctgtgtggggagagaccgaattctccagcatgtcttcatataagggtactaatcccatcccgagtgccccaccccatgacctcatcttaaccttgattacctcccaaagaccccatctccaaatatcatcacatgtggggcagggcttcaacatatgaatttggggagacataaacattccatccataagactatatcaaagggccacaggagccaaatgaaagtgcccccagtgcccaaagctggaactatttgagtggcaaaacaaataacgtagtattggattataacccaaagtatgagatgaatatccatgagtccctacagatgttaataaatgatggaataaatgtataaatgacagagaagaggcaaatctcccatgcagaactcaaaataattgatagtctgccctcaggctggagagctacactccctgattcttaactgtgggctacacagtgacttcctttcgaagcgtagaatatggaggagaagaaagagtaactttatggtgcagaaacctgacaaagactagcaggtgatcgaagtccacatcagcagtcataaaccgtgttgatagcaagtatccttgataagataagatgaaaatggccctttaccctttggtcttcctcctgagaactcataaccccagtctaagaaaaacaccaaattccaatagagcagcattttgtaaaatacctacctaagacttcgcaaaaccgtcaagatcatcaaaacaaggaaagtcagacaaagtatcacagtctagagcagcagtccccaatctttttggcaagagggaccaatttcatggacgacagtttttccacagatagggagcaggaggggaggagagatcatttcgggatgcaactgtcctacctcagatcatcaggcattagagtcttataaggagcgtgcaacctggatcccttgtatgcacagttcacgatagggtttgtgctcctgtgcgagtctaatgccgctgctgataagacaggaggcagagttcaggcagtaacttttgctcacctgccactcatctcctgctgggcagcccggttgctaatgggtctgtggctcaggaaatagggacacctggtctagaggatcctaaagagacatgatgactaaatgtgatgtggtatcctagatgggatcctgaaacagaaagaggatattagaaactaaggaaatccagatttgaagtacgggcaatatttaataatggacttcaattaatgataatgtatcaatatatcttcgttaactataacaaatatatgaatgtaaggtgttagtaataggtgaaactgggaaatctatacctccttctcaattttttataaatcttaagttgttttgagtcatgcacagtgcctgtaatcctagcactttgggaggctgaggtgggaggattgcttgaggtcaagtttgagaccagcctggccaacatagtgaggccccatctctacaaaaaaaaattaaaaattagccragcatgggcgtgtgcctgtggtcccagctacttggaagactgaggcgggagggtggcttgagcctagaaggtcgaggctacagtgagctgcgatagtgccatcccactccaacctgggcaacagaccgagaccctatctcttacaataattaattaaaaataaaatagttctgagaaatttttttaagtatttgggatgcattgcagtcttaacattaacctaaaacagtactgttttaaaacattaacaacccaggccagattttagccaaatgggtaaagaagaaagcagcagaagagcctcaggccccactccctccctcagtccacgagcggtgactgtgcttctgccaggcaaacccaaatcatgcagagaaatggagcagagagggagagtagatctacaggagctcctccaggaggagagagggatagaaagaaggaaggggaggtggaggggtccactttgagactgcagggtgacggagaagcccaggacaccatttttgggtctagtggggaagccccatcctccgctgaaggtccaaacaccaggtcaacccctggaagccacaagactgagctgagaaggaaatgagaagcttcccagacagagggacatggttgtccctggcactcattctcctattctctttcatctgtctcagtcaatagatgttgattgaattcctgctctgagccaggccctgtcccaagttctgggagtcctgtgaggaccaagccaaggggctggagaagggggcaggggggagctggtgcccaacagatgagacagggccaaggagacacagccaggccaggtgggcttgtggcctagaatccctgtgcttagcgtcaggaatctgcgtccactcctaggccgccgtgactgctcctttttcatcttatttttcgtttagattcccacggtaataatcagttcctgtgtcagcctcaactgggattcatattgacttgggtttagcmggtggagtcgccagtctatttgcataaatgttggggttttggctggaagaggaaggtggggttgttgtctttcctttgcagaggtttctgggggggaactgaggtgcagaagaaactgggatttggggagagacaagtgctgttttgtagtccttacaaagagagtgactttccccccgacctccgtgaacgatcccctgtgccttcagccaagtgggaactggagtgaatgcagaaaccactttgatgcctctaggaagtgattcttgtaaaaatcaggaatccgtgcccttggcataggggtatcaactttgtgaagaagaagaagaaggagctgaagcagaggctccactgaagccctcaggagactttgggggccttaaatatgaatggcctgggtacattatggggggtgcccaggaactcactaaggccgggcaccctcagaaacactttgtggtggaggtcagagcatttgttctgttacagtgaaaaagatccaactgcacccataggtgggaagccctgagcctacttgagagccaaaagagcaaatggaacattccagtttaatctcagctagacgacggataaaactaaaagtcgcagcagccagaatggcttgtgagatcggagtgtgtctagggcagagggaagtgggagagggaaggaggaggattcttccttctagggagagggaggtggaggatgatcaagaaaagctggaaatgcccgcctcattctgatatgccatctggtgggccatttcctcccaattccatatatccaaatccttcccattccccaaactccagtctcagtcctggcctgtgtgtatactttgttcttatagagaagattgtctctctttctctctctctctctgtgtgtgtgtgtgtgtgtgtgtgtgtgtgtgtgtgtgtgtgtgtgctttagagacagggtcttgctctgtcactcaggctggagtgcagtgacaccatcatggcctgctactacagctttgacctcctgggctgaagagttaagagagactcctgtttcagtctcctgagtagctgggactacagttgtggaccaccatgcctggctaatttttcaattttttgtaaagacagggtctcaatatgttgccaagctggtcctgaattcctaggctcaagtgatcctcccacctaagccccacaaatggggattacaggcatgagcccctgtgcttggcaagactctgttgtatatacatattactgtgctatgtacctatgagactttagaaaacacagctggggaaatgggtccctccaacctgaatgtgggatctgggaggcacacaatgacctccactgcaatccacttcttgcgtcactcggatccacttcttacttacacgtagtaagttaatcccatcagtgaacagcttctctgggattctggatggcctcctttcctggagaagcctccaagaggacagctagtgggatgaaggatgaacagcagctcctactgctacagctgacctcaaggctatagctggttttcatcatctgcctcccctactacccattcgagattccctcacccttggctagcacacctctcctggtctaagtagttcacctgtggggtgacccacaccttcatgtctgagaaatctgcatgctctattaccatgtccttctcaagtcttggctgctgcacctgttgatttaccatcaaacttgggcaggggatcatatctgcaaaagaagtacaggaagaataaatcagaggctaatgagatggttacctacaagaggtatatgggaactgggtagaaacagtgagagagttgccggatgatggctcagatctgtaatcccagcactttgggaggccgaggcaagaggatcacttgatgccaggagtttgagaccagcctggccaacatagcaagaccttttctctacaaaacgtatttaaaaattagctgggcgcagtggtgcacctggaagacaccatcttagcctaagtgatcacagttcacatcaccagcaataaaacacggagacatcacggaccccctgctgcaatgcaccaagaagtgcacagtctcactcccatgtggcattcttgccaaatacacagtctcaatccgatcatgaggaaatatcatagaaactcaagctgaggaacattctatgaaatagctgccagtactgttcaaaaatatcatcatgaaaaatgaagaaaggctgagaaactgctctgtagtggaggagatgaaggggacatgacaacaatgtcccataggctgctagaatggattctggaacagaaaggacatcagtgggaaaacgagaaaataatcagattggatctgtaagtctgttaatagtattatgtcaatgttattttccttaatttttttttgtctttttttttttggtgggtttgggttttttggttttgtttgtttgtttgtttgagccagggtcctgctctgttgcccaggctggagtgcagtggggcaatcttggctctcctgggctcaagggatcctctcacctccaccacccaagtagctggggctacaggcatgtgccaccacacctggctaatttttaaattttttgtagagacggggttttgctatgttgcccaggctggtctcaaactcccaggctcaaacagtcctcctgcctcggccttccaaagtgctgggattacaggtatgagccactgcacctggccaatgttattttcctacttttgatcattgttccggtcagatcagcttttgctgggagtggggagtggaagtagccttgtgctgaagagacaggcacccctccctcaccaccctgtactaggcagggttatacatagcactggttagcatggcagagaacaggagataagtcttccaaggcacacaagacagtatgaaacaattccagggagcgcagcagccatggccagccaccttgtgctcaacaatggcaccaagatgcccatcctggggctgggcacctggaagtcccctccaggccgggtgactgaggccgtgaatgtggccatcaatgtcgggtactgccacattgactgtgcccacgtgtactagcatgagaatgaggtgggggtggccattcaggagaagctcagggagcaggtggtaaagcgtgaggagctcttcatcgttagtaagctgtggtgcacataccatgggaagggcctggtgaagggagcctgccagaagaccctcagcagcctgaagctggactacctggacctctaccttattcattggccgactggctttaagcctgggagggaatttttccattgaatgagttgggtaatgtggttcccagtgacaccaacattctggacacatgggcagccatggaagagctggtggatgaatggctgatgaaagctattggcatctccaacttcaaccacctccaagtggagaggctcttaaacaaacctggcttaaagtataagcctgtggttaaccagattgagtgccacccttacctcactcaggagaagttaatccagtactgccagtccaaaggcatcgtggtgacygcctatagccccgttggcactcccagcaggccctgggtcaaccccgaggacccttccctcctgagggatcccaggatcaaggcgattgcagccaagcacaataaaactacagcccaggtcctgatccggttccccatgcagaggaatttgggtgtgatccccaagtctgtgacaccagaactcattgctgacaactttaaggtttttgactttgaactgaacagccaggatatgaccgccttactcagctacaacaggaattggagagtctgtgccttggtgagctgtgcctcccacaaggattaccccttccatgaagagttttgaagctgtggatgcctgctcatccctaagtgacctatacctgtgtttcctgtctcatttttttccttgcaaatgtagcatggcctgtgtcactcagcagtgggacagcaacctgtagagtggccagcaagggcatgtctagcttgatgttggatctgaagagccctgtcaatagagtagaagtctcttccagtttgctttgccctcctttttgccccactggggaaagtacaacctgaatacccttttctgaccaaagagaagcaacatctaccaggtcaaaatagtgccactaacagttgagttttggctgcttggaactgtaatcccttcagcaagacttctctttgcctcaaataaaaagtgtttttgtggagaaaaaaaaaaggactgatacagtgaaatatatgttaaaatataaaacatttgaacaaaaagagcttcttatttcaaaaagtgtgaacaactttatgatagtaacaaaagcttctattttaaaaagccctttgtatttatagaaagcatatatttgcatgtattctttgtaatagtatatttgaatgttgtggaatcagaaacttgcaaaaaatccaaaattctaaatactatagaaaatcatcataaaaagtcacagacaggtaaaaatatgatgttcacggatgttcacaggtgaacagataaaatatagtatatacacacaatggaatactatgcagccttaaaaaggaaggaaatcccatcacttgccacaacctggataaacgttgaataaaataagccaggcataaaaggacaaataccaaatgatttcagtataggaggtattaacacagtcaaattcgtagaggcagcagaatgggggttaccagggcctgggagcaggagagagatggggaatcatttagtgggtgcagagtttcagttccgcaagatgaaaacgttctggagttctgcttcacaacaatgtaaatacacttaacactactgagctgtatacttaaaaatggctaagatggtacattttatgatatgtgtttttaccgcaataagatgaacgaatgagtgaatagctttagttaaaacaaaaggtcacaggtgatgctgagttctgtggctaatagaggagctattcgttcatttcggatagccataatccatcttctgtgcgataggcacttggctaaatgttggagttaaataataattaagaaatgaccccgtttgtcagagtgtcttccatctagttggagagagagagaagtaaacagtgtaaggaatgttccacgtagtgggaataagcgctgggtgccgggagaatacaaagtaggggtgtttcatgtggtcttggggtgggggaaggagtggtagggtggtcactcgcgtcttcttgctggagtactgaaggtgagtaggagctagccaggcaaacgtgcggaatgaaagaccaggtgatcgcatagtgaggaagccaggggcagggaaaggcttggtgtggccaggatttaggattggaaagggctcatgggattgagaagactggaggcggaggccttgtcaaggagtctggatcttgagatcaataagaagtcatgaaagcttttaaggaggggaatcatatatccaaatttgcatcttaaaaggattattctggcttctatggtgagaaacagtttagaggagagcaagactggagacaggaatattagtaaagatttaacagtaaggaagtgaccagcggcccttgcagtaggctgagaaatgaatgagagaagaaacaatgagttagacaactttttctagaagtgtagctttgaacgagaggagatagcaagatggctgcaggagaatctggagcctaaagatgtgtgcgtgaacatgtgtgtgttcgagtgggagggacgggcatgtttaaacacagacagggaggacagagccgagctgtatcctaagggtatgggaggaaaccagatctcactcaatagagcttactttagcttaggaggaagagagagggcaggactctactcttattttaataatagggaaagaaacagatggatctaagtgtaagtttttaggtttgccattagaaagttaaggggtttctatatcatgggttttgctctgtaaaatagaaggaaagttcatcctggaggaggaaatggagagatggtgatttacagagagagttaagtgtgaaatgagagctaagaagaatagtagaaagaatgagctgaccctgggccagtcatggtggcttatacctgtaatcccaggacttcgacaggccgaggccagcagatcacttgaggtcaggagttcgagaccagcctggccaacttggtgaaaccctgtctctactaaaaatacaaaatttatcccagtgtggtggcaggcacctgtaatcccagctactcgggaggctgaggcaggagaaccatttgaacccaggaggcggagtttgcagtgagcagagatcatgccactgcactccagcctgggtgaaaaagtgagactccatctaaaaaaaaaaaaaaagagctgaccacgaaaaagtgagacttcagggcagcatggggctggagatagaattatgtccagtgtatttgtgtggttgtttctaggaacactaccatcaaagatatttcttggaatctgacttaggagctttgcctggcctaggccagtgcatctggatttgaaaggcttggggaaaaaaactatgaagagacactgttctagcacaactctaaatatagtagtaagttatatttattaaaagaatgtgatattggcccaagagttggcaaataaaccagtggaacagaacagacagccccaaagcacagacagttacatgtgggaatgtacaggataaaaatttggccctctaagttactgggggaagaaaggcttagtcaataaatggtaaagtgacaatttgctgttgttagacacctaccatgcattgtgcatgaaaataagttctgaatgaaaattaagatctaagtatttaaaaagccctttttgtatcattagagggaaatatttttataaacttgggttagagaaagttctagtaatgatctcatgagacctaggatccaaaaaagaacaagcaacatatttgaccacctaaaattaaaaagtaggccgggcacggtggctcctgcctgtaatcccagcactttgggaggccaaggcaggcagatcacttgagcccaggagttcaagaacagcctggccaaaatagtaaaaccctgtctatacaaaaaaatacaaaaagtagccagggatagtggcgtgtgcctgtagtccccactactcagaaggctggggtgggaggataacctgaccctggggaggtcgaggctgtagtgagcggtaatcccaccaatgaattccagcctgagtgacagagtgagacccagtctcaaaaaaataaaataaaaataataaataaataaactctgtgtgaccaaaagaaaaaagagttttttttctttgttattacactctacagctattaagaaaaaagtagaggtttaagttaaagggttaaagaataaactaccaaatgggagaaaacatttgtaacatgtataacacgtacggggttactattaatatatgagcttctatacatcaagtctaccactctgcatttgtctccttaattataaattaagtggccatatatgtgtggatttatttctagactctctgttttgttacaatggtctgtctacactagtgctaatatcacagtcttttatgatagcataataatatgctatggtaaacataataataaggtttgacatctggtagtataaatcctccaaattcatttttcaaaataaaaagggaaaaaatttgtgataatgtgttttctcaaatgcaatgggtagaaactcagatatttgttatgccattaatatttaactcctattttatgaatgttaatttatacctgctcaatatttaataataccataatagaaaactatacacctactaacatcaacaaaattttttaaatgcaagttaggaacctgaagaaaaaaatgtacaaaacacatttttagtgggataccttaatatacctctcattctttgacaggccagggagaaaaatacttaaaaatacatgaaattgagggagcccagatggtgaaatagcataaaaaccttcaaagcagctactataaacatccttaaagaactaaaggaaaccatgcttaaagaactaaaagaaaggatgataacaacatatcatcaaacagagaacatcaagaaaaagacaaaattatttaaacagaaacccatagaaattctagaattgaaaagcaaaatttaaaaaaattaaaacttcactagagagattcaacagcaggtttgagctggccggagcaaatcagtgaaattgaggctagatcaatatagattatccaatcataagtacagggaattaaaaaaatgaagagcagaaagaaaaattatcaaagcctcaggaagatgtgagatgccattatatgcaccaaaatacacacagaagaattagcaggtaaagaggaaaggcagaagcatcaatgtactcaaagaaacaaaggttgaaacttctcatatttgatgaaaaacattaatctacacagccaagaagctcaacaaattccaagtatgccaaacaaagagatccacatccagatatattacggtaaagatgctgcaagacaaagaaaaatcttagaagcaacaggagcaaacaacatgtcacatgtaaagagttcccagtaagattaacagcagtcttttcatcagaaacaatggaagccagaggcagtgggttgatacagtcaaagtgctgaaaataaaatttcatctagcaagcatcttatatccagcaaaattctctcttaaaaacgaaggcaagataaagatattcccagataaacaaaacctgaatttgttgatagcacacctgcttgacaagaagtgttcaggcagaaagcaagtgactccagacagtaatgtgaacatgcacacacacacaacatacacaaacacacaatacacacatacaaagaacattggtaaaggaaattatgtagaaattacaaaagacagtatataattgtatatttcttctctcttttttttgagacagggtctaaccctgtcacctaagcagaagtgtggtggtgcaaacacggctcactgcagtctcaacctcctgggctcaagcaatcctcccacctcacccttccaaatagctgggaccacagatgcgcaccaccacacctggctaattttttaaaaaaattttgtagaggccgggtgtggtggctcacacctgtaatcccagcactctgggaggccgaggtgggtggatcaagagatccagaccatcctggttaatacggtgaaaccagtctcttctaaaaatacaaaaaatgagccaggcgtggtggcaggcgcctatagtcccagctacttgggaggctgaggcaggagaatggcatgaacctgagaggcggagcttgcagtgagccaagatcacgccactgcactccagcctgggtgacagagcgagactccatctcaaaaaaaaaaaaatttgtagagatggggtctcaccatgttgcccaggctggtctcgaattcttgacctcaagtgaacctcttgccttagcctcccaaagtgcagggattaccggtttgagccaccatgtctgaccttcttctcctttcttattttaactgatttataaagtaatttcatagaacaatgtgtatataattgtgttgttggggctataatctactgaaatacagtgtacttgacactgatgctacatggaaggtgagagcaaagctatactgggaaaaggaaaggacatgagatggtagctgaaactatagcaataaacaaagacaaccggaatgggtaaattaaaaggtagtggccgggcatggtggctcacactgtaatcccattactttgggaggccgaggcgggtggatcacctgaggtcaggtgttcgagatcagcctggccaacaaggtgaaaccccacctttactaaaaacacaaaaattagccaggcgagatggtgggtgcctgtaatcccagctacttgggaggctgaggcatgagaatctcttgaatccaggaggcagaggttgcagtgagccgagatcccaccactgcactgcagcctgggcgtcaagagcaaaactccatctcaataaataaataaataaataaataaataaataaataaataaataaaattttaaaactctatagatatacttttgagacagggtcttgctctgtcaccagacaggagtgcagtggtacaatcacagctcagtgcagccttga

SEQ ID NO: 94941 - DNA, 56744 bp, Homo sapiens
  misc_feature (1)...(56744): n = A,T,C or G
ttcttgttgattttagtaagtttattctgtcctttttggaagaagttttatagttgttgcccccaccatagctctacataatgtgctttaaatcattatttttataatatagattactagaattcattcaaactaaagaaaaaaatcagaagattttggtctgtagttttgattcttctttctgtataggtgacatcaccagaagaaaacatctctacattgagccctgtttctaccttttctttgaactcaagagatgaagacttcatggtagaattctctgagacgtccctgaaagcaagaactttacctgatgatcttcattttctcaacttggagggtagtcgttaccacattgctctaatatctgtctattcatttaagatgaagttttttatttgagagattattacactaaatatatcttagaaccagattcagtgtcatatcccttgaagcctttccataacctttcttcctttgaactttttctatcatagatagctattccaggtacaatattcccttctagctatctagttccttcttgtttctcctcccaactttgtcaacacagacccctgaaagtatcttctaccattgtcagttcttctcacagctgtaactccagcatctgacccctttacagccctttcctgttccagaggaatgactcattgcaagtgtctcatcaacaccattggttgaccttagcataaccttttagtgtctctttttgctttgggatcctgaactcttcaactgctgctaccacccttgcattcctaggactctaggttttcatatattttggcccttcactatgagtcagcttctgcttcttgatgaatataatactattctctaggatccctttcactaaaatttctttttttctcttttcttataatctcatcaatatatcttcccctgattctgaatttatgttgggtgaggggtgagttgtagatagttttttgattttggatggatgataacaaaaaattctgtaatgtgaattggtagttgggttagaaaaggttttatgggtgtggttggtagaaggcaacaaggtagagaagaatcaaatacaccggagtgggtattcaagaaaaagtgatatggtagtgaacagtagatgattttcacagttataccatgaatcttttactttaatggacttttaacttttctgtcagtgttacttgatcgacttgttagaattacagcatagcactttataaaagaatattcattggctcacctactgctctgctactttccagatgatctccagagtatatttccaacaagatagaaactctgtcaggaaggcacattattataaaataggaatccatagtattgtcagataaaaactataagcttgcataattctgatgcagtattattcatttgtttatatattcaacaaatagttactgcttcttagatttttaggaatatatcactaaagctgctgacacacagaaggaatcattaaactctttcagacagaatttgccatgagtttaccagaattatactcttatcaaacaccattagatcaaaataaagctaaaatctttttttactctgaagggtaacatgataattcatgagtgtaaaaatatataaaggaagttacaatcacatagtcatataaatgaaccatgagcttccgtctctgggaaagaatgtaaagtagatataaaaaactagtctaggttcttatcctgactctgccacttagtagttatgctactgctaagcctttgtaatctcatttgtaaaatgagaatgatgcatttttgttgttgttgttagctttaaagtgctttgaaaatgttaagtgctatataaacataatttagtaattaggaaaaaaaaaggaggagaagaaaaagagggacttcatcaaccctaagaatgtttcagtatatatgaattaagctttgaaatctttattttttgaggttaaaaccattaattttttttaaggaaataaaataatgtgattttttttttcagagcaagttgctacattttgcttttgtatacccactgttttctagagcctaggtgataactagtagaacatttttatttaatcagcattctgttttctttcagggatgaaaaaatcccgttctctggagaatgagaaccttcaaaggctttcattattaagtagaacccaggttccacttattactttgccacgtactgatgggccacctgacttagactctcattcgtatatgatcaactctaacacatacgagtcttctggctcccccatgctcaatttgtgtgaaaagtcagcagttctttcgtttagcattgagcctgaggaccaaaatgaaacctttttctctgaagaatctagggaagtgaatccaggggatgtttcacttaataatatatctactcagagcaagtggctgaaatatcaaaacacatcccaatgcaacgtggctactccaaacagagttgataagagaataactgatggcttctttgctgaggctgtttctgggatgcattttagagacacaagtgaaagacagagtgatgctgtcaatgaaagctctttagactctgtgcatttgcaaatgataaaaggcatgctctatcaacagcggcaggattttagcagtcaagattcggtttccagaaagaaagtactttctctgaatttaaagcagacttctaagacagaggaaattaaaaatgtattaggagggtctacctgctacaactacagtgtaaaggatttacaggtgaggaaatgtaccggtcttgtggtgcatttttccaatagttattgtctgaatttcaacaaaagaattaccaaaatatactgcataggagcaatttggacagatggctttttttgatcctaactctgagctacagttacatcatcctttacttaaaatctctcgtaatagtagtgaacattgaatgaaatgatttatttgaaagtatctggtgcagtgtctggtaaattatcagtacttaataagtgatagctcctacttttgtttccatcactactaccattacaattattgtttttacttttgactgtcaattgtgtttgctgattaagtcattagggtaaaggtgcatcttatttcacgttaattgtgaataatccttattatagtcataaccagaaataaagatacgtaatgatccattcacatcagttaactttttcctagcaaaaaatatataaaaacttactaaggggcagataagaaaagttactcttatatagggttaaaattgccattcgtagctattcttgctatatttggtttctcatttaaaatttgaaagtaattttcaaggatcctagaaatcaaaagaaaaattaatatttttaaaaaatgtctatgaaaaataatttactctttagtaaacagtatttttctggagttgctatgataacttgaattattccattgcaggagataagtggctctgagctgtgctttccaagtgggcagaaaataaaatctgcttatcttccccaaaggcaaattcacataccagctgtttttcagtctcctgctcattataagcagactttcacatcttgcctcataggtatggctgttgtgtttttattgtatcatgattgctgcttcatgtaagtagtaaaattgtgagaatttaatacattatattgtgaattttcatactaaataccttatttttcatatgttctagtttttgacagtaacttttattctaatttcagatcaaaactgagttttaaaagtgggaaattacaatcttcttttttttttttgagacaggatctcactatgttgcccaggctggagtgcagtggagcagtcttggcttactgtaaccttgccttccaggttcaagtgatcctcccacttcagcctcccaagtagctggaaccacaggtgcacaccaccacacccagctaatttttgtatttttagcagaaatgaggtctcaccatatggctcaggctggtcttcaacccctagggggctcaagcaatctactcgccttggcctcccaaagtgcgttgattacaggcatgagccaccacacttggccagtattatcttttgaaagttaagagtttttcttccttttttttttttttttaactagaagtgttacaaatgacctgttaaatttagcagaaaataacttttaaaaacggatattcctattatatgactctgtttaaaggctattcaaatttagctacaaacagcacatatgtgatacaaacaaaattattttgtatttaattttctgctctcttttttttttttttgtagaacatctaaatatattgctgtttgggttagcacaaaacctgcagaaagctctttcaaaagttgacatatcattttatacatcattgaagggagagaaactgaaaaacgcagaaaataatgtaccatcctgccatcatagtcaacctgcaaaacttgtcatggttaaaaaggaaggtccaaataaggtattcttgcttcccctccccctaccataccaaatacttgtcttataaagggtttagatacctattacttcatgataagcttaaagagtgagtcttgattaagagctttctatttgaggtgttggtacctaacatacattaaattctcaaagttttattgaaagaatgatttgtgctctaggatacaaaaatatgagttaagattaaccttcaagttgcttaggaactttttgtatagtatttttatttatttttattattactatttttttagacacagggtctcactgttgcccaggatggagtgcagtagcatgatcatagctcactgcagccttgaacttccgggctcaagccatcctcccgccttggcctcccaaagtgctaggattacaggcataagccactgtgcccagctgaaaattttacatacttctgtaattgataaaataggaggaatatgctcaagttacagtgagatcactgagaagggggatatgttccaacctgagagcttagagaattcagaaatgagcctgaaagaaatgaaggttgaaactagtctaccatgtaatccccagtacaagtaacagataaggccagaggaatagaaaagtatgctggcttaatttacattgttaataatatattatggaggaagtcaggttagtaaaatgtatgttgattgatgacttatactcattgtagaactgtgctttcattcataatacagtttgcttccaccatttgcatatcccacttcattgttagctaagtgtgtaaatttggatttaaatttaggtgtcaaaagcaaaaattcatgagtagtgatataactgtggactaaaatatagccactaaaaatctttgttttctttttaagattatttgatgacatagttgcatgctcgtactatgttgttgggtacaagggctaggttacagagtagaaaatgtatcatctgagttttgtgtaaaaaaaatttacatgtgtttgttctttttgggttgtggtgtgtgtgtacttacgcgaatgagaaaaaaggatagaaataaatggataagatattcagtgtttctggacagttttcaggttgtttatagtgaacattttaaatcagaaaaacaaattttcaaataagcttttattctcagaataatgtaatcttttgataaagagaaagtaaatggaaaagtaggtggttttaaattttaaattaatgataaagttaagtcatatagtgactaatttactggagtacagtaatgccaagcagtcttcatagaagccttgacaaacacaaaaataatcgaaaaataaaagcatttttttcactaaatgttgatcttttttctttccccttagggtcgtctcttttatacatgtgatggacccaaagctgatcgatgtaaattctttaaatggcttgaggacgtgactccaggatattcaacacaggaaggagctcgacctggcatggttttaagtgataytaagagtattggcttatatttaagaagtcaaaagataccactttatgaggaatgccagcttttggtgaggtatgttttatagtaccaaataattgcctgtgattatataagagaacaacagccttcacagaactatcatcagttttaaaagagattaagataggaaaactatttaaaagatggaatacctcagtttctaaacctgcaaaatgggaataagtctttttttttttaattatatagttacaagctcttgctctgttgcccaggctggagtgcagtggtgtgatccttagctcactgcaaccttcaactcctgggctgaagctctccacccacctcagcctcctgagtagctaggacttcaggcacatgccaccatgcccagctaatttgaaatttttgtagagttggggtcttgctatgttgcccaggctagtttcaaactcctggactcaaatgatcctcccatctcaccctcccaaagtgctggaattagaggtgtgagctatcatgctcggccagggaataagtctttaaagttatttcggctccctctaaacatcaaacaatgtcagcaatatcaggataactagcagggtgctatttttctaacttattttgtatatagtcggggctattttccacaatcctaagggaaaccctatccgacaaactataggaataatttttagcagtgtggcataataaataagtgatcatttgcatgtctgaactacatagcttatagggtaatagaatgctactttttggaagtatgtcttataaaagtttagattattcaaaataaatataatgactatttgcatggtgatttagtagtaagatttttattcggagctgatatatgccaggccctcttctaactaggcacttcgcrtgaattattttatgcaattattataatagcccgtaagatggagatatcggaataagttattcccgttttatagtttagaaaatgaggttccgcaaaaaaataaaaatagaactatcatatgatccagcaatcccattcttgggtatgtatccaaaagaaaggaaataagtatatcaaagagatacctgcactttcatgtttatttcagcagtattcacaatagccaagatatggaatcaacctaagtgtccatcaatggatgaatggataaagaaaatgtggtatgtaaacacacacacacaatgggatcttactcagccataaaaaagaatgaaatcttgtcatttgcagcaactggaggtcattatgttaagtgaaataaaccaaaggccaggcatgatctcacgcctgtaatcccagaactttgggaggctaaggtgggtgaatcacttgaacacaggagtaccagaccagcctgggcaacatgatgaaacgtcgtctcatgaaacctcgtctctacaaaaattagccaggtgtggtggcctgcacctgtagtcccagctacttgggaggctgagacgggaggatggcttgagcccaaggaggtggaggttgcagtgagccaaggtcatgccactgcacttccagcctgggcaacaaagccagactctgtctcaaaaaaaaaggaaaaagccagatatagaaagacaaatattgcatgttcttactcatgtgtggagctaaaaaagcagatctcatggaagtaagagaatagaatgatggttaccagaggctgggaagaaaagkgggtgggaaatgaagagaggttggttaaagtgttaaaaaaaaaaaaaaaaggaatacagtagggaaattatagttaacaataatttattgtatatatcagaataactagaagagaagaattgtaatgttcccaacacaaagaaaagatcagtgtttgaagtgatgaatatcccagtttccctgatttgatctgatcattacacaatgtgtaaaggtatcaggatatcacatgtactcccaaaatatgtgtaactattatataccaataaacaaaattaaatttaaaaattttaaaaagcacacgaggtgttctatcttttagatacttttctatctcagtctcttctaaaactgatgacagttctgtgacagttgttattttcttactttgatacagtatatttatattttgtatacatgtatgaaactaggtaaacatatgaaaccctggttcttttcatactgtattttaaagattttcaaaaaacttgcatcttaatattacaattcatttttattttttattcccttttcagaaaaggatttgattttcagagaaaacagtatggcaaactaaagaagtttactactgtaaatcctgagttttataatgaaccaaaaaccaaactttatcttaagctaagtcggaaggaaagatcttcagcttatagcaaaagtaagttgatctgatcatactggcgattcagtctagccttattatctccattacatacagctgtataaattgtttatattaaagaattttatattaaattttaaaagtataatttaatagtaatatgtattataaactaattgtataataaattagaccacttctaaaaaacatatttttaagatattagggctttttatttttatttttttatttatttttatttttatttttattatactttaagttttagggtacatgtgcacaacgtgtaggtttgttacatgtgtatacatgtgccatgttggtgtgctgcacccattaactcatcatttaacattaggtatatctcctaatgctatccctcccccctccccccaccccacaacaggccccagtgtgtgatgttccccttcctgtgtccatgtgttctcattgttcagttcccacctatgagtgagaacatgcggtgtttggttttttgtccttgcgatagtttgctgagaatgatggtttccagcttcatccatgtccctacagaggacatgaactcatccttttttatggctgcatagtactccgtggtgtatatgtgccacattttcttaatccagtctatcactgatggacatttgggttggttccaagtttttgctattgtgaatagtgctgcaataaacatacatgtgcatgtgtctttatagcagcatgttttataatcctttgggtatatacccagtaatgggatggctgggtcaaatggtatttctagttctagatccctgaggaatcaccacactgacttccacaatggttgaactagtttacagtcccaccaacagtgtaaaagtgttcctatttctccacatcctctccagcacctgttgtttcctgactttttagtgatcgccattcttactggtgtgagatggtatctcattgtggttttgatttgcagttctctgatggccagtgatgatgagcattttttcatgtgtcttttggctgcataaatgtcttcttttgagaagtgtcttttcatatcctttgcccactttttgatggggttgtttgtttttttcttgtaaatttgtttgagttcattgtagattctagatattagccctttgtcagatgagtagattgcaaaaattttctcccattctgtaggttgcctgttcactctgatggtagtttcttttgctgtgcagaagctctttagtttaattagatcccatttgtcaattttgtcttttgttgccattgcttttcgtgttttagacatgaagtccttgcccatgcctatgtcctgaatggtattgcctaggttttcttctagggtttttatggttttaggtctaacatttaagtctttaatccattttgaattaatttttgtataaggtgtaaggaagggatccagtttcagctttctacatatggctagccagttttcccagcaacatttgttaaatagggaatcctttcccatttgcttgtttttgtcaggtttgtcaaagatcagatagttgtagrtatgcggcattatttctgagggctctgttctgttccattggtctatatctctgttttggtaccagtaccatgctgttttggttactgtagtatagtttgtagtatagtttgaagtcaggtagcgtgatgcctccagctttgttcttttggcttaggatcgacttagcaatgtgggctcttttttggttccatgtgaacttcaaagtagttttttccaattctgtgaagaaagtcattggtagcttgatggggatggcattgaatctgtaaattaccttgggcagtatggccrttttcacaatattgattcttcctacccatgagcttggaatgttcttccatttgtttgtatcctcttttatttcattgagcagtggtttgtagttctccttgaagaggtccttcacgtcccttgtaagttggattcctaggtattttattctctttgaagcaattgtgaatgggagttcactcatgatttggctctctgtttgtctgttattggtgtataagaatgcttatgatttttgcacattgattttgtatcctgagactttgctgaagttgcttatcagcttaaggagattttgggctgagacgatgtggttttctagatatacaatcatgtcatctgcaaacagggacaatttaacttcctcttttcctaattgaataccctttatttccttctgttgcctgattgccctggccagaacttccaacactatgttgaataggagtggtgagagagcgcatccgtgtcttgtgccagttttcaaagggaatgcttccagtttttgcccattcagtgtgatattggctgtgggtttgtcatagatagctcttattattttgagatacatccaatcaatacctaacttattgagagtttttagcatgaacggttgttgaattttgtcaaaggccttttctgcatctattgagataatcatgtggtttttgtcgttggttctgtttatatgctggattatgtttattgatttgcatatgttgaaccagccttgcatcccagggatgaagcccacttgatcatggtggataagctttatgatgtgctgctggattcagtttgccagtattttattgaggatttttgcatcgatgttcatcagggatattggtctaaaattctgtttttttgttgtgtctctgccaggctttggtatcagggtgattctggcctcagaaaatgaattagggaggattccctctttttctattgattggaatagtttcagaaggaatggtaccagttcctccttgtacctctggtagaattcggctgtgaatccatctggtcctggactttttttggttggtaggctattaatgattgcctcaayttcagagcctgttattggtctattcagagattcaacttcttcctggtttagtcttgggaggatgtatgtgtcgaggaatttatccatttcttctagatgttctagtttatttgcgtagaggtgtttatagtattctttgatggtagtttgtatttctgtggatcggtggtgatatcccctttatcattttttattgtgtctatttgattcttctctcttttcttctttattagtcttgctagcggtctatcaattttgttgatcttttcaaawaaccagctcctggattcattgattttttgaagggttttttgtgtctctatttccttcagttctgctctgatcttagttatttcttgccttctgctagcttttgaatgtgtttgctcttgcttctctagttcttttaattgtgatgttagggtgtcaattttagatytttcctgctttctcttgtgggcatttagtgctataaattccccactacacactgctttgaatgtgtcccagagattctggtatgttgtgtctttgttctctttggtttcaaagagcatctttatttctgctttgattatgtacccagtagtcattcaggagcaggttgttcagtttccatgtagttgagtggttttgagtgagtttcttaatgctgagttctggtttgcactgtgatctgagagatagtttgttataatttctgttctttcacatttgctgaggagtgttttacttccaactatatggtcaattttggaataggtgtggtgtggtgctgaaaagaatgtatattctgttgatttggggtggagagttgtgtagatatctattaggtccgctttgtgcagagctgagttcaattcctggatatccttgttaactttctgtctcattgatctgtctaatgttgacagtggggtgttaaagtctcccattattattgtgtggaagtctaagtctctttgtaggtctctaaggacttgctctatgaatccgggtgctcctgtaattgggtgcatatacatttaggatagttagctcttcttgttgaattgatccctttaccattatgtaatggccttctttgtctcttttgatctttgttggtttaaagtctgttttatcagatactaggattgcaacccttgcctttttttgttttccatttgcttggtagatcttcctccatctctttattttgagcctatgtgtgtctctgcatgtgagatgggtttcctgaatacagcacactgatggatcttgagtctttatccaatttgccagtctgtgtcttttaattggagcatttagcccatttacatttaaggttaatattgttatgtgtgaatttgatcctgtcattatgatgttagctggttattttgctcgttagttgatgcagtttcttcctagcgtcgacgggctttacaatttggcatgtttttgcagtggctggtaccagttattcctttccatgtttagcgcttccttcaggagctcttttagggcaggcctggtggtgacaaaatctctcagcatttgcttgtctgtaaaggattttatttctccttcacttatgaagcttagtttgactggatatgaaattctgggttgaaaattcttttctttaagaatgttgaatattggcccccactttcttctggcttgtacagtttctgctgagagatcagctgttagtctaatgggcttccctttgtgggtaactcgacctttctctttggccgcccttaacattttttccttcatttcaactttggtgaatctgacrattatgtgtgttggagttgctgttcttgaggagtatgtttgtggcattctctgtatttcctgaatttgaatgttggcctgccttgctagattggggaagttttcctggataatatcctgcagagtgttttccaacttggttccattctccctgtcactttcaggtacaccaatcagacgtagatttggtcttttcacatagtcccatatttcttggaggcttggttcatttctttttattcttttttccataaacttctcttcttgcttcatttcattcatttgatcttccatcactgataccctttcttccagttgatcgaatcggctactgagtcttgtgcatttatcatgcagttctcgtgccatggttttcagctccatcaggtcctttaaggacttctgtgcgttggttattcttgttagccattcgtctaattttttttcaaggtttttaacttctttgccatgggttcaaacttcctcctttagctgggagtagtttgatcgtctggagccttcttctctcgacttgtcaaagtcattctctgtccagctttgttctgttgctggtgaggagctgcrttcctttggaggaggagaggcgctctgatttttagagtttccagtttttctgctctgttttttccccatctttgtggttttatctaccattggtctttgatgatggtgacgtacagatggggttttggtttggatgtcctttctgtttgttaattttccctctaacagtcaggaccctcagctgcaggtctgttggagtttgctggaggtccactccagaccctgtttgcctgggtatcagcagcrgaggctgcagaacagcggatattggtgaacagcaaatgttgctgcctgattgttcctctggaagttttgtctcagaggagtacccagccgtgtgagttgtcagtctgcccctactggggggtgcctcccagttargctacttgggggtcagggacccacttgaggatgcagtctgtccattctcagatgtccagctgcgtgctgggagaaccactactctcttcaaagctgtcaracagggacatttaagtctgcagaggtgtctgttgccttttgtttggctaagtcctgccccccagakggggagtctacagaggcaggcagtcctccatgagctgcggtgggctccacccagttcgagcttcctgccactttgtttacctactcaagcctctgcaatggcaggcaccccttcccctggcctagctcctgccttgcagtttgatctgagactgctctgttagcaatgagcgaggctccgtgggtgtaggaccctctgatccaggcacgggatataatatcctggtgtgctgtttgctaagactgttggaaaagcgcagtattagagtgggagtgacccaaattttccaggtgccgtctgtcacacctttctttgactaggaaagagaattccctgaccccttgcacttcccgggtgaggcgatgcctcaccctgcttcggctcatgctcggtgcactgcacccactgtcctgcacccactgtccaacactccccagtgagatgaacccggtatctcagttggaaatgcasaaatcacccgtcttctgcattgctcacgctgggagctgtagactggagctgttcttatttggccatcttggctcttccccccaaatgttaggcctttttaaaaactttattaaaagggatacgagaaacatttaattagttcttggaatcatataagtaagtatattgattcaactgtgctctgatttaatgtcgaaaataaactgaaaatacgtaataataagtttgttgatgcttcttttattgtctatgtaatttggcaacattgaaccccaaattttgtatatttggaaataaaattctttaaacattgttttttttttgtttgcttgtttttttttttcctgagacagagtctcactctgttgctgaagctggagtgcagtagcgtgatctaggttcactgcagtctctgcctcctgggttcaagtgattattctgcctcagtctcccgagtaggtgggattacagatgcgcgctaccacatccagctaatttttgtatttttagtagagacagggtttcaccatgttggccagcctggtcttgaactcctggcctcaggtgatccacccaccttggcctcccatgggattacagacatgagccaccatgcccggccagcattgagtgtttttaaaggaccttaggtacactaagttggattaatcattatttgagattttgtgacctactcttagtcattggtcctcacatagctcaccttcatttagttatttaattagtaacttacttaaaataatacaataagcatctgtgagcccacaaaccaaatcaaaatctagtacctttataccaacctacatttaagttaaccccattacctcatcttgtctctccaaacccaaggtaattatcattttgatccttgcactcaccagcatttttctttcttctgtgtatagatttatgtaaatgaattcctaaagagctatataaaatttttagtttttttagaccttactaaaatgatgtcattctgtatataatcttttggaatttatctttttttggttagtatgttgctacaatttatccatgttgttctcaaatctagagtctagattatttgttttgactgttgtataatattttgtaaacatgctatagtttattgttttcattgttgtttgggtttctaagttttaccattgtgaacagggtgttatgaatattattcttgtactgtcttttagacatgtatgggtttcttttgaatattactctaggaatgaaaatgctgccttacagcatatgaacatacttcacacatctttagattgtgatgccaaactgatttccaaagtggctctatcagtttgtactcattctaagtataagagatcttatggatcaacccattcaaatgagtataagatgattgcattgtggttttagctcacacttctctgctcaccactgatgttaaaatactcttcatgtgttttttagttacatgtgtttcttcttagccattttactattgggttctttataaccttcttttatttatagaagttctttatgtattcttcatattctttgttgattatgtatattataaatatctgctcatcagatcatgtcttttcacttactttaaggtgtctttagataaataaaaattcttaattttagaatagtcatatttattagtaatcttttctttttgacagtgctttttgcatcttaccttaaaaatcttttcctatgctgagttctaaaattactcacctatattttctactaaatgttttacggtttggtttttgacatttaaatctttattattaatttccataattttttgagggaacaggtggtgtttggttacgtgaataagctctttagtagtgatttctgagattttgctacacctatcacctgatcagtatacacygtatcaaatttgtagtctttttatccttcactgccccccttaccctttcccctgagtccccaaagtccattgtattattattatgcctttgtaccctcataacttagctcccacttatgagtaagaacatacgatgtttgatttttccattcctgagttacttcacttagaatagtggtctccagttccatccaggttgttgcaaatgccattattcgtttctttttatggctgaatagtattccatgggtgtgtgtgtgtgtgtgtgtgtgtgtgtgtgtgkatcacaatttctttatccacttgttgattgataggcatttgggctggttccatatttttgtaattgggaattgtgctgctataaacgtgtaagtatcttttttgtgttttcctctgaatagatacccagtagtgggattgttggatcaaatggtagttctacttttagttctttaaggaatctccacactgttttccactggttgtactagattacatttccactagcagtgtaaaagtgttccctttcatccctgccaacatctattaattttgattttttgattatggccattcttgcaggattaaggcagtattgccttgtggttttgatttgcatttccctgatcattagggatgttgagcattttttcatgtttgttggccatttgtgtatcttcttttgagaattgtctattcatgtccttagcccactttttgatgggatcatttggtttttttcttgctgatttgtttgagttccttgtagattctgagtgttaatcgtttgtcagatgtatagattgtgaatattttctcccactctgtgggttgtctgtttaccctgatgattgttaattttgctgtgcagaagctttttactaatagtttaattaagttccacttatttagctttgtttttattgtatttgcttttgggtttttggtcatgaagtcttagcctaagccaaagtcagaagggtttttctgatgttctagaatttttatggtttcaggtcttagatttaaatcctcgatccatgtttagttgaattttgtataaggtgagagatgaggatccaatttcattcctccacatgtggcttgctagttatcccagcaccatttgttgaatagggtgttttttctccactttatgtttttgtttgttttgtcaaagatcagttggctctaagtatttggctttatttctgggctctctattctgttctattggtytgtgtgcctgtttttataccagtaccatgctgttttggtggctatgagatttaaatcttcagtccacttgaagttgattcttttttcttttgtatatggtatgaagtagggatccagtttcatctttttctttttaattaccaattttgctagaatagtaascattttttattgattagtctctcttttcctcactgatctgaaatgctacctctgtcatataatcaggtttaaagtagctgtgtgtgttcttgactccctattttatactgtaggttaatttgtatattgttgtaccagttccacactgccttaattaccatggcttcataaatccaaatatcaaatagtgcaagttcccctctctgttcttagatgtgacctggmtgttcttggtcctttactctttcatatatattttagaatcatcttatcaagtttcatgaaaaacttgttgggatcttaattggaattgtacctataaagttgagaagggatgacatctttaaaataccaagatttagggctgagcatggtggctcacgcctgtaatcccgacactttgggaggccaagacaggaggatagcttgagctcaggagtttggagaccagcctgggcaacatagtgagaccttgtctcagaaaaaaaaaaaattaagatttaataccatgtacttgctgtatctctgtttatttaaaaattgtttgtaacatcttataataaagttttgcaaatttccctgtagaagttttgaatatttttatcttaaatttattcatattctctgataccattgtattgtttgtgtttttattcttctgaccagtcttgcctgaggtttgtcttattttgttattgttttcgaagaactgacttggctttattgatcagaagatcagcaatgtatttttgttttgtttttattgttgttattggcttcctctctaatttttatgatttcttctattttgtttaggatagtatactgttctttttacacatcttaagcttgatacttagctaattttgaggcttttctcttctctaatataattattagggctgtaagttttccttaaagtaccactctttttttttttttttgaaatgcagtctggctctgttgcccaggctgagtgcagtggcacaatcttggctcactgcaacctccacctcctgggttcaagtgattctcctgcctcagcttcccgagtagctgggactacaggcacctaccaccacacccagctaactttttgtatttttagtagagacagggtttcaccatggtggccaggttggtcttgaactcctcacctcaagtgatctgcgtgcctgggctcccaaagtgttgagtttacagatgtgagcctccatgcctggcctaccactctatttttgctgaagtatttttttcattataattcagtttgttttaagttttccattatgattttttttaacctgtgagtcatttagcatgtgttttaatattaaaaatgtaaggaatttctagttgaactttttgttaacttctgacttaaatatgtaataggtagacattatgatttttataatattattctttaaaatttattaaatttatgtatgtatgtatgtttgagacagagtcttgctctgttgcccaggatggagtgcagtggcatgatctcagctcactgcaacctgtgtctcccaggttcaagccattctgcctcagcctcccaagtagctgggattacaggcacccaccaccacacccactaaattttctatttttagtagagacaggttttcaccatgttggccaggctggtctcaaactcctagcctcaagtggtctgccctcttcagcctcccaaagtgctaggattacaggcgtgagccaccacgactagcctactaaggtttttgtacacttgattgtagccaaaagactgagaagtgatattattaaggtttttttttaatggcatagtacaagagaaatacattttctctaattgttgaattcaaaactctttaatgatcagatcaagcttattaattgtcttgtccagwtcttctatatagtcttgctaactttttgtggcagttatctaagtaattaagggagatgagttgcaaacttcctctgtggtgcactctctgtctgctatttattactttttgcatcttatatattagggctattttattgggtacatatatgttttaaattattaacttcagggtaaacttacatcatcatgtagagatgatcctttccatctctaataattttttcttaaaaatctatctgttaatgtagatatgctaagtttattttgactagtrttagtttcataagtcttttttcatttttttatctttctttcttcatattttacaggtgttccttataaacagcatatgtctcaattttaaagacgtgacttgtaaatagaataagcccgatagttgaatttattatagtaattgacacctggatgtgtttctttaatcttaaattatttttgtttattctaattttactatgctttttaaaataatttcttacttttaaaaaataaattgatatttaaatcttatccctgcccccaataaaacagatacttagaaagcacccacatcccttggttcttcccctgatccctttccttactcttgcccgccctgcccccagttgacaaaatctagactagtgctactcaaggtagagtctgtaggctggttctggtccacaaacttactggttcccaaaaagagctgaggagctgctccagaatgtaaatcatctatatcattagcatgctgtttagtttagctgtattttgttttatttgtagcaagctttctgaatgaaggaagcattatgttgatttattggattatattctagcacaagcttcttgttacagaccaataacaaactgtttaggacagcctactttgagtagttctagtctaaatcttgaaacacttggttagtatagatctattttctatctttctttggacaataatttggctacatataaaattttaggttctaagttcttttcctttaatactttcaacctacaaaaacagcactttcaaatattttaatccaacatttaatatacttagttatcatcttgtattcactgtttgaaagtctgatggcactgtgattttatttttttttctgagatggagtcttgctctgtcgccaggctggagtgcagtggcgtgatctcagctcactgcaacctccgcctcctgaatgatgaggtgattctccttcctcagcctcctgattagctgggactacaggcgcacaccaccatgcacagctaatttttgtatttttagtagagatagggtttcaccatgttggccaggatggtctcgatctcttgaccttgtaatctgcccgccttggcctcccaaagtgctgggattacaggcgtgagccaccacgcctggctttttttttttttttttttttttgagacagagtttcactctcgtcacccgggctggaatgcagtggtgcaatctgggctcactgcaacctccacctcccgggttcaagcggttctgctgcctctgcctccaagtagctgggattacaggtgtccaccactatgcctggctagttttttttatttgtagtagagacacggtttcaccatgttggtcaggctggtgtcgaactcctgacctcaggtgatccacccaccgcggcctcccaaagtgctaggattacaagcgtgagccaccacacctggccggcactctgagtcttatttctttatgtgttatgtggtctttctggctgggagttttagaattttcttgatttctttgatagtcttatatttctctatacagtgtctaactgggtttttccttgtttctcctcttgggcacattatgggccttttaaatctaaagttcatcatcttttttttacttctgggaaatggatcttcattatttcttcaaataagcttcctatttatctctttattctttccctcctttctaggtcttttattatttaaatattagcacttctgaatctgtcttccaaatctcttagtttttcctttatatttcctgaatttttgtcctttcttccttctgggaaatatcatcaatatgattatctgaattggctattgattcctcaaatgtattcatcctgctatttatcaattatatttttccaacctaatatttctgttcatttctttttcctgttttttttgtttgtttgtttttgttttttaatttttgagacagggtctcactctgtcacccaggctggagtagagcaatcacggctcactgcagcgttgacctcctaggccctagtgatcctcccacctcagcgttctgactagctgggactacaggttcaagccactacacccagctaatgtttttattttttgtagccatggggtcttgctatgttgccctggcacatctcgaactcgtgggcttaagttatccccctgactcagcctcctaaagtgttgggattataggtgtgagccattgtgcctggcctgttttcttgtatgtatgtgcatatgtatttatttattgagatgaggcctcactgttttgcctaggctggcctcaaactctggggctcaagcaattctgtcatctcagcctcccaagtagctaggactacagttgtgtgccactgcactcggctgtcattattttacattgttaccatcttcctttacctctttacatctctttatcaggccaaatttaaattatttgcccatcaattctggctttcccttttctatatgattctatagtccagtttttgttttttttttaagtctttgtgttccttgaatgtctcaatattttggcctgtgaactcatttttccctggcgttatgagcttttctttctggcagtatatgttggggaaggcccatcccaatctggtcagctccaaggagctcagggagttgagggtgtaaatgagctatggggtggagagccccaggcaccagaaaaccacaactacctgcagaacaatccctaaagtgaagtctaaaacctctggttaaaaggaaaaagcaacattaagatgtatcatttcttagactgtagaattctttagccctaggagtttggaggtgaggtggagactgcctgtgatcagtgagttaccatctgtttttctccacactttatggcacagarcttgcattgctaccctgatttttttttttttcctccagaggatttctggaccagaagtataaattgccttatggatgggtaggccctatttgtcccagtacaattggggatggggaagaggatgggatgggaagtaagaayagaaccccaagagcctccccaccctctttgatcccctcctcctctacaggccttctgcccttggccaaaatcacttcagggacacaaaccccagtacaaaacaggccctccaactcgaggttttccatggttttctccacttctctctctgttccccacagaaaggaagccaacaatcatactaattcagcatcttagatgacaccagaatcaggaatcccctatatctttatttttttaattcaaaagtgtttttgagcattgttttgcatgttttgaattatgttattaattcagtaagtaaaaaatttattwtttatttatttatttattttattttattattattatactttaagttttagggtacatgtgcacattgtgcaggttagttacatatgtatacatgtgccatgctggtgtgctgcacccattaactcatcatttagcattaggtatatctcctaaagctatccctcccccctccccccaccccacaacagtccccagagtgtgatgttccccttcctgtgtccatgtgttctcattgttcaattcccacctatgagtgagaatacgtggtgtttggttttttgttcttgtgatagtttactgagaatgatgatttccaatttcatccatgtccctacaaaggacatgaactcatcattttttatggctgcatagtattccatggtgtgccacattttcttaatccagtctattattgttggacatttgggttggttccaagtctttgctattgtgaatagtgccgtaataaacatatgtgtgcatgtgtctttatagcagcatgatttatagtcctttgggtgtatacccagtaatgggatggctgggtcaaatggtatttctagttctagatccctgaggaatcaccacactgacttccacagggttgaactagtttacagtcccaccaacagtgtaaaagtgttgctatttctccacatcctctccagcacctgttgtttcctgactttttaatgactgccattctaactggtgtgagatggtatctcattgtggttttgatttgcatttctctgatggccagtgatggtgagcattttttcatgtgttttttggctgcataaatgtcttcttttgagaagcrtctgttcatgtccttcgcccactttttgatggggttgtttgtttttttcttataaatttgttggagttcatcgtagattctggatrttagccctttgtcagatgagtaggttgtgaaaattttctcccattttgtaggttgcctgttcactctgatggtagtttcttttgctgtgcagaagctctttttttgaccccatggaaaaaaaatacctaacgttcagaactaccaataacaggaagaagagaatttttttttttttttttttgagaatgaaatgtttcccatcatagtggattctaaagcacattctcaacgtatgtggcatgctagctggatgtcttttggcataattgttacacgtttggcatggatagcacacaggttggtgtcttcaaaaaggccaaccagataggcctcacttgcctcctgcaaagcaccgatagctgcgctctggaagtgcagatctgttttaaagtcctgagcaatttctcgcaccagacgctggaagggaagttagcgaatcagaagttcagtggacttctgataacatctaatttcacggagcgccacagtaccaggcctgtaacgatgaggtttcttcacccctccagtagagggcacactcttgcgagcggcttttgtagccagttgcttcctgggtggtttaccaccggttgatttgtgggcagtctgccttgtacgagccatggtacagagacctccttacttacctcatttctccttcggctggagcttggtcagcgacaggcggcgctggcgttggagagcgacggcggcgcggtggcggctgcgaacacaattcagtaaaaagaatttataatgtgaccttcgaaggaaacttttgtgcaggaacattatgtatgtttttattttttaaatgtatatcacatrgaagacattcatgaagtggttggatttttagaaattaagcatttgwgatcattttttaaaaattaaaaatctccaagccagcatttgggggaaaaaaaattaaacaagtaatacataaatatatacaatgaaaaatgaaggtataaagaaatatatacagttaaaagtgaaagtcttactttaatacctttcattttcattccttataggttaccgttgtgaaatgcatatgattaaataattactagatatattcagtcttaaggttctcttcagtttattttcttcacttcaatctctcattcctatttgcagcagagaaaatttaagatgaatccaatttgatagattttgtccagtaaaattcagatgcatttgggtattgaaatcttagtcgctgcccagtttagtctctctttcagggcttccacacgtttctcatttttaaaaaccctgttcttctctgtgcctacttttaatatcacaagattcacatactaattactaagtagttacaagagaggagraaggtcagctttcctgaaagaagcttgttagtgaaaatggratagtatattactattttgtgattatttctcagcttgctagaactgctaatatccttactgatctgatctttggcactattccaattgctgatgccctggcagttggttttctcagcctgaactgagtccaatattacttttttttgtagcttgttaagtggttactgtggtctaaatgtgttccctgccgtccgttcccactgccaaatacatactttgaaatttgattgccagtgtattaagagctggggcctttgggcaatgattaagtcatgtgggcgctgcataacttaatcctgcatgggattagtggccttataagagaggttaaagggagtgccttggcccctttgcaccatctgcaaagtgagaatgagccttcactggttattcactggtgctgtgctggcaccttgatcttgggctttttagcttccagaactgctatgagaaatacatttctcatttaagatattaatcatcttaataaattactcatttaagatattttgttatggcagcctgaacggactaataaaatagtcttatgggctagcccatgtcctgccttcttaggccttctgtgggtttatgcaaaacctagggatttccattgtagcaaactcatcttcccatgtgatgtctctgccctccttcttcctcaccctgtaattctgccatctctttagtctttttctgtgtgattcaagtggtactgtattaattgcagaatctgatgctggttcttttgttcagagcactcccaacctttaggttgatagttgatgaattatctttccagaactttacttctcatcttgtgtatgtatatgtgtactatagatatatgtacacacatatgcaaatatatataatttctaaaaatataaaaccatactgtatatgtctgtgtaatatttaaaaatgtttgtcttttcagatgatctttgggtggtttcaaaaaccctagactttgagctggatacttttatcgcatgtagtgctttctttggaccatcatctatcaatgagatagaaatactgcctttgaaaggctatttcccttctaattggcccactaacagtgagtattactatgctcattttagtttatatttaaaaagaatgatagacataagatgcactgtttgattaaagccaacaaaaaggacccaactctagtttcgactgttgtgtacagtgagttcctgaaaatgtgtatgaagttgaatatatagatatttctgtgaggaagaatggtgtgtgggggattgttttgttctaattttctaattagattattctgattttctgttttccatatatttctgtgaagtaattgaggaaaaaatgcaagaaagtgtttaaaaattatacaaatactactctgtggcacaagtgatatgttgattaaaggaaactgctggctgtgaagttgtgctactaggtactaactcaaaacaggtgttcttgttcatttgctgatatatggaagtccaaatatgatttaaattatgcagtttatgcatacccattataaaatgaatgagcagatagcatagtaatttaatgaatataagtttgggatctctgtgtgtgtttaagggtttgttttatgtcatgtgcttaattcagtagctgaactctgagttatgtgggcatttaacacagagtttttatggtccattttatttacatcaaatgtttattttctgcatcctctgtacagtggttgtccatgcgttattggtttgtaatgctagcacagaactgactactttgaaaaacattcaggactactttaatccagctactctacctctaacacagtacctgttaacaacgtaagtcattttttacctttgagtcattggtattaaaaaatggtaatcagaagtaaatatgaaaattcaataaaagtacagtatataaatgttgccaataaaattgtaattatttttcagactatgacattattctctgtcagtggttaaaaagagaaaaggggctgggtgcagtggctcatgcctgtaatcccagcactttgggaggccgaggtgggcagatcaccagaggtcgggagttcgagaccagcctgaccaacatggagaaaccctgtctctactaaaaatacaaaattagctgggcatactggcgcatgcctgtaatcacagctattcgggaggctgaggcaggagaattgcttgaacctgggaggcggaggttgcggtgagccgggtgccattgcaccccagcctgggcaacaagtgaaactctatctcaaaaaaaaaaaaaaaaaaaaagagaaaaggaattatgcattatttttcatctgtttattaaggtttgagctaataaatgttastgtacattttcacttcatcaagagataatttaaggatcatttcagtattgattttattttttattatctgtatttttatattacaaattatttaacatttaaaggaatcattttacagctggaatccagtgtgtatattgctactgattttattctcgatatagccatatctcattttgaatttctcaagcaccatgtccctttttaaaaaattggaagtgatattatattaaatgcattaaaattgataggaaaatccagttttcaatttggaatattattatctacctgkgatgttttatttttctcactacaatgaagtcctaggtaaaaaaataaatatcctttgatttcattatgttatttatccaatttgaaatgaattttcatggaaatagaaataagaccaattcatgtgatgtagttttacctgaaatgagggctagattaattatctaagttaggtttgtataatagagcatgggttttaaagtcagtccgccacttatttgtggtgtggtattgggggaaaaaattcaatattcttgtatctgtacttgggataattaactaactatttcctagtgttgttgtgaagatttcatcaagtaatatgtaaaatgctcaacaaagtgtcagcatgtagtaagtattcaacaaacgtcagttctcttctaccctcctcgatattggagtatgtatccatttacagtatatatccacttactgtttatttccataaaaaactgttctctgtaatgcttacaaagtgatggctaagttatgaattattctactcatctttttcaaatgcccctttttttaaaattgtttatttgcttcatttttattaggtcttcgccaactatagttagtaacaaaagagtcagtaagagaaaatttatcccaccagccttcacaaatgtcagtacaaaatttgaactactcagcctaggagcaacattgaagttagctagtgagttgattcaggtacacaagttaaacaaggatcaagctacagctctaattcaaatagctcaaatgatggcatcacatgaaagcattgaagaagtgaaggaactgcaaactcataccttccctatcacaatcatacatggtaagaagcaagaaagaaaataattgtaattgttttctatttgtaagcttttgtaactcagtctgctcctttataatttcctagtcaaatgaggttcaagaataactctaagtagactttttaaacctgtacccactttggtaaactgytagatgagaacagaactgactaccctaaaagggagacttattagcatatctgatgaatgagtagcattataaacttatggtcaaagtatccagattgatctagatgtttacatgttgctctcctatagtaaacttaacttgatcagcaaaaccttttatttattcctagtcagctcactcttctatcctttatatcagtgattacaaaccttaattcttctcataacctcattcttgtcctttctcttgatcttgcctctaaaagaggaaatggaggtcataacagaaactgctttcaatatcctgccttccttctccaatttacctaattttggagctattcttaccgcttggttctgtcacagtgaaggcgatttacttcctcctgcttacagtaaatagttctatctggactctgttgcctctgtagcacattttctctcatagacctccaccccaaagctaatcctacttttctgtcctattttgaggaattatgtcatatccaccctgttgaccaaatcaaatctgagagtgatcgtagatttttctttctctcaagattaagtgactctctcttaatcctcctcatattctctcactattcatctcccgccatcagattagtcactgagatgtgttccttctagcttctatccatctttcatattgagtgtctcttctccagtttacttgtatcccctcaatccaagccttcatcatacctccatatagcctagtgggtaagagtgtggggtctagagttagaatcctgaatttacgttctgactgtatcatttgttagctgtatgattttgggcaggttatatatctcttaatctttaatttcctactctgcaaaatggagatcataatagcattcacctcatagggttggaggattaaatgagttaacatacataaagggcttagaacagtgcttggcacatgggaggtgcttagtaaagttaacatttattgttgtaattatctcacacaactttctaattgatctaccactagttttgccttacttcatattttcattcaagttgttttttaaaaacacaatctgattaagtcaaacccattgcttggcctcacacctgtaatcccagcactttgggaggtcagggagggtagctcgcttaagctcaggagttcaaggtcagcctgggcaacatggcaaaatgctgtctctacaaaaaaatttaaaaattagctggacatggaggcatgcacctgtagtcccagctactttggaggttgtggtgggaggatggcttgagcctgggaggcagaggttgcagtgagtcacgattgcgccactgcactccagcctgggcaacagagccagaccctgtctcaaaacaaaacaaaacaaaaaaaaacaaccattgcttgaaatctttagatgacatctgctggcctttaagataaaattcaaactttgtttagctatagcaaacagagcttttgtgatttacccctgtgcctaccttatcagcctcatctcttgcctatttggtagaggttatatagaaaagttattttaacagcgacatgctttgtcatggctttgcctggaatggccctatctctaagcagtctggacatcttattctggaagtcttagttctacttcttaattttaggaagtactcccacctccatcaaaacagagatagattttcttccttctctgatccaagataatattacttaccatcttatttctaattattccttgtttatcattttaagtaggcgctggtctcattaaaagtggaagtattttggttatctatttatcccctgtgctttgcacatagtgaacactcaatgtattttgaagacattaattaattaaatggaggagggagagatggatgaaatatttgttatacctatagaaatttatgtttgaccaggcacagtggctcacrcctgtaattccagcactttgggaggccaaggcaggtggatcacttgagttcaggagtttgagaccagcctgccaatatggtggctctactaaaaatacaaaaattagccaggtgtggtggtgcacgccggtaatcccagctacttgggaggctgagacaggagaatcacttgaacctgggaggtggaggttacagtgagctgagattgtgtcactgcactccagcctgggtgacagagtgagtgagactctgtctcaagaaaaagaaaagaaaaaagaaatttatttattttatgctttttatttttttcttcttttaaaataattaggtgtgtttggagcaggaaagagttacttgctggcagtggtgattttgttctttgtacagctgtttgaaaagagtgaagctcccaccattggaaatgcaaggccgtggaaacttctgatttcttcttstactaatgtggctgttgacagagtacttcttgggtaggcatgacaagtgcatttaagtagctaatgttttgggatattgttgagagaggcaacccactatgggccctgagtgtccatgtactcttgctggttatgccaagaatgcaagacctttgtctctgacccagaagccagcatctatgaaacagtaatgggctaattagtttgtaagtaggataaaatcaaaaccagaactggaaattttggcacagtgatactcatgcaaaaattcaagttcagccaagaacatgtagggctagagaggtattgttgggggaggcagtctgccagcggccctgagcatccctgctgggatgctaaggatgcaagtccctgaccattcttacccaacacatttctcacagtttgtttgcaataagcagctttgactgatgaagtaatgtctccctccaggacaaagagcaggcttgcttattacttgttataagataatggatccccagcctcagtgttcttgccctactcctcaacccacggcatgtgcaggcatctacctggatgctctttgtctcctcatgtgacttgggaaccaagggaaaccaatgcagatatgttgacgattatactgcttcctgtgccataagtaaaagtcctttgtctctgatctagaagtcttgggtctgttacgttagaagtaggttaaaatcaggctgggcatggtggctcatgcctgtaatcccagtgctttgggaggccaatgcaggcagatcacttgatgtcagaagttcaacaccagcttggccaacatggtgaaaccccgtctttactaaaaatacaaaaaaacttagcctggcttggtgccaggtgcctgcaatcccagctactcaggaggctgaggcaggagaattgcttgaactcaggaggcagaggctgcagtgagctgagactgcaccactgcactccagcatgggtgacagagggagaatctgtctcaaaaaaaaaaaaaagaagaagaagtaggctaaaatcaaattccagaatcagtagttatagattagtctcttgttcatctgcctatatgaatacataatagtaaaatggctgaacaaatttaagtacattatgttttttatttcaataagaggaatgcaaagaagacaatctgtttttaagataatttttgtgattgcataagactattaaaaatgcaaagaagtattacagtatttcaccagtgttctgatgtttaatgatctgaatttcaacataaatggcaaagtttgattaggagaaacagtcattatttctaagcgtaagctttttaaaaattaatttttataattatataagttaatacttatggtagaatatatgcagactacacagatgttttattatatttatttacagatttttaaatatacatgcacacattttgttttccaaatttgagattcagtagtatgtgttgtttgtgtcctgcttttcttacttaaaaggttggctcatgcctgtattcccagcactttgggaggctgaggtgggcagatcacttgaggccaggagttcaagactagcctggccaacaaacatggcaaatccccgtctctaccaaaaatataaaaattagctgggaatggtgacatatgcctgtaattccagctacttgggcagctgaggcacaagaatcactggaacccaggagtggaggttgcattgtgccaagatcataccactgcactctagcctgggtgacaaagtgagactctgtctcaaaaaaaaacttagaaaatgtaattttttataactctattatattcaatgattttcttataccatacattaagcaatttttgatcagtaaattatttccaaattcttgccagtatgaattatattatgacaaagatccttaaacataaaactctgtatccatttctgattctttccttaggaaaataatcctaagtctagaataaaaaatatgaaaacttttaagcttctaaatatacttttcaaatttcccttcagaaagattcttccagtacacactcttataagcaatttaaaagagtggctgaggacaacgttgttttttgtttttgttttttttttaaattaaagacaatgaggagttacctggagactacacaggaaggaactttagattgcttagcccaaagtgaaaatttaactgtagactgttagaaaacaaaacaatattaaaaaacaaaagaaaacaaaaaaacgagaagttagaatgaggagggagggtaagtactcaatactaaaagttaacaggaaacttataaaagagattctttaatgcttaaatctctgagaagaacctgagaaatgtgaatctctaattaggatctgtgcctcaattgcttatagtctggtttcgtacatttcttcacactgaaataaccttctcattgtgtgcttgaacagacaatgttttcctattgattaatggatagaacagtttcttgagaagaaatgaaagagcatggggtgaatagtactttgaggagactgcgtcccttattattatagatttaaccaaacttgcattggaaaaaaaattgtaaactagtatttcagcctgttaagttgctattattcttcagggtgaagactgtgaaaaatgtgaaaatcgaaatcttttcatgtattgacactagtttgtttcataattattttggaaaattgtttttagagatctatagtttagttctccagctctttaaattcccattttgaggtggtagaagttttagagggttgagtattcactgagttccacctgtgttcccagcatagtgctagagctgtaagatatataaaagggaagtgtaggtgaggggtccttcctcacaaagccctaactgggggataatgtatgtagaggaaaggtcataacctttggatgtagacagagttgcttgggcttgaatcatgatacctcacctctgagcttgtgtcctcatctctaagagtagatatcatctggagctgtagtgagtgttaaacagtataacatatgtaaagaggctcttcctaacaaatcttggtgctaagtatatgatagctattgctttctrtattatgtctttagaggcaattttatttgtggtaaatactaacattggcattttatgaacatttagtgagccttcaagatggaataatgcgtattttaaaattctctagaaaatgcattatatttaaaaaaccaactacttgcatttactttgtttgagtttaggtatttcacattaaattttataattaaaatatactgttacacaaaattagttgtagtaacagttattatatgaaactttatattctgtttcctaaataatcagaatctatattgttttcttatttaaaggcttctcagtcttggatttgaaaactttatcagagttgggagtgttaggaagattgccaaaccaattttaccttataggtaagaatgcaaaattccagaagtcacagaatggtcagagggaagtatggtacttttatatcactcttaccttaagtttgatttttgaagaatggagaaaggcttatctttacttggttaacttagaaaatctgtattttgctgagaatgatggtttccagcttcatccatgtccctacaaaggacatgaactcatcattttttgtggctgcatagtattccatggtgtatatgtgccacattttcttaatccagtctgtcattgttgggcatttggcttggttccaagtctttgctattgtgaatactgccgcaataaacatacgtgtgcatgatttataatcctttgggtatatacccagtaatgggatcagcaaactgtcgaaaggacaaaaaaccaaacaccacatgttctcactcataggtgggaattgaacaatgagaacacatggacacaggaaggggaacatcacacactggggcgtgttgtgggtggggggaggggggagggatagcattaggagatatacctaatgttaaatgacgagttaatgggtgcagcacaccaacatggcacatgtatacatatgtaacaaacctgcacattgtgcacatgtaccctaaaacttaaagtataataaaaaaaagaaaatctatattttgctttactgtgatgttatgaaaaatggaataaagaggagtgttttaatataattctttagcttgcatgctggctcagaaaatgaaagtgaacagttaaaagaactacatgcactaatgaaagaagacctgactcctacggaaagagtctatgtgagaaaaagcattgagcagcataaactggggaccaatagaaccctgctgaagcaggtaagaagtagtagcttcaatttgtttcttgatttatatataccattcagattctcttatttctgttgatgaaataatatttcctttaaataaaacaaactgctatgatagtttatattctactaaggtgcatgcatgtggatccttggatatagtctacccagtgtatgttttatgtttgcttcaaagcattcttcaaattcgtgaatagatccaactcaccatgaccgagtcatcctttctccttctccctgtttactttctttttataggcttgaagaggaaagtatagaggtgggaatagattccttacaagttaaatgaaattagttgtattctaggagaaacagtgatggagaggatctgaccctgagtaaaatatccaaatgaaatttgtgtttgatgctctccaagaaagccaagacttttagtgtttgtatatatccaagaatccaggaggctcagacgctagcttccaggtattggaagccaagactaagcacacaagattccaggctgtaacaggtagcactatctcctttatcaagttttgatctagggaagcctgggcatcagctgttggaagagaaaaaatcaatcagcagcttcctcctatgaaaggagagcatggggaaaagcaatggggatggagtaaaagaaagttgttggcttcttgggccacttgcacattggtaactttctgctagagagttgagaaaatgagtctacttgggacactgtattgatcagctattgctgaaataatgagggttaacaaactcagtctcagtactttaagacaacagcttatgactctacaggtcaagtggtgtggcttggcttgaggctatgggtaaagtctcttattctgagaacagttgctatggcatgatcttctaacagatggcagaagtgcaagagggcaggacagatcacagaaacacatttaaagcttcagttcatattatgtttgctgacattccatttgcacaggtcacacrgccaagcctaacatcagtgaggcagggaaatatactcccctacttctctggtgggaagcactgccaagtaacatggcaaagggtgtggatatgtaataatactttcctagggcgggaaggagaaactgaaaataataaccaatctataacaagttttggttctggaagtcctcagaaaacttcagactaactttctgttatttgaattatagagttaactctatactctcttcttaaccaaatccagaaaggcttagtttggctgtgttcaattaatacaaattagtcatttatgtaaactacttatcattttactcacccaacgtaacartgatatataagaatcattattcatatatatcattgttaatgatttcttggatgattttctgaatgaaagcccagttactatgatctattgctcatttgtatcacctattcacaaatgaaaactattttagaggaattattttttagaaattttctctgacatatttctaaggtccagccaggcattcggacctgacacatttctttctttctwtttttttttttttgagccagagtctcgctctgtcacccaggctggagtgcagtggcgcagtctcagctcactgcaacctccacctcttggttcaagcaattctcctgcctcagcatcctgagtagctgggactacaggcacattccaccgcacccggctaatttttgtatttttagtagagacagggtttcacagtgttggccaggctggtctcaaactcctgaccttaagtgatcctcccacctctgcctcccaaagtgctgggattacaggcatgagccaccgcgcccggaagacctgactcatttctaaagtggcatgtcttcacaataaaactaatttttaaaaatgcttcatagttaattaatacttgctaggtcagtaacaaaatcttttctgctgttagaatctcagcaacataataataaataaaaagataacataattttttaaagaaaacttaatactttaggtttttgtattagatrtttctttaaatttaaaaaatgcttcttgacacataactttagagttctcattctaagattgttttgtagatatagttgccagaaattaaataaaatgaataatatttcagagtggcaccaaagcttgatcatttttaaagaactcaatatttaaatactgtggaatttctgatataaatgtggctttaagatttttgtttttgtttttaacaaaagaagaaaacctaactgatacagggctattgtgtgtggtgaatattatttattattaaaataaggcagttgtaatgttttcttattttgtaggatctgtggaggcartatttaatttgtaaagcatattttttgttagtttgttgaaaaaaggtatggtcagttggtatgaactgcccttgctatcaagaagtgtaattttatagatcttcagattgttagaagagaataagtacagtcatatatcattctgagaaatgtattgttttacaattttgtcattgtgtgaacgtcatagtgtacttacacaaacctagatggtatagcctactacacactaggctacatagtatagcctattgctcctcagctacaaatctatacagcatgtactgaatactgtaggcatttaattgtaacatggtggtatttctgtatctaaacagaaaatgtactgtgaaaatatggtataaaatatttaaaatggtacacctgtatagggagggagggaaggagaaattggaaataataaccacaaagttttggttgtagaagtcctcagaaaactatatatactatagctttttaatagttaactttatagttaactgaccatgaatggagcttgcaggactggaagtcactgtggctgagtcagtgagtgggtggtgagtgaatgtggaagcctaggacattactgtacactactgtagacttctaaaaaaatttttaatttttttgagatagaatcttgctctgtccaggctggagtgcagtttgtgatctcagctcactgcaacctctgcttcctgggttcaagcgattcttctgcctcatcctcccgagtagctgagattacagactcctgccactacgcctggctaagttttgtatttttattagagatggggtttcaccacgttggccaggctggtctcaaactcctgaccttaagcgatccgcctgcttcagcctcccaaagtgctgggattacaggcgtgagccaccgcrcccggcctactgtagactttataaacgctgtacagttaggctaccccaaatttattttaaaattttttctttcttcaataataaattaactttagcttattataacattttgactttataaagttgaaaatttttaaaaactgtttgattcttttgtaataacacagcttaaaacacaaacattttgtatatacaaaaatatttcataagcttttttatttaaaatttttctttttttacctttaaaacttttttttttaattgttgaaaactaagatacaaacacattattctaagcttactcagggtcaggatcatcaatatagcactgtcttccacctctacatcttgtcccactagaaagttttttttgttgttttttttttgagatggagtctcgctctgtcgcccaggctggagtgcagtggcgcgatcttggctcactgcaagctctgcctcccgggttcacgccattctcctgcctcagcctcccaagtagctgggactacaggcaccgccaccacgcccggctaatttttttgtatgtttagtagagacggggtttcaccatgttagccaggatggtctcgatctcctgacctcgtgatctgcccgcctcagcctcccaaagtgctgggattacaggcttgagccactgcgcccagccttgtcccactggaaaatttttaggggcactaggacacatggggctgtcagcgcttatgataacaataccttcttatggatacctcctgaaaggcgtccctgaaactgttttatagccaacttttttttttttaagaagtaggagtacattctaaaataatattaaaagtatactatagtaaatgtataaaccgctaaaatggtcatttattatcaagtattatgaactgtacgtaactgtatgtgctatacttttatatgactggcagtacagtaggtttgtttacaccggtatcaccacaaatacatgaataaatgcattgtgctgtgagggttgtgatgtcactaagggctgggaatttttcagctccattataattttatgagaccatcatcatacatctggtccatcattgaccaaaacatcacattgttatgtggcacatgactgtatatgtatatgtacatgtatgtgtatgtgtttgtgtttatacacacgtatgtatatgtacacaaatgtgtgtgtacgtgtgtatatgtgtatgtacacatgtgtgtatagatagcgggctactaggtcagtgactacatctaattagaaaattcatagatttccctattgtttacatctaattctagagattaaaaatcagtttttatgaagctttttgccttgagagtaatggcatgctgctataatgtgtaacttacaagattcaaatacacttacaggctatgagtacattttatttactgttgtttagaattagtcatctttacatttttttttttttttttgagacggagtctcgctctgtcgcccaggctggagtgcagtggcgcaatctcggctcactgcaagctccgcctcccgggttcacgccattctcctgcctcagcctcccaagtagctgggactacaggcgcccgccactacgcccggctaattttttgtatttttagtagagacggggtttcaccgttttagccgggatggtctcgatctcctgacctcgtgatccgcccgcctcggcctcccaaagtgctgggattacaggcgtgagccaccgcgcccggccatctttacatttttaaataaataaaactaatgtgcttgaaggttaagcaaagaatatttcgttagcatatttaatrttctttgtgaagaactttggcctgtgttgatataatgtatgttgtctaacctcatctagaagataaaatatgtgcgtcatcctagatgtttaacaaatgcttgatattgtgatactttccgtctgaatatcaaaatatgtcttttatttgttcttgttaatgggcttgtggcttaagtaacttacatttgttgatttccattttgtatgtaggaataataaaaatttggagatacgatgacctaagatttctgatggctaggaattaaattaggactagctcactctctaattttagcctacaagttctttggtaaatacgttctcttattttcttttaataattgttaattaataacatttttgttgtaataaaggttcgagtagttggagttacctgtgcagcctgcccattcccatgcatgaatgatcttaaatttcctgtagttgtgctggatgagtgtagtcagataactgaaccggcctctctccttcccattgcaaggtaacctaaaagattctttccccaggggtaatacctgtaatcctagcactttaggaggctgaggcaggtggattgcttgagtstaggagtttgcgaccagcttggacaacatggcgaatccccatttctacaaaaaatacaaaattagctgggcatggtagtgtgtgcctaaaatcccagcaacttgggaggctgaggtgggaggattgtttgagcccaggaggtcaaggctgcagtgagcagggattgaacgactgcrctccagcctggatgacacagagtaaaaccccgtctcaaaaaaaagaaaaaaagaaaaagaataataatactgaagcatgaaaggattaaataacttgctgggtctctaaaatataatggagttcagatttgatataggtttgtttataaaactttgatttttccccactatatcctactcctatttaggaaaacatttagcccctaagaacccaatttacttcacttctaaaacaagggtttaagctaaatgactcctaagaaagactttaattttaagagtttatggattctaaaaaccagcatttcccaaatatgctttgtgaaatattaattccatgcagaggcaaggggcacctactaggttttatgtgcagggagggcaactaaattatataaaggattctttattgcataacttttcaaagcctttaatgcgcttaatagcactactaagctttattagtactcaggatacttcatggcatttgaatatttcgaagtgcaattttggcaaacagtgcaataaatgatgttaatgcacccattttaattgcttagattaatttttgaaattctgttttaggtttgagtgtgaaaagctgattcttgttggggatcccaaacagctacctcctactattcagggttctgatgcagctcatgaaaatggattggaacaaactctttttgatcgactttgcttaatggtacatactgctgaattcttacggaattatcatttattgattctacattgtgtgtgtgtgtgttgatagagaatgaaaatattagaagacttagtcctgccttaaaataatgtataattggagttgtctggaaagtaagtattcatcttaaagacaagtggaaccctataatttaagtgcccttttataaaaagaattttttcactatttgagtagtgggtaggagtatataacttttgctctaaaaccaaaaaaacctataatgtctctattatctacctagagcactacttcacattgtaaataatttttaaattattaacattttttaattggggttgaatttactgtcttagtctattttgtgctggtataacagaaaaacctgagactgggtaatttatagagaacagagatttatttcttatagttctggaggctgagaagtctaagacctggggacctgcatttggcaggggccttcttgcttcgttgtcatcctgtggtggaaggcagaagagcaagagagtgtgagaggccaaactcatccttttatgagtaagccactcatgtgataatggcattcatccattaacccacacacatataccaggaatggcattaatccattcacaaatccatccttttatgaggaacccactcatgtgataatgggattaatccgtgaggattaggcagaatcctcatgacctaaatcaccttttgaaagtcccacctctcaacactgttgcattggggatgaagtttccaacacatgaaatttgagggacacattcaaaccattgcattcatctaacataaaaccattttttaaatttcttaaaaaaaacttttttttctttacagcatgcagtttatatagcagaaactattttaaagtgaacagtttagtagcatttagtacattcacagtttcttgtgtaaccactacctctgtctggtttcaaaatgttttcatcacttcaagataaaattcttacccatttagcagttaactgcccatttcctcttccctatagcttctggcaaacaccagcctgctttctctctgtatggatttatttattccggatattttatataaatggaatcatacaatatgtaccttttgtgtctgtcttctttcactttttgaggttcattcatgttgcagcatgtattggtactacattattattattattattattattattattattactttaaagtacattcataatgttgtacaaccatcacttgtccatttccagaattttttcattatcccaaacagaaattttgaactgttaagcaataatttcccatttcctcttccctcagcccctagtaagtaacctgtgttctactttctagctctgtgaatttgcctattctaggtgcctcatttgagtagagtcatacagtatttgtcattttatgtctgtcttatttacttagcataatgtgtttagagttcatccttgtagcatgtatcagaatttcatttctttataaggctaaataatattccattgcatgtgtgtactacatttctgttgatagatagttgggttgttttcacgttttggctcttgtgaaaaatctcctgtgaacattgatatacagatacttgttcaaatccctgctttcagttcaatacatacccagaagtataattgttgagtcatatgataattgtacatttaaatttttgaggaaccaccaaacttttttctatagcagcggcgtcattttactttcccaacagcagtgcacaagtgttctgatttctccacattctcaccaacacttcttgttggtttttgaatatcatagccatcctaatgggtgtgaaggggtatcttattgtggtttccctaaagactaatgatcttgaacatcttttcatgtgcttattagccatttatattctttttgaagaaatgcctattcaactcctttgcctattttttaattgggttgtttggttttttgttgttgagttataggaggtttttttttttaaatatattctggaaattaatcctttttcaaatatatgatttacaatttttttttccattttgttggttgtcttttcactttaatagtgttttttgatgcacaaaagttcttaatttcgatgaagttcagtttacctattttttattctgttgcttgtgcttttggtgttataggtatgaaattattgccaaatccaatgtcatgaaaattttccccaatattttcttctaagaattttataattttagctcttatgttgaggtctttgatccattttgagttaatttttgtacatggtttgagataagggtccaacttcattcttttgcatgtggatatatagttttcccaataccatgtgtggaaaagactatccttttctcccatgtaattgtcttggaaccctcatcaaaaatcagttgagcacatgtacaagggtttatttctggactttctattcttttccattggtcattggcttgtagatgctaccttcttgctgtgtcctcacatggcagagaaagagagaacactgtttctatacaaactatacaactatataaacactatgtttgtatagttgccattcttgtttcattttctggtgttcatgcttgaatgtcagatactctctcagatctgtattctctgttttctcmgtacctggaattatggtggtgtcccatcaaagtgacaggacatctgaggcccaagagtatcccttctctgggaaagggacacagttcttgagccttcaattctactaaaaactgycaagttcactttccctttttcgttattcttcttaggaaccgttgccatcatatgaattctggctcactatgctgcattttctacttccaccccagaatcttgtttctttctcaatgacaagtacttttttaagtttatggcattgggttggctgtaaatctttctttgttgcataattgctgaattttctttgctgttgtttttgtatttattgtacctttatatattggagaatggattctacaaggcagctttattctaccttcttaattaagaagttccaccttagattgagtttcaagttgcattgaattttgagttgaattgtattccgttttgcaaagaacgaagctttcagttgtcttgagctgttaattgtaattgaatttaattgcaaaactttctacttcttctatgacaagtcagtatccaacctcttttgtattagacattttcaatggctttttaaaaaaaatcttaactaaaaaaaaattatcttaaaaaagggctgggcatggtggctccagcctgtaaatcccagcactttgggagactgaggtgggaggatcacttgaggtcacgagttcaacaccagctctggcaccggagctctgaccctgcctctaccaaaaaaattttttaaataaaaagttatctaaattcttaaaacatttttgaataggtaatatagtcatatggttcaaaattcaagcggaaccaaaaaacgtggaaatagtgaagacttctcctcctgtcccccaaccattcgttctctccccttcaaagaaactgtcattcctttcttgtacctttcttgtgatattttatgcctgtaagcaaatacataacattttccctccctgttttaacaaatggtagtgtactctgcacactgttctgccctttttcatgtacctattttcaatgccttttaaaatatgaagtaggtttttatttgggggaattctaaaagggcaaataagggatggacaaaaaagtgatttagtcgcagagtagaataaaaaacaattatgaatgagcttgatccatatagatagttctcagaaacatagtggatattgaaagaaacaaagcacaaagggataattatagtaaaatgccatttacgagaatttcaaaagcacataatatatattattcatagattcatactaatacaataaacatataaaaacatgtatgatgagtccacaaaacaaaatcaggactggggttatttctgggaaaggcggtagaagaaagcaatgaagggggatctttagctatatatgtcatattttatctaacaaaaaagagagccaaaacaaaaatgacttaatatggctaatgtcaagtctgggtggtaagttcatggatataatattgtttctttgctttctgtatatttgaactagttcacaattattaaaagtaaaagaaataaaagtaatcactactcattatagaaagtgtggaaactacagaaaagagaaaaggcaagctgggtgtgatggctcatgcctataatctataatctcagctgcttgggaggctgaggtgggagggtcmtatgaatccaggagttcgaggctgcagtgagttatgatctcaccactgcattccagcctgggcaacagagcaggatcctgactctttgaaacaagaaagaaagaaagaaaaagaaaagaaaagaaaaaagaaagaaggaaggaaggaaggaaagaaagaaaaggaaagaaaagaaaaaaatagataaagttgggtggggtgtcaggcacctgtagtcccagctactcaggaagctgaggcagaaggatcgtgtgagccccaggagtttgaggccagcctaagcaacagcgagaccctgtctcaaaaaagaaagaaaaaaggtaaaaacaaaacaaaaacatctgtaataacttcactgcccttaagagaaaactcttggtaatattttagtatttttccttccatcttttatcctagggttatatgcctatatcaaatgtatgtatttgtacatagttgaaaccataccgtaaatataacttctctcttgcctttttgaactttgcatactagtaaatcatctccccttgttactactagctttgtaatcattactgttgtcataaatatgttgatcactaagtattatgttgtgcagatataccataatttagtcatttctttaacatttgagcggctcactgcaacctctgcctcctgggttcaagcgattttcctgcctcagcctcccaaatagctgggattacaggtgcctgccaccatgcttggctaattattaaatttttagtagagacggggttttaccatgtttgccaggcaggtcttgaactcctgacctcaggtgatcctcccaccctggcctcccaaagtgttggaattacaggcgttgaaccactgcgcctggcgtgagcattatttactacagaactttttgctcgaagagcgttaaagtagataggacttggattttatgatgcattaataaaatctgaaacttctttcaagattcagaatgaaaaatggcttttactcagtgaggaaagttaacgagatatttacgacacctcctaattttttaagagatgcttttcaatttagtgttagaccaactccagatatattataaaagcataatgttggccaggcgtggtggctcacgcctgtaatcccagcactttgggaggccaaggcaggtgaatcacctgagtcaggagttcaagaccagcttggccaacatggggaaaccccgtctctacaaaaatacaaaaattagccatgcatgatggtgggtgcctgtaatcccagctactcgggaggctgaggcagaagaatcacttgaaaccaggaggtggaggttgcagtgagccgagatcatgccattgcaatccagcctgggcgacagggtgactccatctcaaaaaaaaaaaaaacaaaacaaaaaaccataatgttaggagtcaaacttactagataagtctaaggttgacgtcttttatattttctaatttttctaaattaatatgaacatatttttagtaatttaaaaaatatttttatttatagtctattctatcatggttgtaattcatctcctaagaccataatatagcgatatttttaattttaaaaatataattttctttccctagaagaacaaaaaaattatgttttatttttcttcatttaaatttcttagggtcacaagccaattctattgagaactcaataccgttgtcatcctgcaatcagtgctattgctaatgatctgttttacaaaggagccctcatgaatggtgtaacagaaatagagcggagccctttattggaatggctaccaaccctgtgtttttataatgttaaaggactagaacaggtaaatgacattaatgttgatgagagtcaacatggtttaggttcctggtttaattttgttgttgtttgtatgattttacttggtttttccatagcctttctgggaaatataatttaggatctatttcttactccagatagaaagagataacagctttcataatgtggcagaagctacgtttacactcaagctgattcaatcactgattgcaagtggaatagcaggctctatgattggtgtgataacattatacaaatcccagatgtacaaggttggtattatgtattacagtatttgccatatattaaatattacaattacatattaccatatttgatattacatttatagtagttggtttggtgcctgaaaaacttttggtactgtaattaatatattaaaaaagaaacattctgatttttttctggtctggctttttttctgtataattaaatgtaaacctaacaaggtttaattaaatttagtttacagctgttgcggcaaaaatgcaaaaagcaaattagagggaagaaaatatggtgtatgctttgtagacagatgggactgaatctctgttatccaaaatgttcttttattattggtacattttatcagtaaatcaaggatagataccaaatattaatgtacacatgagccaattacttctaactagatttttctcttagtattttttatctgtttcattattagtttatcagctccaaattagcrtatccaaatgagttacccagcaatagataaattgcttttgattttgtgtcataattaatatttttatctagtcatttatctatcattttagaaactagccaagtctatgtgagtcataaaagaaaaatgaaaattatttactattagttaaattacagtggttgctttgagcaggttcagaggcttaagttcttcacaatctcttactacatgattgctgttttttcttccacagctttgtcatttactcagtgctgtggactttcaccatcctgatattaaaactgtgcaggtgtccacagtagatgcttttcagggagctgaaaaggagatcattattctgtcctgtgtaaggacaagacaagtaggattcattgattcagaaaaaagaatgaatgttgcattgactagaggaaagaggcatttgttgattgygggaaatttagcctgtttgaggaaaaatcaactttggggacgagtgatccaacactgcgaaggtaaaataaaaatgggtttaattcatgcatttcaagttcaaactgacttttatgggttaatgcttggggtgcttcaagcaggaacagctctnctgggggaagtaactgacatgataatattgggacctctgtaaaataaagaatagttgtctcatgtcgtatgtttttttaaggaagggaagatggattgcaacatgcaaaccagtatgaaccacagctgaaccatctccttaaagattattttgaaaaacaagtggaagaaaaacagaagaaaaagagtgaaaaagagaaatctaaagataaatctcattcataaaaagacatggtgtaaatattttgtatttatgtaaattcagactcattttacatgatatattttttatatttttattactctaaaccctcttattaaaaatatgatatttaaataacatagtaaacacatgtaaaaattttgttcttcaaaaaagtgtacaaaaggtagtataaaatcctactaataaaaataagcttttttctaagaagaatgatttctgtttgccaaagaaatgaattttacaaggggcaggttatagagaatacctgtatacttcaataacaagtgaatgtctccagaactcatctgttggaacatatgtacagaataagatataccaacacctttctaaagtttatcagaatattttttaaatgattataaggcctccctattttataaatgaaaacatattcacaaatatgtttttatgtttaaaacttttgaaaagtacgcaaaagaagaaagaaaaacaccaaaagtttacacctggagatagcagtgttcaacatctgaccatggctagtgccttgcacccatacctgatatagtaggtgcttaataagtatccattggaagaatgaacagatgaatgaaagattacctttggttcattttcttctagtttttttcctctgcatttgtttgcatagtaggtattgatatatatatatatggattacaactttttattataaaaataatacattcttcatgtagaaaatttgcaaaatacaaggaagtatacaacagaaaacaaaaatcacctagaaatacaatacctggagataatcactaacatattcctttagtcttttttctatgtttatattctatgtgtatatatgtagttaagttttaagccatttgtgtccacactgattcttagacattattaacaaaagagcgtttatacatcctggatggaaaaatgacaagtgcttgattataattaatatcaatgcaatatttttaccaattaaaaacaaatcttagtgacccaagtcactcaatattcatttcaaagatgcaggaaaattcttacttgaattatttcacaataaaaagaatatgactagtcagtctctatggaactcttagggaaaaaaataaattcaacaacaaaacttgtggtttagtaattctccaagccttttcccaaatgtgttactgcgtgcaacaacagttgcttttttaagtgttcatccaaactgtgaagtgaaagatgtgacttccaacagatccttacaaagcagaggaatagttgaaggaagtattacagaaccgcgccttacccatgaactgtacaatctaactgacaacatacatttaaactggattcctgagttttgctgcccagacctccctattttttatttcttaattttggtctgttggccagctggagctaggtctcaagtaatttattttccccagaaagagtatatagattatatatcttttgaggttttgtatatctgaggatatatttctgttacatacacttatgagagctacgtaaacacgatgtaaattgcccttggcttcacttactgttcatttggatgatagttgaacttctgtctcagatctacagcgggatggctgactgattttgcacaattcctagtctaaatcctactagcttttatctagaactgctcaatcttctgcacttgtgcctgtgctgtcattaattgctcccttcccttcatctctcattttgtcagttttccagaaatttccatttctactatgataatagggagaggtcttgatggtatagagtaagatttctcaacttcggcatttttaacgtttttagaccaggcaattctttcttatgggggcgctgtcctgtgccctttagcagcatcactggcttctgcccatgagatgccagtggcaccttaccccaaagttgtgacaattaaaaatggctccagacattgccaaatattctgatgtagagggtgggttcagcattccagcaatctcagaaagcagtaactgcacttaaaagtatagctgccttattttttggtagttataaatcttgtatgtttgatatttaataaaggagagaagggtcttttttatttttaagcgagcatgcctactctgtttctaatgccattatacatgtagtgtatcaattttatattttcaatccagttatatcattgtagcagttcattactattcctcccaacttgtgacaataggtcagctaggagtgtcaaatatttatcttatgtgttttcgtagttattttaatgtgacagagcccattggagcctttttattattattatttattattattattatttatttatttatttttttgagacagagtcttgctctgttgcctgggctggaatgcagtggcacgatctcggcttactgcaacctctgcctctcaagttcaagtgattcttctgcctcggcctcccgagtagctgggattacaggtgcccaccaccatgcccaactaattttgtacttttagtagagacgggggggtttcaccatgttggtcaggctggtctcgaactcctgacgtcaggtgatctgcccacctcagcctcccaaagtgctgggattacaggcatgagccaccacgcctgggtcctttttaaacaggaacacattgaaatctttaaaagaacttcccattcaacaatattcctcttgtttagaacataagaagttagtataaatgttatggtgtagaaagtggcaaagagattgataatatactattgataatatacgatgctactattttttgctaagggattagctctatcttatacatagctattatttccctttttctaatttatagcatattgtaacagaaaactaaaactcaattaatagaaaatgttgatttttgcagaaccattctttccattctttctagcccacctgcatagctgactagattaaacactcttttacaccaggcactttagaaaataaaaagtaatggtggtgcaggggaagaaatggaaatggtttagtctctgtttccatgctgcccccattctcttggtttaggacggagattcccacctgggcaagaagatggagaggctttctttcactctgggtggaccttactccacagtggatatggtattaatagttttgtctctggttttaatctttaccatcctggattgggtcacagaatgtcatcccaaagagtaatgtcagctgcagcaggcctggtttatatctaggagtcagattttagtgctcttgccccagcccctgtccattagagcacagtcttcactctttcctttttcccaagacttttacaacagaaatggggtgagaagcagctctcacttttttatttccttcaaacacccagtaagggagtgggagatcgatgagctcatctactttatctttcttaaagagaataataaaacattcttctgattgggtggtgttgaccattgaggagttgtctttggctccatcatatattttgagtgaaaacatactatctgaaccctgaatattaatatggtctttatatttattttcagtaagaaaaagataacaatatttgacattaaaaaaaaaaatccccaaagcccaggctaacacattctttatctttgtcatctcaaattccaaggttggatagacatgaattgaactttaagaagtatcctgttcaataacaatcaaaatattaaaatttcttaggattttacaatatactcaataagccagttttacaattatagccatcaaacatctatacataacaataatcttaaaacaatgtctcccaactcatgttcagtaaatgataggattatataaaaatgtcaagattttaatttatagaataagtctattagtttatgtatcacaaattgaaatagaatgaaatttctaagctttaatctactcatcattaattgcttactttatatagtatgtgtgttggatttttttatttttgaagattttttcacaaacatctcatttaccccagtgggggggataggtattttccccattctgtacatgattaagccaaggatcagaaaaattgaagtgatccacctaatctaccatgagtagtaccaggcagggctggaacccaagctaacccaactctcaggctaggctatattgcaccacctgcattgtaagtcactttatcaaagggtaaaagacaccgaaaccaaaaattttacagtcctctttgacccaactagactaatgtcctgatcatttaccttagttaatttagtatgcaaccatttattaacaatttttttttttttttttttttttttttgagacagacggggtttcaccatgttggccaggctagtctcgaactcctgacctcaggtgatccgcccgccttggcctctcaaagtgctgggattacaggcatgagccactgtgcctggcctatttgttgaacagtctataccttcctggtaaatataatttttactagagaaatgggtttgttgatttctccttgaatgtctacatttgctactataagatgtagtttgctacttaatgcaagagaaatattattaacaaaaatgtatagctgaactggtgattcttaaaattctcaaaagtaggtgaaaaaataatatactttgctttcctctgtagccagctcctgtccttattcaaaatttgaattgtgaaaaattataggttacttgaatttatgaagcttagcttaaaacttcaaaataaaacataacttttggtattgctctttcatatttgaacaaaaaacatttgatttgggatgccaaagcaaacccaaaatgctgcttgttcttgactatggtttaatttaaagacagctgtgaaatatctttatactaattagatttgtttatattaaataagaatgaactggaaattggkgatttactcgacagatattggaccttgaaaattaaataattgttctaaaaacattagatcaacactgatttgaaatccctggtttgtaattagccatgagtgaaatgtgtgtttagttcaagttgtgtgtttggtttacattagcatgacttgattataaaataaaggaaaaatactatccaaatatctctgcagtcctctaagtttctctcattctgaaacactagttaggttgatttttaaaaaattctctgtgagtgtctgaattattgcaaatctggtcctgataataaatggagatgtatgtgtgcatgcttgcacgtgtgaaaaatcaggaagcagtcaccttgcaggctaaagaactggtagagaaaatttcctaagtgaaagttttagggtacctatggtagccagcctctttaaagacagatatagttcatttcattggacaaattatgatggatttgtggcttcttgaaatagaactaattatttctgtggtgccattaaagtcagtgcatccattgagcatctgctctgtggctggccctttgtgcacaacaggcatatgcagcttgttttatgtgttaggccaggcatggagtgcagagctagttatgtaccactccaccccgacatggggcaaagtagagctctccctgatggaaaaacttaggggcatactcgaagcaagaaaatcagcctcctttgcccattcttttggaatatatatttctaaataagagctaacatgaccatgatgccatcaggagctcgatactttgtctcctatgtccttaggttccttatatctagagtcagtgtcaggctatggggtatgaagtagaagctagacctttgaagactaggtaggtcagagaggtagaaggatagttgtgaatggaagggagtaactggtggggaagacaatatggttaacaaattctgaggtgtaaaaagatcccacgtctttcagcacagctgtggatgtatgtgtaaccagctgacatctcccacaggtttgtgactccttttaggtattatgagccctatccagtgttgtgaatggatgatgatgaccttcctgagcaacatggtaacatcacataagaacaaaattagagcataaggtaaagtgtaatgaacagcaagcagtccagtgtaatttgatgagtctagacattgttgtatgagaccagacgtatgcactatgtatgttgcctaggcaagctgactgaatataagggaccaaggacaaaatagtcaacatattggtaa

SEQ ID NO: 94942 - DNA, 40399 bp, Homo sapiens
gactatttgtgtcctgttttaattttcctattttgctctaagtctttgagcataataactatgtttattcattttgatattccctatcacatctaacacagtatcttctgtgtgcttattcaaataatgtgttgaagcacagactagtgtccaaataaatagtgtgcttttcaaaaacctccttttaatcttcagtgaaaatttttattatctagggcaagtctacgatcttgtgcaagaaagtgtgggatcgagaataggaaatatcactctaaataatcctgctttccctatttcctagccttatggcaaattctttgatcttcttatagtccagttttctcatttaacaaatgaagctaatggtgtcaactccatagattgtcctaggaattaagtgagagtatacatgtaatgtgcttggaagagtgcctgggacatagtaagtgctattgttttatcagttttaactttcaaccctggtagatctgctgctagtttgaaatagcaatcgtataactatgtatggagcctaaaactttcaacattttctatcagtactattcaccatcttgatcatagaattagagaatttttgtttactttgccagttgataagataaccaaggttcttttttctttaaatgccaccaaatccagtatatgactaccaaaatttgtataaaatctgatataaaccaaatagacatgatagatgtttatttggtttataaagtgataattgtgtatgtagaatattttactcctttaaactgaaatatccactataggtttaaaatagaattacatttgtacaaatttaacttacataatgttttgggttttttgtttgtttgtttgttttgttttgtttttctgagacagagttttgctcttgttgcccaggctggagtgcaatggtgcgatcttggctcaccacaacctccacctcccaggttcaagcgattcctgcctcagtctcctgagtagctgggacaacaggcatgcgccaccatacccggctaattttgtatttttagtagagatggggtttctccatgttggtcaggctggtctcaaacgcccaacctcaggtgatccgcccacctcggcctcccaaagtgctgggattacaggcctgagccaccgtgcctggctgacttgttttttttttttttcttttttttttttgggcggggggacggaggctcactctgttacccaggctggagtacagtggcatgatctccactcactgcaacttctgccttccaggttcaagcaattctcctgcctcagcctcctgagtagctgggattacaggtgactgccacaatgcccagctaatttttgtattttgggtagagatttttgtatttttgtatctggtttcgccatgttggccaggctggtcttgaactcctgacctcttgggctgcacttctagctccatcatcttaccagctggggaacattttggtcaagttacttgatttctctatgcccaaattcatgctgaaaatggcgataatggtagtacctacctcgtggtattattgtgaggattaagtgaattaatatgagcaaggtcctcataagaatgcctgacacatggtaagccctattattatttttgttacattatgcatatttaaatgatcttataaagcagttgcaagggcatggatggaatttggagtatattttatttctttaatagatgtatcaaggaggacagattttacatagtaaaacttgtccaaaaatatggatagggatggggtgacccaagttattcctttttaaaaaaataagaatgagaggcataaagcagactgactaatcagttgagttcataccaactattttccacagccacgattctataagatagaataacgatccagagatagaatggttatgccaatttttaaaaaagtttctttccagctcttaagagatgattctatgatacactcttccaagaataacaattttatgatatatatttttatatcttggaaagctgttggccttataagggtatgtcaaagtcttaaccaatatatgcaactccaatctgttatatcaaacatgagatcttattagatatccttggacactccacccctgaacagctgccatggtgtatttatatttgatcatttaaatcaaagtccacttaaataattattataaccaagaacgtcttcgcatgtggaacctgaattattttttagtgaagagagtggttatttaaaaagaagtcatctccaaagactaagtgtagttggcaagatgcccacaatttctggggaaggaattcctatggcccctctttattgtacaaatacagaacaaggaagcacctattgcccactgggaaggatgaccagaccactttgtggcttcacagggccacccttccctagaactctcttgtgtacactcagctgtctggggaggtgtcaggggcattggatctcacctctctttcattctgaggttcagcgtaattacaacctctctcatagatgggagtcagctgacaggaaaggataccaaaggcctccaagagggaactccccttagggaaggttggaagagtgaggagctggacatcatgccaggaagcagagtttgtgctgctgtcccctgcccccgacaaccacctgggcacagcagatattcttaggtttgggaacaatggctgcagatgggactgtagttttaaaaaatgcccctttgggaactcaagggccatgcatcctgtactgaggtctctgcagccatgtgaactaccttcacagcatcagagaaaagatcctttggatttgtgagaccagtttccagccccactataatcgagcctgaacactaagacttccctgtgcaccggcagattttcacttcactttcggtaaggcatttggaagcagaacggcctctttggactgaaaaatactgagtgagttacctgagaaccaatgtgaagtagctgttgaggtgaggcctcttggaaaaactggacttcctgctcacctgacataggaagcttgtaaggttttcatttgaagggatatttgatatttagtttattttacttcaaattgtttatgctgattttagcagttttttcaagtcactgaaaccacattcatttacataaacttagatgaccgatgacttttctgttaaaactttggaaatattagttggttacgaatgagcacttgtcagcatgcggttggcaatatttttattttaagaagattggcaatgaagaaccgaaaaactagcctcagaagccttttttttttttctaagaaaataaagtatcatttgatagacatccaaaccggatacctaaggcatcactctttttggattaaagatgtttattggtccttgtgaggtgtgagaattgagtccagtccaaattactcatctctaagacatttcatttgaaatatattggtgacattttgtcttttgattaaacaaacagaaacagtaacttcctaagcaaagagccaaataactaacttactttcctggtccagttgtagctaggacatcttatatctgtgcaatgctttttgcactatgatggtgtatgtaccacgatgtcgctctttctttctttctttctttctttcttttttgagatggagtttcacttttgttacccaggctggagtgcaatggcgctatctcggctcacttcaacctccacctccggggttcaaacgattctcctgcctcagcctccctcgtagctgggattacaggcacccaccaccatgcctggctaatttttgtatttttagtagagacagagtttcaccatgttgaccaggctggtcttgaacttctgacctcaggtgatctgcctgccttggcctcccaaagtgatgggattacaggcatgagccactgcacctggccaactctttcaagaagaagaaacattttaagaccataactagtccttgtacctcatataatgtgatctcattgtgccatatattctcagtgtgtaaacttttgtagggccaaagaaaaaacttcccttttgtcctctgaaggtttggtgaaaatcaactgacaaaaggcagataaatagaagaaaaggattttatttgatcatagttttatgtgacttgggagccttcagaatgaagacccaaaggtataaggggacagtccattttatgcttagtttcaacagcatatggacagctgtgtagaatatggttggacaaagagggtataacctaatgctattagactggggaaatccagtaagacctgtctgcttagattcttcttggcctctctccataggaccctctttggaatgggggtcttatgacctaaactcagacagggtgagtcatataatttcttcgtggtcagattttacatagaaacacagggagaatgctagagtaatatctatctatctatctatctatctatctatctatctatctatctatctatctatatctctctctctatatatatatattttttttttgagacggaggctccctctgtcgcccaggctggagtgcagtggcgcgatctccactcactggaagctccacctcccaggttcatgccattctcctgcctcagcctcccgagtagctgggactgcaggtgccagccaccacacccggctaatttttttgtgtttttaatagaaacggggcttcaccgtgttagccaggacggtctcgatctcctgacctcgtgatccgcctgccttggcctcccaaagtggtgggattacaggcgtgagccaccttgcctggcctagagtagtatttttatgttttatggctggctttataaaaaaggggtcctgatttctgggacctgatttgggaaagaggaattctagcttctatgactagtctggggaagaatgtgggaccagagacaggagaccaaaaggagtcagaggaaaatttttccttctaaggctgcttctgaggccttcattgtggggtatcattttctgaaccccaaaactttgaactcagtgtgtttcactctctgctcttgctgtgtgacctgaggacaaatcacttaactactctgagcctcagtttcctcatctgtctgacaaagctaatcatacctttttcaagaaactgttaaaactttaaggaaaataatgcatataaaaacacatttcggccaggcgtggtggctcatgcctgtaatctttgggaggccgaggtaggcggatcacttgagtccaggagtttgagaccagcctgagcaacatggtgaaaccccgtctctacaagatacaaaaattagccgggcgttgtggcaggcgtctgtaatcccagctactcaggaggctgaggcatgagaatcgcttgaatccaagaggcggacgttgcagtgagccgagatcgcgccattgcacttcagcccgggcgacaaaagtgaaattccgtctcaaaaaaacaaaacaataaaaccccacacaattgcttgaagcatagtaagtcctcaataaatagtatgtaagtaaattatcaagaattgggcagttggttctggttatcagtttatttttttttaatctagtataggtttaccagctttaggttagcacctaaaagctgcataatcggaatcatatctgcaatctgggttttgtcaaaatagtactatagaataaatgggagaaagaagaaagcaagctaaatgggaaaccgtgaatgaatggaggacgaaagaagaaaaaggcaaagtaaagagagaagtaatgtttaaaaactgagagatgaaaagacaagcaggagaaaagaaccagaagctagaatgaagaggcagtatcccatgctccagcgcgggtcaggacccggcccggcctggcagaggctcgcagggcgcagctcggggcggggcccagcaaagcaaccacgccccctcaggaatggagtttttaagggcggaacttcctgttgcgagtagcccctctacctccggaagagacgagtgcggtaacaccgttcacagagctagccggacgtcctccgactcaaggtgagaccgttattttcctcaccgcaccctccgggttcagcgggcgctgtgggtttccagggaggccccttccctcctcaggagcgggcgcgagcgccgtgcgcggtcggcgcctagggtggaggcagcctctgggtgacccctgcctgctgcgttatccggagctgccctgggckaccgggaacagttccggcattggagtagcggttcgctcacgcgacctcacttaacctctgtggcggcttctgtggaataattgcccctttttatgtccccaactccgaaaagctcctagaaacttggtgcatccccaggcccaggtagtcactctaagtgatggggcagcgcccaggtcctgtgctgcccgcagtcgcggtgctgggacaggtggcaaaaaggaaggtggcctggctcctacgctggaaggctgtgaccaggacagaaacagcaggaaacagttcaggtgtttatggctttgggaaaatgaaagtgagtaaactacggaccctgcccatcaataaatgtactgtgatttatatatatataactattcatatattatatataactatatataaaaatatatataaaatgtacttatatactttatatatagtacataaatatacttatgtatagtatatatacttatatatagtacataaatatacttctgtatacttatatatagtacataaatatacttacgtatatatacttatatatagtacagaaatatacttacgtatatatacttatatatagtacagaaatatacttaggtatatatacttatatatagtacagaaatatacttaggtatacatacttatatatagtacctaaatatacttaggtatatatacttatatatagtacataaatatacttacatatatacttacatatagtatataaatatactatatgtatagtacataaatatactatgtatagtatatatactatatatactatatatagtatctatacttatgtatagtatatatagtatctaaatatacttatgtatagtatatatagtatctaaatatacttatgtatagtatatatagtatctaaatatacttatgtatagtatatatactatatatagtatctaaatatacttaatgtatactatatatagtatctaaatatacttatttatagtatatatatctaaatatacttatgtatagtatatatactatatatagtatctaaatatacttacgtatagtatatatagtatctaaatatacttatgtatagtatatatactatacatagtatctaaatatacttatgtatagtatatatactatacatagtatctaaatatacttatgtatagtatatatactatacatatctaaatatgtatggtatatatactatatatagtatctaaatatacttatgtatggtatatatactatatatagtatctaaatatacttatgtatggtatatatactatatatagtatctaaatatacttatgtatggtatactatatatagtatctaaatatacttatgtatggtatatatactatatatagtatctaaatatatagtatataaagtatatttactrtattatatatgtgtatgtgtgtgtatgtgtgtgtgtgtgtgtatgtgtgtatgtgtgtgtgtgtgtatatatatatatatatagttkgcatccaccattcctggctcataactcccatagcccttgacaggaatcttggcccacctttctgtcttagaactagccatgaagaaattctctgacctaccttgtctgactgtagatcgtaagacctccatttcacaaggggtcttgccccatatacaggagaaaggaatgctggacagagaggccaagatgaatccgaatggacagtccttgctgggtttccacagtcagtctgttccatttggatcatactgattttgtgggatcacatttctacacagttgtcaatcatgcctatccagtgattatccagactcaggacctcagttgctgtctactcaagtaacttacatgtttctacatggaggccatacctctcctgtgagctcaggatccatgattcagctgcctaactgacatcttttgattttacagaggcctctcatcttccgctaattaaactcctgatctctcaaactcctacctatatcccaaacttgactctttttttgttgctccctgtttcagtagactgtgacggttatccatacagttgccagagtgggaaatctggacatccagattcagaggaaatctgaactcttcctgtccctggtactctgtagccaatctgttagattccctcaaaacaggtatctctgactctcttaacttctctaccagcaaaacttccctcccaggtttcagccaatcatcaggtatcctcccactactgcatcctgaatgtaaatctgctgaccctctaccaacacccactttctacccttctgttgagtagccacaatgaagtgattcttgaagccccttcaatcaatgtcttatccctaaggcccccctgtagaggatgatccccactacctccycagctttatctctcctgtttcccttaatctgagctgtcactcttaggctgttcagttagtcttcatgtaccaggcatcctgcagttgattgagttcatgcctgttcacttgttctcatcttggtttaatcttgtcttcagggaaacctgatctgatgcctaagtccaggtgaaagctcccctgttagatgcttctcattgcacttcttctccttaacttatattattccagttgttattttgcatgtagtctttagtttttgattgatattgagtcccctcctagaaagtgtgaacaggacctgattttcctccccatggtgcagtgtatagcatacaataggtattcagtaaacatctattgaaggatgaaggacatagtgacttctgggtggagaatccctagaagtagcttttgaaatgggtcctgaagaatttgtagagttacattagtgctgttagaaggcgggggtgtgagtggcttgagctgtttctggcaggaaagcaggtacagcttgagaacatctagttctgttaagactagtggagcagaatgggagtaagagtgaaaaaaaaaagtttggaaacaattcttgaagagcttgaaggagttgcttatatgactcatagagtggcttcctttaaaacaaaattttaaaaaatgctttaatcaggaagaaaaagcatcaggaagaaatttagcgtgtgggtcttttgccctcctttccactcctgtcctctttcctataatgtgggccccaagataggagtttctgaatagtcttcaagatgtaactctgtgtctattattttctattggaaaggagacaaaattagggttgttttataaatggtgccacagtttttagtctgacagcttaaaaagctttactgtgctaggtacagacttcagagtgtgatcaagccagtggtgagttattttagtcttcagaagtcagtggaaaactggacagtttagaacacaaatatatgttgggtttttttttccctctgtgaaactcagggaaataaatttgcttttttcttattttttttggtcctggaattttcttttctcagaatgttataatagaaagaaaaatggactttaaaatcagaattgaattcaagttctgtgtcatttgtctgtaattttgggcaaattatttctcatctctgaaccttaagttcttcatstttacacataattttttcaagtaccttttgctgcttcccttcaagcttcttttatttcagtattcccagtrttctttctcgttttcactgtattctcctccaaaatattatcctaacttttaaagtatttcttgtgttgtttcttatctattctccaaacgaatgttttggttttttaaaaaaatgtaatatggtacagacacactgggaagcaatttcatagaatagtctttatgaaaataatttgatataraaattaggtaatttaggtgagaaatgttttttactgggtataggcataaatcttgggaaaaactctagggcagggggtgaatcctgaaatgacagtctgtttctaattaagacgtttttgtgaactaactattctataattaagacttctaagacagttataactactttgtacagatatttgtcaaatattttcaraaratggctgatccttggcaggaatgcatggattatgcagtaactctagcaagacaagctggagaggtatgagctaarattttgtcaattataatcaattataatgtgattggtgggtatactgtgttgttgccttgttttgtttgtttcgatttggtttctttttttgaaacggtcttgcttgtcacccaagctggaatgtagtggcaggaacatggctcactccascctcaacttcccaggctgggctcaagtaatcctcccacttcagcctcctgagtagctgggactacagcaggcatgagccaccatgtccagctacttttcattttttaaatttttgtgtggagatgagggtctcgctgtgttgtccaggctggtcttgaattcctggaccaccttggcctcccaaagtgctgggattacgtgcgtgaaccaccatacccagcctgccttgttaaataaaatatacactttgatcaatctacatttattttcattttactaaatactcttgcgtgtataccctaattttatatgataaaattttctgtgatgacagttgtgaatctaaaataagatgtaagattatataatttttgtttttagaaagacgtaactattaaaggcttattttatagatatatttgtaagacatttttaagaatgtctttaaagaatattatttaagacagattgaatgtcttaaaccatttatgtattttatctttttgtttaaaattatgccttttctatttgcttaccaaaacctctttttaggtagtttgtgaagctataaaaaatgaaatgaatgttatgctgaaaagttctccagttgatttggtaactgctacggaccaaaaagttgaaaaaatgcttatctcttccataaaggaaaagtatccatctcacaggtatttttatttactgtgtacaagaaatgtttattatctcaccatttcttggggttctgcatatgagagtagcttgactacacggttcttgccaaggtcttccatgaagttacagtcaaagtgttggtcaaggctgcagtcaactgaaggttggactggaactgaaggatccattcactcacgtgattgttggcagatgtcagttcctgggggagttgtctgctggtagcttctctcagttccttaccatgtagcctcttcacagagtagctcacgacatggaarctgacatctcctagtccagagcaggtggcacaggaagggagaaacagagtgaaccagatgcaaattagaggggcattttgtgaactagtctccaaagttttgtatactgtcacttacgctttattggttagaaacaagtatctgcatagctcacgctcaaggaaggaatattaggctccacctcttgaaggacggaragtattagagagtgacctttttttttttttttttagacggagacacgctctgtcaggcaggctggagtgcagtggcatgatctcacctcactgcaacctccacctcccaggttcaagtgattctcctgcctcagcctcctgagtagctgggattacaggtgcatgccaccacgcctggcttatttttgtatttttaatagagacggggtttcaccatgttggtcaggctggtgttgaactcctgacctcatggtccgcccgcctcagcctcccaaagtgttaggattacagacctgagccaccacacctggcccctatttttaaaatcattacatttccttaatgatttcttatctgccgcaaatgtgtgtgtgcacacaccttaccctagtataacatcttataatttgaattttgaaatttttcacatcgctttattcatggggaaataaattaaagcttccttacatttatcagtctttacctgaaggaagaagaagcaacaatagaaaagtgtagggtacagacttttgctattttttttttttttttcctgagacagagtctctctcagttacccaggctggagtgcagtggcacratctcggctcactgcaacctccgcctaccaggctaaagccattctcctgcctcagccttccaagttgctgggattacaggcgcctgccaccatgcccggctaatttttgtatttttaatagagatggggtttcaccacattggccagrctggtcttgaactcctgactcaggtgatycgccctccctggcctcccaaagtgctgggattacaggcgtgaacctccacacctcgcctgctrtgttttatagtactctgtgtagctaaggaaatgttatgatttggaaattgttgaaatcagtgtaaagattaagagtttgtcctacttggcttttagtttcattggtgaagaatctgtggcagctggggaaaaaagtatyttaaccgacaaccccacatggatcattgaccctattgatggaacaactaactttgtacataggtatgttttaaaatgtctaatataattactctttgcatattaactggattgacctatagatactctatktaggaacatgtacactttagaaaattgtatacttcgtttatgcttctttattctaataaagtatatataaaatgtaaaagtggagcaaaatgtattatgcagacttatcagatatggaggaggtaaagaaatactaatgtgatcttgtcctgtggtgccaagtgycccgttcaccattctttttcccactgttggcactatctaaaaagggaarcaaacaacattgctgctttgagagtgggaagggcactttgcactgcatgccattttctattctttgagtggcatgtaccataratctatatggatctactaatatgcatctattagtagtaactatgtaaaaatatggttttttttttttaagatggagtttccctcttgttggccaggctgagatgcaatggcgcagtcttggctcactgcaacccccacctcccgggttcaagcgattcttctgcctcagcctgccaagtaggtgggattacaggcacctgccaccacacccgactaatttttgtatttttagtagaggcggggtttcaccatgttggccaggctggtcttgaactcctgacctcaggtgatcctcctgcctcagcctcccaaagtgctgggattacaggcgtgaaccactgcacctggccaaagatatgttttcaaagaataaaaataaatttaaaaaattataaactgactatgttaaaaagattgtattttagtaaaactaatgaagtcactcttggggagtgctgtcgatatagaatgagttcagtccaggagaaaaaacacggttaaaaagtgcagaggaggcccctctcctcagcccttagggtgacggggatggggatggggctggggctggggccggcaaaaaaaaaaaaattgcatgggtgttaggatgaatagacgtgcattctggtatttttttacggctttttcaccttaggcaagttagttaacttttytaggccacaatgttaaaaaacatttataaaaaggccgtattaatagcacttgcctcgtagaattgtaactcaactctatgagtagtacattaatgtaagaacttagtatagtgccgacacagagtaggtatatgatattactagaagaaagcctggtggaattgcccatgagagttaaaatcagtagccgcttctggtgggattacatatagatgtcatatttgaagttcccatgtagttgtacacatctgtactatatatacaatccttgaaatctacaaagctaaggtttagaatctatatgtgatagaatgttatatcttttaaatgtggaaagatgctaatatattttcacagaagagaagacagtacaatacagtgtgtatagtatcttatttttgttaaaataaaaactttcttacatatttaaaagtttttattttcaacagctttagcttcaatagttgaatgttgatcttgtctatttccttgatcttaattctcttgtgagtcagcagttacaacctgtgttcagactgtcatgcagctatggaaaaattttggctcaaagtctacttttcagaggccaagcctaaagtttgctgttggagtagagacaagtaacagccrtttattttgtccagtgcagtatttgtgtttatcacggtgtaggacataggaaaaaaacatcacaggccaggcgcggtggctcatgcctgtaatcccagcactttgggaggccaaggtgggtggataacctgaggtcgggagttcgagactagcctgaccaacatggagaaaccccgtctctacgtaaaatacaaaattagccgggtatggtggcacatgcttgtaatcccagctacttgggaggctgaggcaggagaatcacttgaacccgggaagtggaggttgcagtgggctgaratcrtgccattgcactccagcctgggcaacaagagcttaacttcgtctccaaaaaaaaaaaaaatcactaaaatatatgctttttaaccaaatcgatttaaaagtttttacagttttcttttttaaccaaattgatttaaaaktttttacattttggctttttttttaaagggggacagcatctctgtcacccaggctggcatgcagtggcatgactatggctcactgcagccttgaccttctgggctcaagggatccttytgcctcagcctaccggggaagcttggactataggcgtgcaccgccacactcagataatttcgtgactttttttttgtagaaacaggatcttgccatgttgcccagccaggctggtctcgaactcctgggcccaagtgatcttcctgctttggcctgctaaattagtgctgggaggagtgagccgctgtgcgtggccaygaaaaaatatttttacatagctactatattcatagaatttgaccttcaawagatagaaaacgcagtgcaaaatgcccttcacacttccatttctggtttcccaggatccatctctggagatgaccactgttacaagtttctcgtgaatcctttcagagatgtttcatgcctatagaagcatcctgtgtgaacgtgtgcctgtgtgttggggggagggtgtgtgtgtataatacctccactttatcctatttacaaagggttgtataccatacaaactgttttgcatcttagattttgtggggagtggagatgagactttttataggaaaaattttaagaacacttatattatgaaaagattaattttattaacaaaagttctatgttggttaatttgtattttgtccttttttttaaaaaaagatttccttttgtagctgtttcarttggctttgctgtaaataaaaaggtatgattttttaaacgtatagttgattatatgccttgctctcattttctgagaaaaagtaaatgtgttttcataataaattcaggtttgtctgtatatttgattatataactgcattattttgaatataagctacaggactgttaaaattttcatgatacatttgcattggataaaattttatgtattctgagaagcaggagttgtaagaagaaaatacacacaagtaactgaaatacaactcagtatttagtaaccattatatgtgtgatagagtcagatgggatagaagtttatatgtgatcttaaatgcttcgtggaagaggtragatttgagctgggaatgctttagtaggtgttagtgaagaaatacatttagaaaccagcaagtagcaggggccaaagcatggttggaaaatacagactctctttaggaacctacacatagttcaggttgtcttatgtgtaaatacttacatctaaagcctagcagaataaaacatatagctatagcatttccttgctgtttggctccttagttggtcaaacagtaaaggatggttactaacattttacctacctatcttcaaggaacttttgatrtgtaagatcaacatgtataacagcagttataacatttctgaatataaaacacatattggacaaatgacagcttagccccagggttgtattaattaatgagaatgtccagaagaagctacatgagctttcagtatataatcagctctgggctgtatgctggccctgccactgaactcaacagctcagcacaaagttagatgtgtgaacaggtaaagatgatatgtggtagaaccatgaaaaaaaatactatgggaacacaggatgtcaccagttctgctgagagtgggttgggaaaatcttcataacagcaggggtcttagaagttgatcatgtgttggcccttagaaaactaggggtttccagattggcgggggtgggggggtggtgggaagaggaaggcgttttaatcagaaagaacagcttggagaaattgaagaccattatacgtgtggggaatggtgagatgttcatggagagggaagcactgcaagtggccargacaaaggttagtttggccttgctgtgaggcactgtggccagtccatgcaagaaaatttagtttgtgtttcaaggtagttgggaaccagtagaggttttgaagtggaaagtgacagataattctagcaatgtagagattatactggggtgtgggtgaactaagtagaggcagtgagaatagccaaggaaatgccaaaattggaaagtgtttttgagattaaatttgaaggagatttatggggaaggaatgggaggtgatcaggcaatgaatgattttgtctttgaaattctgcaagactaggtttggaaccgtaggttcttcccccgattatgaggttgatgggagccaaaatgaatttgtggactgtaaaaaaccaacctgtgtgaatatggagagctaaaagggaaatggaagcaatgggagaaggaagaaaaaagcctgaggtgcctaacttttcagggtgaggcagaaaagaatgttctaaaatcataactgaaacgaattagtaggtgaggtagaactaagagaataatggtgggagcatggaggtagtgaattaagtattgaataagtcttgagccagtagactmcaattcttcagacaaggcatttgaggcaacaaagaaagtttgttgatactctctttgtgggactttcagaagaatgagtgatcagggcagaagccacattgtaatgtattaagaggagaataggagatgcaaagttactcattggcagtgaagggaaaaggatagaataacatttcaaaggttttgtaaggaggagagaaacttaatgagaaggtataagaagaaaaatccaagagactagggaatcagctgatggagcagtttttcagagaatgtatgtgagggtaggagtcctaacaccggagaagcgttcacttagaaaataggaaagccctgtcttccgaagcaggaggaagagaagtaaggtgggtgttcttagatctggacttggatgggaggagagtcaaggatatcagttctggtgacctctttctcttgattagtctggaaattaacattttaagtatcccacagtttagccatttcagtccattgttactagtcagtataccagattgtcttgttattttcttagaaaaaagtggatgaaacatacttaggtttggtaaaggaaacttgttttcctctgcagatagaatttggagttgtgtacagttgtgtggaaggcaagatgtacactgccagaaaaggaaaaggtgccttttgtaatggtcaaaaactacaagtttcacaacaagaaggtaggattaattccaatttttgatgctattcatattgtgtgctcaatattttattgttttttaatattcacctatggaattctccaggtgttaactgattcataaattgtgtttattatctctttattctttttgacttcagctttgaatgtggaatggaagtagggaaagaaatgtaattgagcaaacacttcaggctcagcattgtattttgtgatagagataggaagatgattaagactggcttcctattgtgaacccaaaatatctgagacaggtctcaatcagtttagaagtttattttgccgaagttaaggagttaaggtgacacagcctcaggaggtcctgacgacatgtgcccgaggtggttggggtacggcttccttttatacattttagggagtcgtgaaacatcaatatgtgtaagatgtacataaaggcaggacaactagaagtggggaagggggcggtgttcaggttataggtagataaaagacaaatgattatattcttttaagtccgtaatcagcctttaaatacacaattgagtctggctcagtgaatctgcatttttacataaacaatagggcagatgaagcaatcagatatgaatttgtctcaggcgagcagagggatgactttctctcccacacctgtgaagataagctatcagtctacattgccagggcaaaattcagccagaactgttttagggtaaagatcttgaggtccacaaggaatttccttgtgggcaaattgtaagggaggtatgtagctcttttgtctttgtaggtgtcttatttaggaattaaatgggaggcaggtttgcctgacatagttcccagcttgacttttcccttggcttagtgttttttgggtcctcagatttattttcctttcacactgtccttgtggaattcatggtttatgttttatctactgcttctaaaattctttatagaattcctctgatctgatgccccaggaccaattactacaaagtaaatgggtggaaaaaaagcccgttaaagctgggaatcactgaaaatgagacatatatattttataagctgaatggcaatttaagttctttcttctctattacatctgttggcctcaaaaaaggaagtgcaggcaaaattaatgtagagagtttatttgggccaaagttgaggactgcagcccaggacacacttctagattaccttggagagtgctccagagaacttagcagaggctcaggtttttaaagaaaaagggacacactgggagaggggatgatgagaaaagttgtactcaggaattctcatttgtttacagaaataacattgcttagtgattggctatacactgttgaattatagggtgcatggcattttatggctgcttggcatcagtgagtctagagccccctgtagcaagcggcttcaagtggcaattatttaactccaggggagtgagactgtctgctggtatattttaaatgcctcttcaggcttgataatttaaaggtactggcattctgcagattaaaacttttctttttctttctcacagcttattgaggttttgagttactgttcttccataaaccacaccaaacattttccacagtttgcacattgaaattcttttcagtgcagcaagaacttagaggtacttgcaaaacaatttgagtttagaatctttctagacttttatacctttttccctcaaacacttaatttaagagcagatttttaggctatttccttttcattaaaatctaagaccccatgaaatggaggatgcattcttatttttctagatgtcatcatgtgagaaaatacaaatcttggaccgaaggaatatggtagctttgatagaaacaactcttttcctttgcatagtcattcttcactttacaaagtattaaattatgtaacttttattttttttcctcccgaracagagtcttgctctgttgcccaggctggagtgcagtggcgtgatctcggatcactgcaacctccgcctcccgggtttaagctattctcctgcctcagcctccggagtagctgggattacaggtgcgcaccaccatgcccaactaattttttgtatttttagtaragatggggtttcaccaygttggccaggctggtctcgaactcctgacctcgtgatctgcctgcctccgcctcccaaagtgctgggattacaggtgtgagccaccatgcccagccctaaattacgtaactattaaatgtagtacaacagttacagaaatgctcagatcaaacacagctggtgaacatacatctcmattggtgggaggaggtgagatctagggtgttgggtgtgtcctgagcttcaaatggaaaaccttggataacctgtcagccttgtaaatggatgtcagagaattttacttttgttgtaaaagtaaaatttttacttttactgtaattttactgtaatttgttttcttccaaatctatacataaatcccttattgaatttagtctctcctttttaaatatttaagacatttgctgtttcccactaagtattatgtatgcaggcaaattggttacattatgtactttttcaggaagggcctaagcagctggactctgatgcttataaaaaggatcacatagggataattaatttatcagtattttattatttaaatgcttataaagaaacacgataaaacaaggaagagggatacaaatgccctcttctgaattacaagtgtcaggtattttctagaagtctaaatattgaaacctaacactttctttttagatrttaccaaatctctcttggtgactgagttgggctcttccagaacaccagagactgtgagaatggttctttctaatatggaaaagcttttttgcattcctgttcatgggtaagctctttaccattattctatctctctctttgtatacgtgtgtgtgtgcacacaccttttttttttcctgtaccattttagagtaaattatatacatcatggtttctaaagaatagggagattctgttccataaccatgaaaccactgatttcrtaaatacactttttatctaatttgtcatccatattcagttttgtcagttaatctgctaatgtcctttatagcatttgccttccaataaagtaggattcagtctagagtcagcattatwtttaggtgtcatgtctccttagccttctttgatctggaacatttccacagcctatgaaattacttcctttaagttttcaaattatttgcatagaagtctgtaagatagactcttataattaatttctggcttctctatatcagtggttatttccaccttgtcacttattttgtctatttgtgctttttttcttgttcttttttctcaaaraaccaggattttaatttaagctggttttttcttttctgcactattattttcatcttcgtgctttcttttggtttgtttccttttttttcctttttgattagaaaatttattataattcctttatgtttattgatgtaratatttaggctatgaatttcatctgatcattgttttcattgtatcccataaatactgatacttactgttttcattatttttttcataaattctgtaatttgcttgtatttcctcttttactgagagttatattcttaaattttcacaaggagagtctgtcttagtccattttctgttgcttataatacctgaaacttggtaatgtgtatgtataaagaaaaggaatttatttctttcagttatagaggctcagaagcccaaggctgaggagctgcatctgatgagggccttcttgctggattctttgtagagtcctgaggcagcacagaatgtgacatggtggggctgagcatgctagctcaggtctctgttcttctctttataaagccaccagtcctagtcctatgatgactcattaatytattaacccatgagtggattaatccattcatgagggcatagccctcttagagaccccacctttcagtactgctagattggagattaagtttccatatgagttttggagggaacaaacattcaaaccacagcattccacccctgacactccccaratttgtctttttccatacaaatacactcattccatccccagggtcccaaagtcttcacttgttctatcatgaacttaaaagtttaaagtccacagtctcatttgtgagcctgtgaaatcaaaacaagctatctgcttcaaagatacaatagtgacacaggcataagacaggcattcccattccaaaacggaaaattaggcaaaaagaaagaacaggcgctaggcaagtccagaattccagcagggcagacatgaaatcttaaagctcaagaataatcacttttgactgcatgtaccacctcatggagacactgggggttgagggctgggtaaaggcctctggcagccctgcccctgtggctttgcagggtacagcccatatggctactggcatgggttggagtccagtgcctgaagctttccaaggtgtaccttgcatgctgctggtgactccacagttctgaggcccaggtagtggtcctgctttcatggctccactagttaggcattaccctagtggggactctctgtggtggccttacttcctgggctctactaggctttaccttggtggagattctcagstaccactaaccccacagttccactgtggctctgcccttgaracaagtctgttccctggctcccaggcttctgaggacaatctttgaggccaagtggaggctggaaagcctctacagctcttcctttatgcaagcttgcagaattagtatcatactgctaacatttacaacttataccttgtagagatgtggtataagccacacctagggtcacttgaccttggctgggatgtagggagcacagtctagggtggccctgggcagccagcattggagagtatcccaggcctgttccatgaaaccattctaccctcctttgggcctgtaaagggaggggcagccttgaagatctcttaaatgccttcgggttctttctttcattgtctttagaagtaacacctggctcccttgtagctgtgctaatctatttagcaaatggttcctggctaaccctcggtttcctcctttgaacacaccttttcactcttggccaggctgagttttccaaatttttttgctctgcttcctttctttttggttgtttgtttgtttgttttgttttttggagatgggttctcactctcttgcccaggctggattgcagtggtgcaattatagctcagtgcagcctcaacctcctgggctcaagcagtcctcctacttcagcctcccaagtagctgtgaccacaggtttgcatcaccacatccagttaatttttatatttgtggtattttgtataaaaatggggttcgccgtgcagcccaggctgatctccaactcctgggctcaagcgatctgcccaagttggcttcccaaaatgctggcattataggtgtgagccactgcatctggccactctgcttcccctttaattattcatttgtctttaaattacttctttgcttgcaaatctcagcataaatggtcaaaagtaaccatgcagctacttctataatttgtttagaaatttttttctgccagataccctaattcattactctcaagtttaggctttcaggaaaccctgtcaagttggctggccatggtggctcacgcctgtaatcccagcactttgrgaggctgaggcaggtggatcacgaggtcaggagatcgagaccatcctggctaacayggtgaaacccyrtctctactaaaaatacaaaaaattagccaggcgtggtggcgggcgcttgtagtcccagctactccggaggctgaggcargagaatggcgtgaaactgggaggcggagcttgcagtgagccgagatygtgtcactgcactccagcctgggtaacagagtgagactccatctcaaaaaaaaaaaaaaagaaacccttagtcatagacacagttcagacaagttctttgccagtttataaccaggatggcctttcctccaggatccgataccttgttcctcagttttatctgagaccacatcagaatactgttcctatttttattagcattctggtcagagctacttaactcaatctctaaggcattccaaactttccctggccttgtcttctaasccctcaccaaaatctcccttaatgcttcattcacggaaatgcaggcattttctagcctgctcctctgaattcttctgtcttctacctattacccatttcaaagccgcttctgtttgttaatcagcatcaccccacccttaacctataagccatgaacctagaaggcaaagccctcatgacctaatacctcttaaaaggaccccacaccagtactgccacattggggattaagtttcaacatgcgttttggaggggacaaacattcaaccatagcagacacctttttggatttttaaaaatttcatctttaatctccagttttattacattttaacagttctactttctgaaacctactgatggtttccttgtgccctgttctgtgatcaatttttgtaagtttcatatgcactgaaaaatagtataattccctatttccagggtatgacattcagtatatagccaaaagatttacctaattaattttttttgtctatttgccctgtcttatactgagagtctctgatgtatcagtcttttattattagtgtgtttctctgtatttctccttgcaactcttttatgtaggtggaagctgtgttatttgatgtttattcataatagttacatacgtagttcattgtgtaatttttacgtattctttgtcttgtttcatgtttttgtgcttgaaatttactttgacatcagaattgcaattcctgcttttttttttttttttttttttttttgagacagagtctccctctgtcacccaggctggagtgcagtggcacaatctcggttcactgcaacctgcgcctcccaggttcaagcagttctcctgcctcagcctcctgagtagctgggattacagctacscaccaccatgcccggcttttgtatttttagtagagacagggtttcgccatgttggccaggctggtctggaactcctgacctcaagtgatccacccacctctgcctcccaaagttytgggattacaggsgtgagccactgtgcctggcccctgctttcttatttttcctgtttgcctgataaatctttgtccacccttttatttttagtcctttgaaccactgcatttgaagtgtgcctgtcatayacagcattgcatggaatttcactttataagtcaatttgaaaatctttttcttttaacagataggttaggcctattgatttattgatatgactgtttttgtctcaattctgttgtattattgtgtggtataattactgtctgtatgatgttatagttactgcgttcatttgatgtgccttctctgcctcttttaaaatttatttttgtatttataaagattacattttattccagcaggtttcttttgtaatacaacttttatagtacctttaatattattttcttacttaactatttactrtctagaatgttttggcttcgcctattgcctatgtaagtctcccattccccttttctctctctttatcccatttttaaagttgcattctgtctactttgccagaacatattatatttacatattcttcaacccatgaccccgctttttgatcctagttcttcatttaacattataaaatgctcacagtccttttgtgaagtgttgcaggcacctttttaattggttgaagttcgtcctctagtagattccttgggggagggcacatgtgcacagttttccctgagtttgggtattttccaaaatgcttttctgtggccttgagacttgaaggacagcttggctggatatagtatccttaatgaaagtataaatttcttgaaaatgttctttcactgttgccttgctttgtatattgtttttgagaaatctgatgcaaatctaatttttcttggcttttacattattttatcttttaactggaggctgttttttttcccctgaatttttggctaacagtttttaaaggatatatcttagaattgctcattctgggtcagtcgtgtgtttcagtatataggttcatgtctttttaatttctgggaagtttccttaagatatagtttaagtactagtgcacttctgttatttttttctttaaagacaccagtgggaatgctccatctcctttgtgtcttcatttcagccattttctctctgtctctttttacttctttcttttattgcttttcctaatttctctttattaagttttcttatcatctgttcttttattggcaccttgtaatttattcttcgttcctgacataattttgtcttttatttcccccccatttctttcctgagttcagtcatcttgttttatgtacgtattttggtccatttgtgctcttagtttctatatcgctgatgtaacatttttttcagtattcacaagtttttgtttgaaaatatttaattcggattcgattgatattcattttattccccttcattgttggttttgggggagagactttacagcaaaaagaaaaaacaaaaccattttattaacagcgttcgatgttttgcagtagttttgtgtgaatgtggtctacttttttctattttcacttcgttttgtgatcagggttcctgctttctgaatttcttattttgccagttgtgcctttctgtgcattttcttttatgaatacctgctggttgtaratagagttggcttgtcttgtttatcattcatttctgcagggtccttaagttttcactctttttttttttctttttttcctttttcttttttttgttattattatactttaagttttagggtacatgtgcacaatgtgcaggttagttacatatgtatacatgtgccatgctggtgtgctgcacgcattaactcgtcatttagcattaggtatatctcctaatgctatccctcccccgtccccgcaccccttagttcctacttttccttcacttgtttccaaggagtaccatctctgctatcttatttgattctccttcagaatcacagcttctctgaggctgcctggtcaggttctgagtgttttctagccccttacctctagccaagactatgaattaccaagtgctgatctgtgctcagtgtttttgtttttgtgtttattgtctcagtgactcttttctgagggtggttttgtctttgttccctgtgggtcctctgctcctccttgttctttctcacaaagtcttttctgccttctctgccctactctgtgtatctacgggcttccggtgctctgttaraatttatttatttgtttttcttctacttagaggtagtttgagagtttgcatttcctgatttctatctgaaagaatgggtcctatgggttttatttgtcctcctggttgatttcattttattattttccaggagggtatacagggagtttcaaaatcgtcatgctattattattctccaaatctcagagtccctctgtaatgacagtttaataaatgaagaaattaaaaggaaatatttatccttacttttatccttaaatcttcaagaaaagctaaaggtttgaggtccttaactttaatatagttaatgctatatattattttattttttatgtatttatttttttttctgagacggagtctctgtcgccaggctggagtccaatggtgcaatcttggctcactgcaacctccgcctccggggttcaagtgattctcctgcctttgtctctggagtagctgggactacaggtgcccgccaccacgcctggctaattttttgtatttttagtagagatggggtttcaccatgttagccaggatggtcttgatctcttgacctcgtgattcacctgccttggcctcccaaagtgctgggattacaggcctgagccactgcgccccgccattaaatagtatttctttgaccatagttgtttatatgaaaaatcataataaaaatcctttattgaacaaaatctggtgaatgtaaataacaacataatattttcaccacctactatttctgtctttttctttgtgaaaatattatcaatgagttataagagtcctagaactgatcaaagatcatctaataatccagccttattttgtagrtgagttgactgagattcaagtaggtgatgtggctkcttgagatcgcacagctggatagaaatagggctagaatcctggctcccagatcatttctgtttcttcaatattggacttctcttagaagtcagacccttcaaaatataggttgaccatgtacaaactaattatgtactatgcatatgtggtctatatagtaatgagtaaagtaaaagagagcctctgtcaatagctacagaacctcccagaatgatgcccttgagagaagggcaataaacttgctgctacagtgtgctgtcttgaagcaaggactttaaccatgggctataaaatggttatgttactcataaacgagttgcaagaggtttacaactttaacctttaattttgctgttggctgaaataaaaactaatttttacttcagatttttttcaaaagtataaccaggaaaatattactaagaagtactgacttactgattgcttttatgatcttttgcattcagctgattcttcagctttgcagtgggatttcagaatcacttatacaaaacaatgaaactaaagagagttataatctgaatgaatgctttaaataagcagaaatagtctaataggttcctaagaaccaacatttatgaggcaaagtacgttattctggatcaatttcctttgtttaattttcaggaattcatgtagatgaaattcactatgtatggtatatgatattttctgacatcatggtttagagaacaattttatcataaaaaaagctatttttattatggacattttatatgctaggcactctgctaggtgctttacaaatattagctgtagtcattagtacatttgtctaaagtaaattggaatccttatttgatgacatgacatgggagcaaactcaaatctttgtgacatcaaacataatcctttttacaatgtgccatgttagctgcataggcggaccacagctgtataggaggaccacataagataggattcagaacacatagtgcagaatctacaccatagtcttaattatctggtagttaagtaatctgtttggtaatcctttcatagtattttccataaaagaatattctcttgctgattgtaagaccatttgcttgagatcccatggtgctcattagaagtgacggaagcaccgctagtagatatcactgttgtttggctagcctaggattctatatctgaatagagtaccagggaattaattatgaaagaccttggtatttgcattctatgatatgagatatcaaatatcacatatctcatgggagaagtggggaaatgcacttttctttataactaaaaaactgccactaaagttaatttgattttatttatctgggaaacaaacatctgtggaaatttggtgcacttactactactttctcaaatttaatgtgcttcaaaaacatatgatggaaaacatgccaaatcaatgacatcatgttattctaatcctttttaaaatttatttggcataaaggatgtacttaggtgcaatttttttatttttatttttgagatataaaacaaatgccacattagtcatcagttttccatgtttttaaataaataaactgtgaaagatctcattgaacagaactcactcccttattaccatcgctttaaacagttggagaaggaatttgtgtaaaaaccacttgaaagtaacttgtaracatgatgacgtttgtcttctaaatacacatttcagcgtgtgtgtctttaataaaagggacattgtctaacatagccacagtacaatgataaaagtaagggaattaacatggatacataatctaatataagactttattcaaattttgaaaattttaatccaacatccagtctagagtcatgtattgcatttagttgtcatttctcatcaatttcctttaatttagaacttgcttagtctttgtcttttatcaccttgacatttttcagaagtataggccaattattttgtagtctgtctcttgaatttgaatttgtctggtttcctcatgattatatttggatcatggatttttggcaggaatgccgcaaaagtaatgttctgtccttctcagtgcattttatcaggcacatttctttttgtcccattatgagtgatattaacttggataacttggtaatggtagaccattgtaaagatgctatttttccattrtacttattatgtatcttgtggagagacactttgacactctgtaaattatcagactcacccattaattttaacattgattctttactgaataaattattactataattgctatcaagtgtatttatattcaacttaacttgtattcaaggaagaggtgctatgagagggcaaacctgcagtaattttccaaggcaggcttaggtctttgcagagcctggcatgctgttgttgctttaggcacatgtatgacgcacacccagttgaaaatgacccataccatgatattttacacctcctagagactatttgcattgtgggtatgtgtatatgtgtgtaaaataatataagctttagtagctggatttagacaaatattaatatacttgcatttcattattgtagaattaagcattgtctttattttttatgaaaaattattgttttaatgtttatcttattaaattattgctttgtgagggttttgtgatttatataatatacgatgataattagatttatacatatttttattttacaattagatatcacctcttaaaatctttatcctctagatcgttccaagtttcttcaatcgacacttaaagtgaagttaaggaggaatatcttacttgaaaggattattttttccaattttatttctaaattctatttgttaggatccggagtgttggaacagcagctgttaatatgtgccttgtggcaactggcggagcagatgcatattatgaaatgggaattcactgctgggatgttgcaggagctggcattattgttactgaagctggtggcgtgctaatggatgttacaggtaaaattatggagagtgaagcagatctccacacatctgttggacttttgtccatatgtagaatttaaaaaactttttgatatatgttatactgcagttttygaagcagaaacaagctatataattgtgtgcaaaatcaaaataagctttaggagatagaggtaaggataagaggtaatggtaatgtgagacttacaatgataaatggctaatccttttctagtgtgagtttcaggtactcctgaaaggctgtagaaaaagcctagaccaagtttgtccaacctgcagtccatgggccacatgtggctcaggatggctttgaatgtggcccaacacaactttgtaaactttcttaaaacataatgagttttttgcgattaaaaaaattttttttagctcatcagccgtcattagtgctagtgtattttatgtgtggcccaaracaattcttattcttccagtgtggcccagggaagccaaaatattcgacacccttggcctagacagtcaccgagtctgaggcttatacccagagctctttgaatggtgacaatggtgatagttgatgatggacttcctccaccatcactttctgtgttgagactagagaagttaaataattgctttcaactgatggtgaaaattttaaaccgaagggtgaatctgtgctgaaagaattcaccagtgatctgggagaaaggcaacaaagaaataaggaaatgggaaggacagtggtatgaaaatgcattggattcacattttctgtccatagattcttaaacaataaagaggtaataagaatgcacaaaaatagagaaaatatgacattttctaactggtatgacttcattatttactcaaaaattatgcttagaaacagttatatattgtctaagcttatacattgtagaaatgtaacagtagatttttgtttaagaaaactgaaagtattaaaatgttatgtgaccatagtacatattgctatacttgttttatatgaattatttttgtaccagataaaattatttttcatacttgtttgcttttaggtggaccatttgatttgatgtcacgaagagtaattgctgcaaataatagaatattagcagaaaggatagctaaagaaattcaggttatacctttgcaacgagacgacgaagattaattaaggcagcctcatagtcaatcccagttgcttttccccagatttggtgactcatcaatggatatgtgttttggatgtatgatatgcttggtttaaattctctttgtccaggtcaaaaatttggaacttgtttcttattttactatgtctakgtttgcaagaattgacataatgtttgtttcactgatttaaaaaattttgcatgtaagaatgtactttaggaaacatacccaggaagtacagttgataaatataacatcaactgaaatagtcaattagcaattttgtgtttctaaatatctatggtcccctgaaattttgacttagtatataggtgcagagacacccacttagaaagttaactgtttggaaaaacatttctctttagtttcaaaaaccatatataattaaatttgtaaggatatactgagtaccctaggccaacttttttttctttgcagagaaccttttttgttttattcttcagtgttcatatagcacctggcccattacatatctaggcaactaaaaacaaacattgtaagaatgaatatttttaatgtagtaattcctagttacaatagatacataaagtaatgaactcagcattctgtacttttgcttcaggtttgaagtaaaaattatctagttaaattttttttatttcacgttaccatgccatttcacattaccataccatcagatagcatggcttattgtgggcatttctgcagtgaatacattttccaaaacagttaaattgtctgtttggatttgctttaaagtcttgtgtaagagagaagaaactatttctataataaaaagcactctcatcagatatctgacataattagatacaatataacattttactaagttcagtattcatgttttaaaggtgtttatactgatttgattgtgctggcaaatatactgtattgttaatattgaactrtttatttttctcttagtcktcttatttaattaacttcattgccgctggattmtgttcagcctttaaaaatatttcttagtggtcattgctctgcagaactcaaaaagaaaattgtacttgttcatagacatttttaaagggttaatttattgttcagccttatcccttggcacgtaaacagactactagacttattgtaggttcgtttgagctttgtgttgtaaaattaaaaatgcttctrtaaagttttcaaggtagggagtgattttattattgtgtatatctaatatattaagtatgtgtgatactaaggtttgactgctataattatttgtactgttgatcacatgtacttaaaacatctgatactgtattctaagacaggttgtttttgcaattaaatttattttaataagacratcatgaataaaactttaaattgatatttttattattattaccattatcattattattatttttagattcagggtctcgctctgttgcccagggtctgtctctgactgtgctgtggtgcagtcatagctcactgtatccttawaktccygggctcargwgatcctcctctttcagtctcytgagtagctgggactataagttcatgccaccatgccctactaatgttttaattttatttttgtaaagatgggatcttcctatgttttccaggccccttggcctcccaaagtgctgggattacagatgtgagccaccgagccaggccaygatatttacattattaaagttaatagttcaaactacttttagaggctttgttttgtttttgttttttgaagacagtrtcttgctcttctgctcaaacagtaatgcagtggcatgatcaccattcattgcagtctcaaccttctgggctcaagcagtcctcccacctcagcctccctagtaactggaaccacaggcacatgccaccatgcctggctaattttttagtttttgtagagacagaatcttcctatgttgcttaggctggtctcattgggctcaagtgatcctcctgcctcagccttctaaagtgctgggattacagatgtgagccattgcacccaacatacttttagaggtttttgtgttgagttacaaatatttgaaacttgcaaatgtaatttaatatatgttcttattttttgcctgtaatctttccaacttttctaaaaacctatatttttttctacaatagcttttccatctgtttattctaaatgcagttgcatattttgtgtctgaaatttctttagatgctgaaaaaggatgatcgacaagtgaattatctaataatatttgaaaatatttctttgagtaacaggacttcttagacttaacatgtatattttgtatcagggtatattatctttctgcatgtggatacatacacagatacatacataaatatacataaatatatgtacttgaacacataaaatatatgtacttgccttttaacgaaattgtgttcattctatcctatacttacttgtgaagcattatttggctttgttatgaattaccagccattcttagaattggtttacaatgctaagtcagaagttttcctgggatatgtattattctgactaatttgtccttaattttaagatctagtgtagagcctaaaataccatgtttgaagaaaacaaaaataattattttaaactgtttccttttacctcagttccctatgtttaccctgcctcatttagaaaaaatacgtactttttattactgtctatttagtcacacacatagtttaaaatttcaaatactgctacacagttcagaatgaaaaccagcattttcctgttccattctatcccaccctagtttatctcctcaaactcttttagcagttgttgctggtatttacctccatctttgaaaaggatagatatgttctactaaatctttatttattggcttcactccatctcagttaacttggtattatggaagcagaccccatgagttgcttttctgtcctcttttccatccttctacaatagtgatatataaaattttttgctaaaattatgtccattgtttaacttacgacttttattaattggttagctagcaagtagtgtgttatgattacagtttctttcctgtgcaactttttatactttctgaaattaacagatttctcccaggattttccattggttcaccatacttaagtattctgttgtgtgagaactattttcttttctctctggagatagcccttttggggcccttttccttttcttctgtttgaactggtttctggctgggtatgctgcactgtccttcagggcttgcctctgcttctatgctgaattttccatatcctgggtctttcttagctcattttgatgagcccatcttccaagtgcttcctgtgaaaggtacttgggaggtaaaattttgtgatctctggtatcagcagatgtctattcctgcttgctgcattcatagtttgcctaggtctagaactctaggttgcagcagtgtttccctcggaatttttaaagcattgcttcactctcagagctttcagcattgctgatgagacactgttgtgacggtcactccatcagtgtgtactcttttctgttgaagattttaggattttctcttatctagagttttctgatttccctgtgatgatcattgacttacgtctttttcattctttgtgttaatttttcgtgtctttttgtgctggaaattcctccagtcttaagggttttgtttctgtggtaacttccccccttccttagtctctttcttctctttctagaatttctgttattcagttgttgaatcctctatatttatcaacttatttcctctgtttaacatctttttgcagctgggcacagtggctcacgcctgtaatcccagcactttgggaggccgaggcaggtggatcacctgaggtcaggagttcaagaccagcctggctaacatggcgaaacctcgtctctactaaaaatacaaaaattagctgggcgtggtggcgggcgcctgtaatcccagctactcgggaggctgaggcaggagaatcgcttgaacttgggaggtggaggttgtagtgagccgagatcgagccactgtactccagcctcgtcaataagagtgaaactccatctcaaaaaaaaacaaaaaaacaaaaaaaaaatctctttgctttagtttctaggagatttccatatctttatcttccaacctattaacttttaaaaaatcactgtgttctgatttcattgactaaatatgttatctttctatgatattcttttatatattttaaaacatattctaggtcctgcattgtccctttcaagttcctcaatttttagttgctttttgttctttggttgtattttttatttgttctctttcattttttggcatcctcaactatctaatggtcctttgttttataaatgtactaaaatgtatgagatactggtaaaagtactgctaatagggaaatctataaccttagctggaaattagggaaatagagggattgactgttagaaataaaaatatttcatagtctatgtgattgtccacttagaaaatccaaaagaatctgcagacaaaccattagaattagtgtctttagtgatgtcactagagataaggtcagtgtacagaaattaactgcatttgtataagctagcaatacttaagatagaatttggtgaagatagcatttacagtaatgttttttaaagccatcagatacctagaaattgttctgacaaacatgtaaaaactccacacaggaaaaactacaaagccaaaatattgctgtgaaaaatataaaagatcatagtagatggcataatatactatgtttatggtttgggacactcaatattgcccagatggcaatccttcccaaatttatctgcagatttaagaaaatctcagtaatgcttgggggagggagtaaagagggaggactgaaatgtatatgaaatatagagagcccaaaatagctaaaaccattttaaagcagaagagcaatgttagaagactagaccactagataccaagacttgtagagctctgtaattaaaacagtgatattagcacaaggctagacaaatagaccagtgggacagagcgtccagaaataaacccaaatgtatagaactatctagttgatgaaaatgatgtcattgcaatgtagtaaggaaatgatcgtcttttcaataagtggtatggaagcagttggatatccatattaaaggagaacatagaatattggtcccatcatgccatgcacacaaatcaattccagatgatcctagacctaaaaataaaaggtgaaagaaagcttctagaagatagcatatcttcctgtccttggtaggcaaagacagggtacaaaaaacaggatacaaaaaagcactgaccctaaagaaagactgacaaattgggctgcattaataggtttgcatcaaaatacaccgttaagagagaagggcaacccacagagtttgcaatacatctatctgagaaattataatgaggctataaataactcctatgtagcaaaaaaaaaagatccaattacaaaataggcaaataattttactacatactccacaaaattatatattcaaacaataaaaaataaaagtgttcaatgttatttgtcatcccaaaaatgcaaattaaaacaatcttataccactacatacatcagaatggctaaagcaaataataaatccagtgaacacataaactaaataaccccccaacatcatatgctattgccggggatgtacattggtataactactttaggaaactctggtggtatctactaaagctaatcatctgtttgtcataggatccagcagcttcattcctctgcacctattcagcatacatgcacacatatatcaccaaaaggcacatacagctatgttcgtagtagcattctgttatatgagccctaaacggtaaacaatgcaaaagtctaccagtaacagatggattttctttttcttttttttttttttttttgaggtggagtctcactcttgcccaggctggggtgcagtggcttgatcatggctcactgcaaccttgaattcctgggttccagcaatcctcccacctcagcctcctgagtagctggacctacaggcaggtgccaccatgctcggctaatttaaacaaatttttttctttttagacatggggtgttgctgtgttgcccaggctgaatctcaaattcctgggctcaaggatcctccccccttggcctctcaagtgctggattacaagcctgcgctaccgggctgggctggtggtttctcttctatcaagtcactgtagggaaactcatgcatgccccatgacttcaatcatcatatccattctattgactcaatcttgacctacagcccatattttctttctgaatttcaccccttccctgccactgcctctgctctgccctgctccttcctggatgcccccttctgaccatcctctacttgatttcaatatgtctcaaataaaacaaatgaatttttgctcagaattttctgctactcaactgttttcatttttctctgccctttcaagtttagcatttgatatatttgatgtttctctttccccagtcctcacatccaatttttcatagccaagtttttttttatcatttgaccccacctaacattcccactgaatactcctgccagactggaccaatagctcttcactggcctcctctgaactttttcaggtgatattccttctgcccagaacagcttacagtaataataggttaattttttttatgagtgtgaagataaagtcacagtgattctcctttctctgggaattgctcccaacaaatggctgtgcttactgtcaccatgtctgtagttggtgtgactctgttctctgtttacttcagaagaggatatctgactcaacaagacaagtgaaatttgctagggtattggaaattttgaacccaaagacagattggaaataattggaaatcactttaggtcagcactggataagaagtaacatgtgtctcaggaggcatccttcagattgagctgggtgtcagcattcaattccacaaggctacctgtttaagaagaatggaaatatttcataggtaatatgttctaatttctaatatgtcatatgtaatatgttcatttcttaggtagtttcttcctctaaatagctcttaaaatattttccttgataatgttatttatgatatttagcatttgttgagtgcactgtaccatgtgttgtgttaagcactaaatattcatgatgataattaaacctcacaataacaccaggagaagttattttcattgtaccaaagcacatatttaattagcccaatttccctgctaaggtgacacaggtaagtggtgacactcctgcagtgacacagcgagggtgtgcaatcttaacccccctgcccagggatcctccccctcaagctgcacatgggaaccacctggggagggtacagaccgtccactgctggggtccctcctgagtggatctgactgaccaggtttggagggtcgcctggccatctgtatatttttttaagttttcaggtaacaatatcaggcagccaggattgagaattattttgttttccaagaataactgatttyttagaagtagccaactcacctactcacccacctcaacaaacctcagagggtcttagggtatgacttgatacctttacaaggaaatgttgctgtgagccatgcctttgccacctgatgagcctgcttggaaattattatacctgccttttttatttccacaaattaacactagatggcaaactgcacacagggaatcatattaaacatttccatttctgaaacacttta

SEQ ID NO: 94943 - DNA, 35704 bp, Homo sapiens
agatgactaaactgcagcattgcttctagcagcgtaaggccacgcccctaacatgaccccgccacccccattctcctcgcaaatgcctgcattaccaagcccagtgctgccagaagaatttactgtgtgttctagtcaaccctggatgacaggcccttgtcctttctttttagaccatttactaaaaagggctcacaattgtgaatctgtatctcctgtaactcagaagtgtctttttcaaggactcgaaagccatttctttgcaatgtaattatcaggagggatagggactgatatggttttgctgtgcccccacccaaatctcaaccggaattgtatctcccagaattcccacgtgttgtgggaaggacccagggggaggtaatagaatcatgagggctggtcttttctgtgctattctagtgatagtgaatacgtctcacgatatctgatgcgtttatcaagggtttctgcttttgcttcctccttattttctcttgcctccaccatgtaagaagtgcctttcacctcctgccatgattctgaggcctcctcagccatgtagaactgtaagtccaattaaacctctttttcttcccagtctcaggtgtgtctttaacagcagcatgaaaacagactaatatagggcccctgtctcccaagtctctgtgggaggatagaacctaattttgataattgccagctagcagacacagctggcctaatcccatttacactgaccaaccctttgtaatttttcacttctctgactctcctttaaccctcccattcccccaattctcccttctaaacactcagtctcctctgcacaaatcagaaaggagctcaactctatccctttctgtcagtagttgctgaataaaatctgttttcaccaaatgtccagctgtgttttatctttcacagacttgaaagagatgaaaggagtaagccatatgactagtggtagaaagagtgttccaagcagagcaacagccagtgcagaagctcaaatgcaggagcatgcctggcctatacaagcaacaacaaagagactagtgttgctgcaacagggttagcaatggaaatgttggtggcagctgatgtcagaatgtaaagggtgggcaggtggcatacactgcagggacttacaggccctcataggtaagtacttttagcttttactctcatgggctagggaactattggaggatgtcgagcaggggagtgacatgatctggcttacattttaaaaggatcaccctagctgctgtgctgagactagacagtaatggggattggagggtaaggttggaagtaataagactaattaggaggttgtcaaaataattcatgtgagaggtgatggtagctcagtcaaaagtgatagtagtgataacagcaatgtctaaatgtattttacagaatttctttatggattggctaagagtagttaaagagaagtgtcaggtatgatttcaaagtttctgtcctgagcagttggaggaatgaagtttccctcagctgagatggtagcaggttttggtggggtgaaagaggagctctccccatagtagctcattcaggctaatttataacatttattaaacatgggtatggggtggtttagtaggcagttggatatttgagtctgaagttcaggggagaggtctatattacagatttaaattttggagttattggcaaatatatggtatttaaagccacggattgcatgagacgaccaagaaagtgagtgcagctaaagagaagagaacctaggaccaaagcccttaaatgatgagagaggtttggaagaagaggaagtagcacaggaatctgagaagaaacagccagtgaagtaggaggaaagcaaacaaaaaaaaagtatggtgtccaggaaatcaagaggggaaaagtttgtcaagggagagggaatgaccaactgttgctgaaaagatgaggactgagaagtgaccattagatttagtaatatagttactgatgataacagtagtttggaccaattggtggcactaaaagtctgacaggaggcagtgtgagagagaaaagaagacagattgggaagcaaacagataccttttttgaggagttttgttgcaaagaggagcagaaaaatagatccatgagtgatgggaaaagcaatgttcaaagctggttcttagagtgtgttactgataacaataagatttatatccatatcctaaattactttcaaacaagtaatttgatgtgtcattctgatggtggcaggaggcagacaggttcctaggtgggaaggggcaggtcccgggtgaaacctcaacttcaagccagtgacaagccagctgggcctgggcttccagctccgggtgaaatccatggcctggagtgaaggctacccactacagatctccctgctgagagctgttcagttgcccagtaaagctcttctccaccttgctcaccctccagttgtccacctaacctcattcttcctggatgtgggacaagaacctgggacctgacaaatggcaggagcaaaaggagctgtaacactttcctggccagttcattgagctgcgggtgggagctaaaaggggctataacactttcctggccagcttgctgagctgcaggcggtggcatggtactggctgcaggagtgaaacgtaacaacccttctgggggcccagaccttgggaatccctgtgccagagctgtaacactgtagccttcctgccctctgctggtgccaggtggccaccccatgcaacaagaagcagtggaggggcagggccagcccaggagtcatgggccagagcagggcaatgggactgaaagagtctttacacaaatcagctgaaacacactccccaaccccgaacatgaacccctacttgctgcgctgcagtagatgtgaaggagagaagagctgtggcccttcttggagcccagatcttggagctccctgagccagggctgtgacatactgtaacaccctctttggggctttgtggttcctggcatctctgagctttccagcatcaccacatttccctcatccagatgctggtgcccgcagtggaagccgcttgcggtacgtctggtccagccgcaacctcatacagagtcagcacctgtgcgggtgcctggagctgcctgcccctccgcagcagccagcatgcctggctgtgtgcagtggccaaacagcgtgcttgcacacacacccctcgctgctctgcacctggcttgcctttggcaggtgtgggatccaaggctggttgtgtgagctgagcgcagcctgctggtccgagtgggtggaacaagcccagtgggcatgagcaaaactcaagcagaggggctgctggccacaggggtttccagctggtgaagcaccacctgaagcatcggtgacaactctacatgcaacatgatcacgcattaggcatcattattatccccattttatagatgaatgaacagaaaacctccgcacaggaagataaataatttgtgtctcagcagagaaaggaaaataacatagcccaagtttttgcagatggtaagttgtagagtagtctgactccagagcctgctctgaagcagggctcctgctagcccatatggtagccctgtgaagttagccaatagcacctgatttcacaagcagattttaagttagtatattgttatggaactggaatggctgttccccaggagggttatccagaacacccactggcagtagtcctgcctatgtacatacaagtgcctgtatttttgcctgcttccacacaggacacatcgtctacacaattttcaagtacttcatgttgctcccctcacttccaaagtgggaaaattatcaagttcaaagctgaggaatgagaagcaagccttggaaagtcccaggtaagtgagagaagaaatctcaggtgtcactaggagtgcagtcagaacagatgcaacttatgctggtgtgtgtgctagtgtgtaagtgaatggtctcctaactgtatgtgtgtggccatatgcacccaatgggggtttatatacaaatcagctttccaccgctccagaacttagcctggaatctccagttctgtatgtgcttttccataagttaatacatgtgtatgatatgaatcagcacactcttatctgtagtatccttgcacactgtgaaacctgaacactctcatgctgtgaccttgctcctaaccattcttcattagaaaattgttaaatgtctacctccatgcaaagcactgtgttgcaggattatttaggaatcagaaagaccgaggggttgaggaggatttattatttaggtgcaccggcacagtcagattaacatccgctgagccccgaacaaagggtcaggttaccttttaagcatttcgtgggcagggggcagttggggggagatctgtgcagggggaagcatattacagaagtaagaaaaatgacagttatttaattgagatatgcattacataatttcttacttttcaaggaaaaacatattttatgacttgagtttatctgtctagtgactttgcagctgcacagctagagaaacagggtcttcacaatgcctgggaaagggagagataaggctcactagccacagatagaaaaacaggcagttaatttttaaaggactctacctctttctcctcctcagggggaactgggttttcttacatacaactgagtttttgcttacatattctttaattcctgttccaactgtactaggcattatggaagattcacacacccaatcttgttgccaagaaacataattcctagcaggataaataagtacataaatagctataagatacaaagagacaaatcctacaagagaaatattgaaaacctgttatatgaatttgcaagaggatgtgcttatgtcagtttggctaaagaaaatttcatgaaggaggtagcattggaggggtggcttggaaggtagaatttggagtgaagagatggaaacaagaatatttgagagagaactgtgtgaataaaagcagtgatgtgaaggtgtagtacaggcatggaaattgtgaatactaaaatttggcaaaactctaatgtattgattctgaactctgctttggggtgctgaaaggcagtgaagctattgtagtggttccccaaactacgggccaactacaaaaaggaatgaaaaatgtcttgaatgtatatgtacaacaattcaaaacacatacaaccactttttattacaacataaatccattaaaaatcattactgaattcccaatttgttatgtattttctaaatcagcaaataccaagggtgtaactactatagtgagctagtccaacaaattttttggtgttaaaaaaggagtgctgtatgtcaaaaaggttggtgggttttggagttagacaaaccttgatcttaaactctgtcactattaattagttgtgtgggactgggcaactctgagtttggtccttcatctctagagcggtggttataaaaccaaccttgcgttttttgacaattagagaaatatatggcatgttttagatgctcagcaagtgggaagtatcacaaaacgaaaagctgaggtcaaatcagagtccaccttgaacaccaagctaaggaactggtactttttctttgagcacatagttacagaaggttttgtctgagtgacaggaaaatcaataagtaagttagaaggtgattgcgttggtctaggtgaggcattatgaggcactggcattgaatttctgggatatttcagagtattgactataggactccacatctacttgtatatgaggaatgtgagattaaaaaaaaggtcgctagtttgatctaactgtgctgttaacaacaataaaaagtcaacagagatgtaaaggtcagttttggacattttgagtttaaactcctacaattatcgtggctgaaaaagcagcaaacatgatgtctgttgaaaacaaggctttaggaattttgctcattctttaaaaacctacgaattttaaaaatcaaactttaaaaaactttttgtttttttttttaaaaaaacggcagcgtaatacaatatttggacacgctatactatgggctttgaagaacgcctgtccagaacacccaacaagctccattatgtcaaacgctcccgcgcctctgtgatgtcaccacgacgcgctgggcgctctgcgacttggcagacgtcgtgcgtcattaccaacgaggcgcagkggtcaggacgactctcggcagcgccattgcgcgccctctagtggcagccggttttgaggccggcctccggctttgaagttcctcaccgcgtctccttccctctccccaaagcctggatcaccgcccagcgtcaggcgaggggcgacgtctcgaggtaaaacggaggaggtgcgggacgcggagactgcgcgggcccggtagccctggagaggccgaggctctaggccgcgaggggcgggtgcaatggcggaggaacaggtgaaccgcagcgccggcctggcccccgactgtgaggcctcggcgactgcagaaactacggtttcctcagtggggacctgtgaagccgctgscaagtcaccagagcccaaggactacgacagcacctgcgtgttctgccggatcgcggggcggcaggacccgggcaccgaactcctgcactgcgaggtgggcggcgacgcgcggccgggggtgggtgaggacctggccgcccctcggagctccggcagggaggcctcgccgttgtggagcgggtgcagaggatcccgatcgctactcagctcgcagaggcagggccgctctgtgtggatggggctcggggaagctggggatacgcccactacgggcctttctgcagggtccgggtgctgatgacagactcactcctaggggactgacaggcagtggctccagcggtatctttgctgttcccaggggcaaagagtgaatgacagggccgaatgctttggcctatgtttgcaggtacccaggtagttggtacaaataacattttgtggcctctgcttttattacaaggattcttctccaccttcaagatactgattttaaatcctgcacactctaataccgatactgatgagaaaactagtagaaaataggtaatgataattgtggaaagctgtttgttagattggcagaaaataggctggagggagtgggtctgaggtcaaactattattgaattgcctctgaattccactgtcagttgggatgcgtggacattttcagagcatgaagactttgcccagatatttttaaacggataatctggcacacactttattctgttggttttacttgtccatatagaaacaactttttgagagaattagctccaaagattgtgtcttttgtagtaaacattcctttattttttaaaaaataaatataattccttctaagcaccttgttttggaggtttttgagcaagataagggacagtctgtgtcccgattttacaatctaaagggcggaatgtatacagaggaggtagccagttacaatgcctcgtgctgtggtcaggtgattttacagtattttgtaagcttgtgggaggagcatctaacccagctctgaagaattagggaaggctttccagaggaaatgagacatgaagaaataagtaggagttgatcagatgaggaaatggagagaataatgtcccaggttgagagaccccccgagaggttcagtttgtgtgatagaaaaactaacagaaattgtctaactagtgcatagagtttgagaggatgaaaggcgaggctggagaggtaaacaagggaccagattattaagtgtgttggaagtcatgtgaaggaatttgtctttatctgaagagcaaagtgaaacttcacaatgtttaatggtgggttgggaggaagatgttgcggagttataggaagggggttgatctttgaaaggtcattctggcatcattgtggagaatgatttggaggagaccagtctggaggtatggagacccgttagaaggctagtagattaatctaccctgatgatggcctgaaatgagaatgtggtagaggagattatgaaaagtatatcaatttaagggatacagtattcaggaggtaaaacagggaggacttgatggatacaggtcagtgattctcaactgggggcaattttgccctcccagggtacattttgcaatgtattgagatacttttgattgtaacaacttctggcacttctaggggttgcttctgggacctaaataatggataaaagccagggttgctattaacatggtacagtgcacaggacagcacccccaccaccccatcaacacacacacataaaacaggcttatccagccctcaaaatgtcagaagtgccaaggtttagaaaccctgatttagatataagaggataaggaaatgaaagagggtgaagtcaaagatgatttccaggtttctggctagggtaaactagtagtggtggtaccatttcattaagctcgggaacacaggaggagaaaagatggccaggggagtggtgggaggtagcaaagcgatgagttgagctatggagttgtggagtttgaggtgagtttgaggcatctaagtagagatgtcttttaaatggttggatagtctagcactctgtagagggatctgtatctctaacccagattacaggaactgtcggtttatagatggaaactgaaaaagaagggaagcgatgagatcacccatgaggtaaaaagtgaaggggaggcctacacagaactctgaagaacactaacatcataagggacagacagaggaagaggacctggaaagggaatagagaaggaacagagaaatagaaggaacgctggraaggctaagagaagggagtatgtcaaaaagaaaggaattgccagcaatgtcagcagcaatattagcctgccttcatcctcaaatctgggttagatgacccttgtatgtccttgcagagtcagagcaggactggttgtgtccccaaagtgatgttcattgaccttgaggagagcaatttcatgaagtggtgaagcaaaaggcagatagcagttgattgagaagaacttgggaaaggaaggagtgaagacagcaaatacagacaactctcacaggaatttggcaatccaggggaggagggaaaggtagtggtagctacaggagaagttggggattaagagaaagcttttaaaacagtgaaaccttttgtgtgttcaaatcccagtgggaagatgcctatagagagaggtttaaaatggcccggcgggtagaatgttgaccctgggaaagaggaaactcattcctcactctctgtgtgccaggcactgttggaggcatggggatacagccgtaaacaaaacatgcaaaactccttgcccttgtggagctcacattgtcgttgcagaaaaggataataagcaaaacaataagtaaaatttatagtttattagatggcagaaaataaagaggaaggggatgcagttttaaaattttagtcaggaaaatctgcactaagcaggtgacatttgggttaagccttgaaaaaggagaaggagcaattatatggttatatggttatttacaagtaaaaggtttgaagtagctcctgtgaaggctaggagagagaattagggaaacaaggattgttgtacagcgggtcacgtgaggttgaggacattcaatttcaggtcataccagtctgcttagttgtgtgattttcttcccactttccagcagcagccaaaggctgagattacacaaggtaggcagttgtattgacccagggttgggattttgccatgtggttgttatagaagtgtagtgagacacagttaagaagttatggagccgggcgcagtggcaaacgcctgtaatcccagcactttgggaggctgaggcaggcggatcacgaggtcaggagttcgagaccagcctggccaatatggtgaaaccccatctctcctaaaaatacaaaaattagctgggtgtggtggcaggcacctgtaatcccagctacttgggaggcagagggaggagaactgcttgaatccaggaggtggaggttgcagtgagccaagatcgcgccgctgcactccagcctgggtgacagagcaagactctctctggggggggggrrrrraaaagaagttagggcaagcaagtggctgaagtggtagaccatggaatatatgctgaataggagaaggaagtaaagacagcacctgacagggagaaagaatacgcacatcagttttctgtttgcagacctttgttggactgacccatagagtcagaagggacctagttctgcctcttcagtctccctttattttactaaatataaaagtaggctaaagagaggtaaagtgcatttttaaactcagagttcaatatttagtagatccttagaaactgcttttaaattttgtattctgcagttccaataatgaaactaatagaaaatagatactagtagcagtagaaagctttgtctgaaaatagtcatcaaaaggggtgggatccagacttctatcacatccaaggtgagaatttttcttggttaggaacaaagtaaacaatatgaagagactggggatattttcatggtaraaataagacatgatcagtactttcaactaatttacaccctaaattagggaaacggggaatatatacaatagcccattgtcagtggaaaaacacaaactgtgctttttttgttttcccattcaacaacagcaatcaacacagaacacttctgtgaccaaatgtatggaggttttcccccacacaccaagcaaacaatcagttttgcagcagacaccagctggttgtcctccatttcaattcttatactatctacctgatgatagcatcagatcccgcaggttgaagactcagtccccaagactggcctgcccttcccacyagttgcaagtccaggcctctggaacttctgaccgaccagcttgaagttggggatcccacaagcttctctttgggttctaaagcttgctagagtggcttacagaactcagggaaacacttaggtttactggtttattatagaggatataccaaaggatgctgctgaagagatgaatagcccaaagtatggggaaaagggggcagagcttccatgtcctcctcaggcgtgtcctctcccaggagcctccatgagttcagctattcagaagctctctaaactctgttctctggggccttttatggagtcttcattggataggcctgactgacaattctgtattaatgtgactggacaaaaagggtatgatctaatactagtagactgagtggggaaacccagcaaggcctgtccagattcttcttggcctctctgtgaagctttccttcctccagggtatgaggcagaatcccttcagaaatgagggttttatgacccacaatcagaaaggtcagggaagattatagtcctgacttgggcaggtgaggggagggcaaaagaagggcagagagattgtgagagagattctttttctgaggcctgtctctgaggcctaaaatgcctcgacatggtaacaaaagactgtaacaagggcattgggagttataagccaggaatcgtggatggaaacccatatatatatacatatatatatatayacacatatatatatatatatatatatayacayatatatatatatatatacacacatatatatatatatatatatatatacacatatatatatatcacacacacataaccgtataatacaaaacgtaagatacagatgcgtgtataatagtgctcccaaaagttgtgtatctttttcaaattgaatctaagatgacttgatgtacaagagctcactcattaaagggtaaagattaatctttttaaaaagaataactacataacataattcgatggtttacatcatacattcatatactcattcaaatatattcattgcaaacatttagaaactgttgggtttatataaagtgtaattcaggtacaaaagagaaaaatttccatttggaaaaattggagttaccagcatcatgaggggttagtctggcaaacctttccagcaaaagctgtagaagattcttcactccataaacctccatatggtgttgtctaattgtatactgcagatttaaaactaagcaaaggctgaaccatgcattcttaatggggcagatgacactcccaaaggggtgaaaattggttcttggtggtggtggggcaatatcttactttttcatgtatgaggcacagatatacataaacagagagtgtagctgtggtattaaaatctcatggagatgggattagaagaaaaaaaagtcttaaaaggctcattagataaaaaataatgaaaaagtaattgagtaacactggactagaatttaccttgcttggaactatactgaggaaataactcagtgccaatttaacttgaacgttgtcccctgttggaagatggttagcatccccgatctcggcgcaccaaattttagcagtatgcgtgatcaaaagggcgtctatgtatttccacctctggttgagaaacactgcttcagagccacactccatctgctgggtccacgctggcagctttttcccaacaaaaaatagatgtyttgccattcttgacatccgtgaagctagtgataaggtattcaaaagggggagggggagaaagataaagaaaacctgtctttgtagtcttaaagctggccaagtttgctagatggatgataacagaagcagcaaaaacatggctttttgattggcaagatctaaattccctctgggatttttagcttttttagttctgcattacagaaagcacagaaatatttagaatggaggttgagtgccagtctgccctatttgggttttcagatttaaagaaatctgaaacagttattcgttgtatttaaattgtttattagagtcagtggtgataatgaagtcaggataggctagctcttcctctaatccatgcatttccaaaaggataaaagttggttcttccctggggcagagcagaggtggcaggagaaaaacaatttttattctttttatatgtaaagcataggtataccatacagaacataaacatatatacattgtatctgtgccattaaaacatcatgggagggggcaatcagaaaacatctataaagtctccttagggaggtgttaatgagaaaaggttgagacacactgatctaattcaaaaatggccacaattccaatttaagaaggggttttgcaaggagaaactgaaagatcgtagaaaatccatctctgttcctggaaaaatacctgaaaacccaaatgacacaccattttttaaggggtagagaagggtgtatcagtaactttatcttctatgaagcatctgtcatttatttattcagcagtttggcaggcgtactttgttattcacttggagttcaaagatgaatatggcatgccccacacttgaggagcttccctgtgatccaaattcagtgcaggaatgaaaatgctctttagtggatgtcattagggatggataggcaaaatactgtatctttaagtcacttgaaatcattctcttctttgaatggaatgattatgctaccaacatgacatccagttaggtttattgtttgttttttatttttagggattgcttttttttcttgtgaagtgtgatgtatacatgttaaatatttacatgttttcagagtcaaaattgtaaagcaaggtacatttggagaaatctagcatccattctcttgtcatctctaccatgtctctttctccataagaaacttttaaaaacttttttgtttatccttccattgtgagtaaataggtattcacatgtctgtatttgtattcttctttcttacacacaaaagatagcttaaccactctcctgctccttgctgttttttaaaaaaacttgaatatatcttagaaataatttcgtatgtatatgaagatcttcctcattcctttttagagccacacaatactccattgtgtggatttgccataatttattaaaccagtcgcccagctgcattatgaatgtttggtttatttttcagtcttttgctatcatgaataatgctgcaaagaatagttttatacacacacacacacacacacacacacacacacacacacaatcatttcatatttttgccagcgtatctatggaataggaggatcatttttcttaagatgaaccatgtaaatgatgcctggatcagcagtaggaatgggacaaagggtgacatcagagctagtttcaatatttcagaaagcttcatggaaatctaatttagtcagggtgtaggctaactaaaacatcaagtttctatatttttgagaggaattttatctattcctggtgataagagtcatgttgattggtagtttttattaggattgggattgtgtaattaattaagattgggaaaataaattattgatatatgagagttagtaaccaaaacctttcaatatagaggttggaagacaaaactaagcattttggttcattcttatcgctaagttatgcagtatgagacagcagatttttaggaaccgctttagcttttctcctgctagccattagactggcacttgctagttctgttaatctaaagaagtgtcattcctgctgtgaggtagagtacagctacatcatctcaaactaaccaggttgtattctgtaccagaattacctctggattttaaaaaattaatgccgtaattgaggggaaataaagatatataacattattgtgttatgaatcaatctgggaagtaggattgtggcaattttcttgtactagatttaacccccaattttaattgtttctgagctggaagtattaaagaaataatggtaatcccagcactttgggagactgaggcaggaggatcgcttgagtccaggagtttgagacctgcctggataacatagggagactccatctctacaaatatatatatatagcctggcatggtgatgtgcatcccagctacttgggaggctgaggtgggaggatcaactgagctcaggagatcgaggctgcagtgagccattattgtgccactgcattccagcctgggctacagagagagaccctgtctgaaagaaaggaaaaaaggaaaattttaaacaataaaaaacagtgtagtccttgaccttatccttttctaaaacattccatggatatcaatttttaattttaatactagacagaaaaaccataataaaaatgatagaaatggattaaaattgatatataattatcatgtttgttatcttaggataaccaggattactggaatggatatgacgcacttgtttgaattgaattttggctcttggaacagagaactatygagcagcattgcattcatggattttttctaagggaaactctgcttacactgattttaattaatttttatttaatgtaaagtaaaaattaaaatcagtataagatactgaataagatattcactatcagatatttaatatggttatttagtgaatataaattttcttttaggaaagttcgaaattcaaatgttaataggttgaaacacgctcttcctttccttttcttttttctgtagattactgtgtggggtaatgtaaaccagaaaactgatgccatacatgtagtgtagtggtcccataaattagtacaatatactggaatttgtttcagcatttcagtctttttaatactgtaaagtggcaagtaaaaaagtctttggatataattgctttaaaaagtgtttaaaaaatgcaatccctggacatgtaaatgctagctggtgttctttttataattgaggaaaatgctacgttgggaaaaaaattaaatgtagaaaggaatttatctatcttgttgtgattctgtagccaaacctttaaaaatatgtgtcaaggtaaaaaactttagggtagggatagagaaatgtgtaatgaaataataaactctgagattattggtaatgaaattttagtgaactttactcataattgtttccccaaaattgattttatgtgtcttttttattctctggaatcaataagcatctcatgaaggaagtgttatgaacttaatgcgtaattataaaattgcccagtgggggttaggtgtaacataagtatcatttccctgtcagactgagattaatgatatttaagtcatgccagaacagcattaagaaattctttttaaaaattcactaacaaatgtttyttcctttagaatgaggacctaatttgcttcaaagatatcaaaccagcagcaactcatcattatcttgtggtgccaaagaagcatattggaaactgcagaactctaaggaaagatcaagtagaactgggtaagatgatggcagtattcttcatgtttatatcattttcagttggtatcagtgatggcagtgaagattaaaaagaaaaagtctagttaagtactgtgaaaaaggagcattatgactttttgaaattttcactataaagaattttaaattcattaaaaaatagtataatactcgtgtattcattatgcagcctccacatttaggaactcatggacaattttaaaaaatacattaaccttttcccacagtgattgtgaagcataaaccagacatcatgctatttaacatttaaactgtccaaaagataatatatttttatgactttttttttttttttttttttttgagacagaatcttgttcagtcacccaggctggagtgcggtggtgcaatctcggctcactgcggcctctgcctcctaggttcaagtaattctcctgcctcagccttccaagtagctgggtttacaggcatgcgccacaatgtctggctaatttttgtatttttagtagagacggagtttcaccatgttggccaggctggtcttgaactcctgacctcaggtgatccacccacctaggcctcccaaagtgctgggattacaggtgtgagccaccgtgcctggcctatttctatgactttttaaatgatggactttcttgactctgaaatgaaaggtgctatgaaaaattataaacaaacaagttacgatatgacaaatgagctcatattgccttatggtgagatcatgttggtacctgccttatagtatcctgtgaagatgaattagcaccaaaatttaattatgagtttttagtgatgaacttctagcttctgaaaaggagattctgaatcttgtctattaaggatgattgctcattttcctactcatgccttctgtggcttgtcacctatcattttctaagacatttctaagcttacttcaaatctgcctttaaaaaagataattttttattttagatttgacggtttagatttgaagatttagataaaacttttattttagatttgatggtacatgagcaggtttattacgtgggtatattgtgtggtgctgaggtttgggatacaaatgatctgtgacccaggtagtgagcatagtacccaacagttaggttttcacctcttgcccccatttctctctcccacttttagttgtccccagtgtctattgttgccatctttttgtccatgagtacccagtgtttaccctctccttataagtgggaacacagagtgtttggttttctgttcctgtgtaattcatttagaataatcgccaccagctgcatccatgctgctgcaaaggagatgacttcattcttttttatagctgcataktattacatggtatatatgtaccacatcttctttatctagtctactgctgatgggcacctaggttgattccatgcctttgctgttgtgaatagtgctgtgactcacatacaagtgcatgtgtctttttggtaggataatttgttttcttttggatatatactcagtaatgggattgctgggtcgaatggtagttctattttaatttttttgagaaatctccaaactgctttccacagtggctgaactaatttacattctcatcaacagcatgtaagtgttatgttttctcttctgccttaccagcatctgttatttttttactttttaaaaatagccattctgattggtgttgaaatagtatcttattgtgggtttgatttgcatttcctgatgattagtgatgtggagcatttttttcatatttttttgtcctcttgtatgtcttcttttgagaagtgtccgtttatgtcttttgcccattgtttcatggtgatttttggttgtttaattgtttaataatttatttacagatccgggatattgcacctttgtcagatgcatagtttgcaaatactttttcccattctgtaggttatccatttactctgttgatagtttcttttgctgtgcagaggctctttaatttggtcctacttgtcaatttgtgtttttattgcgttgctcttgaggacttagtcataaattgtttcccaaggctgatgtccagaatggtgtttcctagggtttcctctaggattcttatagtttgaggtcctacatttaaatctttaatccatcttgtgttaatatttgtatatggtgaaaggtaggggtccagttttattcttctccatatagataaccagctatctcaacaccatttaactgaatatggcgtattttcccatttcttatatttgtcaactttgttgaagatcagatggctgcaggtatgtggctttatttctgggttttctgttatgttctgttggtctgtgtgtctgtttttgtaccactatcatgctgtttyggttatatagacttatagtatagtttgaagttgggtaacgtgatgcctctagcattgttctttttgcttaggattgtcttggctacttgggttttttggtttcatatgaattttaggatagttttctctagttgtgtgaaaaatgatgttggtagtgttgaatccatagattactttgggcagtatggcctttttaacaatattgattcttccagtccacgagcatagaatgttttttcatttgtttgtatcatctatgatttctttcagcagcattttatagttctcctcgtagagatctttcacctccttgactagctgtattcctacgtatttttgtgtgtgtgtggctattgtaaatgggattgtgttcttgatttagactgtcagtttgagtgttgtgtttggaaatgctactgatttttgtacattgaatttgtatcccgaaactttactaaagtagtttatcagttccaggatcctgttggtggagtcttcagggttttctaggtatggactcagattgttggtgaagagagatagtttgactccttttcctatttggatgccttttatttctttctcttgcctgattgctctggctaggacttctgaaatctggaaaggctttgtcatgaggttctgggattagtttgatcaatattttaaggtagcctacatgatagatcaattgggctagatttttaagaggtaagaaaccactttaatggaaaaccttgatgtgtagttcattaatatttaggctagtgaattaactaacaatttttaaactgtcgattctgaatacagctaagttccttagtcatttgaagttctatcagtacatttgagaacatatatgatttataactacagtaccctgtactgtacatttgagcttataacaattagatccaatttagatttacctgattgaaacatttcatctttcttattaaaagtttttattttcattcttgtagttatttcttgggtttcacactttagctttttaggaatttttcaatttatattcagcagaagtggagaatagaggctgttataactagtttttataatgttgcaaatcaaatattgctaattttgaagcagctggtaggtatttgggattccattacattttcctctttgcttttgtgttatatttgaatatttccatactaaaagttgttgcaaattaataatttttatataattgataaagttgaggaaataataagcatatggaagagttcaagaacactatcaaggaatatgactataattgacatttacagaactccacttaaatacagcatacatgttttttaaaaagcatatgttcaccaaagttgaccatattccgagcaataaaatacagctcaatacatatcaaatgattgaaatcttataaatatgttctctaaagacagtataattaaattagaaaaagaaaaaattccaaaaaaagatatagtctggcttgaagtaatttggagcttttttttggactctatggtactgacctagtcttggaaggctggcagtctcccagctcaaacctgacttaaagaagtaaacattaacaatgattttgtaagtctcaatatatcagctatcctctgtagatgtttttacttcttcstctttcaaatacatgattacaccatttagaaactatggaggcctaacatttggcatggtgctttgaagatcccaggtgaccaaaatttttttggtggacaggtttattcccacctgaaggccataaaacaccaagagaagaaagatgataaaggagatggaatttggaagccagagtcattatacaaatttttggctagtcaaggataggctgactggaagggataccatatccttaatttgggctcaaagacaaattcaaagttttcttgtcttaytaaatcaaacaatttctgtttaattacttggtcttcttgatgagagttagtcctcatatgatcagatgtcctaaatagccagctgtcctaaagtctacttatctgtgagattttgtgatagtgatgttgcactgaggctcaatttgaaactttatttcagttgttgataagcaaacttctcagtgacttaaagctactgaatgtctttattttttattttatttatttatttttgagagagggtctcactctgttacctagacctgagtgcagtggcacaatcatagctcactgcagcctcgacctcctgggctcaagaaatccttctgcctccacgtatcgagtagctaggactataggtgtgcaccaccatgcctggctaccttttttttttttttttttttttttttgagacagactcttgctctgtcaccaggctggagtgcagtggctcaatctcggctcactgcaatctctgcctcccaggttcaagtgattctcttgcctcagcctcccgagtagctgggactacaggtgtgcaccaccacgcccggctaattttttttgtattttagttgagatgggggtttcaccatgttggccaggatggtctcgatctcctgacctcgtgatccgcctgcctcggcctcccaaagtgctgggattacaggcatgagccactgcgcctggccacccagctactttttaaaaaatgttttttagagacgaggtcttacctttttgcccaggctggtctcaaactcctaggctcaagtgatcctcctcccaaagtgttgggattacaggggtgagccactgtgcctggcctgaatgtgtctttaaatgtttacccatttgataggacaagagtgaagatcaatggcaatttgtgaccttaatgtctcctctagtgtaatgttgtgtcttttctgttttacagttgagaacatggtaactgttggaaaaaccattcttgaaagaaataatttcactgacttcacgaatgtgaggtgtgtatacttccagatggaaaccaatattatacattattgacgtttttcaaaatgtcatttctccatggaaaatggaaacagaggtggcagtttgtggtttaaatgtagttttcctgaaagtgagaatatagttcattggtagtataaatgtaataaaacttcctcttgtgtctcaatatcttccaataatttccacttgaagtttggacagacaagtctatatgggcagtgggtaggtaaaatagttacaagtctactttttaaaaaaaaatttttgagataggatctcactgtgttgcccaggctagagtgcagtggtgtgatcatggctcattgcagcctcaacctcccagactgagtatccttctacctcagcctccagagtagctgggaccacaggcaagtactgccacacccggctaattttaaaattttttaggtagagacagggtctccctatgttgcccaggcttgtctcaaactcctgggctcaagtgattctcctgcctcagcctcacacaagttctgggattacaggtgtgagtcaccacacccagcaaatctacttttctttgttcaatatgggcattcctataaaactgtatgcaagttgaattttcttagaaaaattttatatgatttaaaaacacatgattataattctaacgtgaaattaacttgaatttgttgtctgctgaactctggcgtaagcacatgatgttcaatttttcaacttttttttttttttttttttttttttttgagacggagtcttgcactgtcccccaggctggagtgcagtggtgcgatcttggctcactgcaacctctgcctccsgagttcaagtgattctcctgcctcagccttccacgtagctgggattgtgtgtgcatgccaccatgcctggctagcttttgtatttcttatagtagagacagggttttgctatgttggccaggctggtctcgaactcctgacatcaagtgatccgcccgccttggcctctcaaaatgctgggattacaggcgtgagccactgcgccgggccttttcaaatgttttaatttgtctaagtaatgtttttctttttaaaaggtttccaattttgcttctgtgacccaagcaggtataatggagattacttctaacacttttgacctagaattcagaatagacttgaattctaatgccatccatgctacttgtggtgtactctacgtacactgtctgtattagtttagacatgccatttagcctctccaagataatacctgctctgcctgctggtaggtgcaaatgagattctctgtgtgaaaaatcctccaaaaactgttaagtattaccaagtgtgataatgacaaggaacaaatggtgtttgagaccctttggccagaagccacacatttccttcacagtcataggatacttattagaagaatgaacactggacaaagaattgagagccctgagtctcaactccagctccacgactgtctaactttgtgaccttgggaatattttaaactttctggatcatggcttctccatctttaagatgaaaagattgagtgaacctttgagttgcttcaagcttctagattatttgattctacattatatgactgtttggcagaaggaaaacctagtctcctcttctaggtggtggtggaaattttaaagtatgtactgcatatctgactccacattgctagtcccagaggatcactgctgcagtatagcacttctatgcctcctttccacacttccactcactgataccttgaacaggcaaatatttctaggctttgattattgttacaggtgtgtgttgctctgctgagcataggtggacttgcaaaaatttttgtaagcttatttttaagagtttaaatcatattttaaaaactttgtaaccatttaaaggaattcttgtgtatcttttaggaagcacataattatcattatcatctaacttattttaagtattaaacaagaaacctgggtgatgacgaaagttttttatgatgacataattaatctcactactgaaatattgttggtttggtgggaaatgtctgagtactttattaaaggaaaaagtgtgccatctactggctatgtattgaataaaggaacacgactacttgagtgtccagtgatgtttttaaaaattcattgcaagagcatattttaagagaatgaaagcttacgatgataaagactgaagtgataagacattatgccaactcagaattcataaagattataytgaggcgtaatatgctgttaaggccttccttgatgatgagcttatgttactacgaacttcaacatgaaaagaagaggaagtgtgtgaatcctctgaagtgcataaagagaaacattaatgagatttgtgacagtctatttaccttaggtacttattttggatctcattaaaatttatgtgttttcacctgaaaaatgactttattttagaactggtttgtcaatcatctctttactttctattttaggatgggttttcatatgccaccattctgttccatttcccacttgcaccttcatgttctggcaccagtggatcagcttggcttcttatccaagttggtttatagagtcaattcctattggtttatcacagtgagtattcttgttatgtcagcagcatacaaaaatatttaaaatatccttttcattgtagttttttcttctcaacagtaggcacttacagctctcatagacttgattacctgttttaacatactgcttgcacatatccaaaataatatttttaatttgggggattttgaaratcatcagtctgtaggaagagaagctatggctaaatcttccccattgcaagtagcagatacgatatagaagaaccatggtattcagagttctgactctggagtcagatctggattcaaattctggctgcagtgcttgcttgagggtccatgtgaaagttacttacattttttaaggctcaaggtctttatctattacctgcatataggtaacagtgcctatacctagggttgataagagagttgatgaggtaacttatgtgaaaagcacttaaaacagtaccttgcaaatagtaagtgtcaggaaatgttacctgctacctctattgtatcatcaacatcattgtagaaattgagtttttgtagtttttgatagttcaaattccttagaaaagagttgtagtagtagcatcacctatcagatctgtggctgaagagttkttttttttttttttgagacagtctcactctgtcaccaagctggagtgcagtagtgcaatcttggctcactgcaacctccgcctcccgggttcaagctattctcttgcctcagcctcccaagtagctgggactacaggtgcatgccaccatgcccagctaatttttgtatttttattagagatggggtttcaccatgttggccaggctggtctctatctcctgacctcatgatccacccgccttggtgtcccaaagtgctgggattacaggtgtgagccactgtgcctggcctgaagttttgagtctaaaaaattacagcattctgcttttccaaagcaaaagtggagtagagttcagctgtttatacacctgtggtctgaaagtcagcccttagatattaagtgactctggggtccctctaaggccaattgaccactaatttaccagggtgttattttatgtgtccatgatgacaaagtgatctgtagttgccatatctgaataatcatccaatagtatttatttatcattagttaatgaatggtattattctagtcatagtacagaaaaatttaaaaagtgtctgatttctagaaacttcatatttcaaacatattatccctgtcttcaacttgttgcccagatgatttcatttaaataatataaaaatacaaaaattagctgggtatggtggtgcatgcctgtagtcttagctacttgggaggctgagataggaggatcgcttgagcccaggatgttgagtctgtagtgagtgatcatgccactccactccagcctgggtgacagagtgagatcttgtctcaaaaaataataaaaaattaaataatatataagatacatatatatgtatgtgtgtgtgtatgtatttgaaattttaaaaagtgggatattctgccggacagctggtttgggttttttttttttttttgcaaagtttgtgtaatagaaaatgctttttttttatatttgtatttctaattttctataagagctatacctttataataaaagatgaatgaaaatacatttttgtaatgttttgactgtattttcttataggaaatacttttttacttggaaaacatcttataaratatgttgttggtttatcctgagaatctgaactcttcttaaatctgactttgttagcgtatcttatgagactttgaaaaaaatcaagataaagatattgaagttaatttcaaaatcttatataatgatccagattatatagtgtgattgagaaaaacactgaaatgatgtaactcacagactttagtttacctttttaaaaaatagactttattttttagagctgatttaagttcacagcaaaattgagtggaaactacagagttcccacgcaccccctacccctccacatgtacagtttcctcactatgacatcctacaccacggtggtatatttgttacaatcaatgaaccccattgataaattgttatcaccacagtccatagtttacttttgagttgactcttggttttatattctgtgggttttgataaatgtataaggacatgtatccaccattatagcatcatacctaacagtttcactgctctaaaaatcctctgtatgctgcctattcatccctccttcccctctaactcctggcaactgctgatctttttattgtctccatagtttggctttttgcagaatgtcatatggttggaatcctacagtatgtagccttttcagattggcttctttcacttagtaatatgcatttcaggtcttattttactttttaaaactttagtgttatatttattttccttttcttcttgaaacttgttaatgaatttgcaatgtaggcaacaatctgcctatttacatacaatgtagaataattatatatagatattatactgagtttttttgtaagatatttttaggaacagaatatatagtactcaactcttctaatgtggcatattataatagggataccagtagaattatttgatagagactatgatatctagaattaaaaagtatgttttttaattacaggctgatcacttgattgaaaaactaagaacatgaaaatgtcaagagtggaagatttttctaatcttggttcagcatgaagtggtatttaggtcccttttaagtctaattgcaattttaagatttgttgggttttatgagaggctgttacttagtggccttaaatcttttctgaatgtctgtttcctaagatctgtgatacagttatgtgaatattttgttactgacttgtttcaatggttacttgtataaggattttatatatatgatactatagataaaatcctatttaagacaaattctgttaatcaacaagggctctgtatttttttaagttaaaatattttcatttctcagtaagtagtcagttataatagtgatttatttatgaagaataaactactatagaaagtactttgtgggaacctttattactgtgaaggagaaaaatagctatttcttgacagttctatagttwtacacataaattttcaaaataaagaataccatactacacaatgatctctgattttgctgagggaaggaattatatatgtgccactttttcctcaaatttcagatgccagttttcactttttgaagcattgcatctttttaataaatctatcctgaaagctatataatatatataatttatatcaatgaatttacaataactatcaaattggctatcagaattcactgtaatggaattttgcctctaataacataaagggggaagaaacataaagtggttctcttaataaaactagcagaaaatgttgctttatggcatgtttttgtatcaaagagaaatcagaggttaaactttgcttttatcatgaaaagggcctgatttgaaggtagagataggcttagatgagaaaaattgataacgcaatgttaatactattgatatttcataggtatattttgttagaaattggttttttggtgctaatctataggcacaatagtgaatatgaatgaagagtaggtgctgcaagttaatcctacattgtgccagtgtatattagtaccatgtaaatgaatatgaataaatgaacatgaggattaacgaactgttgaaaataggctgagatactagttttctttcttttttagagggggcatgatattaaagatagttttaagtaacaaattacttattacaaagttacaacatgtggaatcaatagttttatttgttcattaatttattcattcagcaaacatttgttgaacatttaatgtgtaccagatattgccaggatcaggaaataaagaactaaaaatggacattcagactgcaattgctagtacaggggtcaaacaaaatcagtgattagaatttagtgcgttaagttccctgatgccttcacagccagaagaggctgtgaagggataaacacttctgagagtgggtggtagtagaactgagtattcaagactgaatgttaggcaggtagacagtgactggttaagctgagaaacttacaagtattttcgttgagttctgcttccactattatttactttacaatggatatgaagttcagatttcatcttatttactgaaggtggagaaaggatgtggaagtaggggttatgggctctcaaaagtagatttagagagatttttttatcactgttttatgatatagttcactgagcacttacatagattaacagttacaagtttccataaatcagttagaatatgactagcttcagggaaggaattttcaacaactgcaatctttgattgttttactgtgggaacttgcagtgatataattgacaacattatttaacaataataggtaaagtaggccgggtgtggtggctcacgcctgtaatcctagcactttgggaggccgaggtgggtggatcacaaggtcaggagttcgagaccagcctggccaatatggtgaaaccccgtctcttctaaaaaaatacaaaaattagccgggtatggtggcgcatgcctgtagtcccagctactggggaggctgaggcaagagaattgcttgaactcgggaggcggaggtcgcagtgagccgagatcgtgccactgcactccagcctgggtgacagagtgagactttgtctcaaagaaaaaaaaacaataataggtaaagtatttaaggaattctcagatgccttatggacctcttcaaraatgtggttagccaattgattcaacttttataggtttatatgctctcatgtaaacctatttgtttccgagatcagacgagatcgggcgcgttcagggtggtatggccgtagacaacctatttgttaaaaacccttggaaacacatcttttagtagaggttcttatttacttataaagattaataatcaaattactacaattaatatccatttagccttttcagtagtctaaatatttggtaactccctagccatctataacactagttcaaaacaaggctaattcataacctgtcttaaaaatgtttgaagtggtatcaagagcattgtttatgcatgttgtgatactatttgtggaactgtttaatgagctatttcaaactgctagaagaaaatgaaataaaaatggaaaaatactgtcaaattttgcctgtctggactttttaagtagtattaaaaacagaaattcaaatgaaagatgttttataaattggctgatcagtgtatgaaaggtatactgtagtgatgtaaacacacctctttcatataaagaatccaaggttaagagcacagcctttattattgtaacacttataacttacatacttctagattttgatatgaaaaagtcatttacaaaagctggtgcccacaactttgattaattttttagtatgtactaggtacaagtactccaagtcactaaaatgaaactaatacttgttaattcacctatttatgaatcagctcttatccttgcaatataaatacaaacaacagatctgactcagctgaaatcaacttaatgaaaatgtctaagtccaattctgattgaggagaatgagatcctcattacatgattagttatttaaaatcacagaagtagagacagattcacaatgaacaatcatgcattaattaaaccaatccttaagccaaatatcttttaagtataatattttctattcctatgaaatagacatctcaagcttaaaatgttcctccttcccagcctgttccttttagttttccccatcttcattaatggcaactccaatctttccattgctcagggtgaaaatcttggagtcatgcttgagtcctgtctctcacacttcatatctaacctattaaccttgttggcagtaccttccaaatatattcagaatttgaccacttcccatcagtgctatcaccttggccaagttatcatcatcttttatctagattgcaggagtagcttcctcactatccccctgcttttgtcctttcccaccctactgtctcctctcaacacatttacacattgaacaaacagaacatgtatgcttgagtgttctgtcagacccacagatcctaaacactgccctcagatacacacaaaaagttttggcaccgggttgtccccttgaagggacctgaaacagaaatcagttcattcttttcagtgcccagtgtctctgcctttgcagatactcattctctctttccttgaatgttgctagaaactcttgactggatttcatgcccccagatgctccctttctaacatagcctcatcagagttcttcctaaattactgactaaattactaaattgatcatgcaattttcttatgaaaatctcgccatttaccctgaagataatttatcagccttttcagctttgtttcctgctcttataccaaagtactagccatttttactactacaactaaactgggcacacctttgaaaatctgtttccattaaagtccaggttcaaatgtttcctaatccatgaagtcttcactgaaacttctcatccccaacctcggcagtattgtttcttcagcttcatttcatggtattttgtttatcttcctagaataaaccttatacaatctagccaagatgtagtaagatatttcttgccactggattttgagctgttttgtggctgggggatttatttttaaatttgtctttgcatctccattgccttagcctagtgactgactcatattcctggtaagtaaatctgttgtaatctcttgagttccttaaaatgttaccataatagaccaaaatctgattgaagaccctgattgcaggcaactttcaatccaaaaatcaagggtataacctagatgtcagctgcaccttcctggcattatgtccttcaggtcagtatccatgatcaatatataacttagttgtgaaatgtctgagtttccaaasaattcacccacactagatagttcaagaatttaatagccaaacttttacagggctgtatagctcctgccgtcttccttgctgtcttcctctacttcactccttgcttttggaacacatttctcttactttctcattagacatgttttaactttctctgaagccctagttctagccaacatacctaacccataggaaatcacctaacttaagtaggattattctagatattttctcagctaaagagattctctcaagattagttattggctgggtgcggtggctcacgcttgtaatcccagcactttgggatgctgaggtgggtggatcaggaggtcaagagatcgagaccatcctggccaacatggtgaaaccccgtctctactaaaaatacaaaaaattagccgggcatggtggtggccgcctgtagtcccagctactcaggagactgaggcgggaaaatcgcttgaacccagaaggcggaggttgtcgtgagccgagattgcgccactgcactccagcctggcgatggaacgagactccatctcaaacaacaacaacaacaacaacaaaaagattatcaatctagctagtaaaagaagaagattttcttcttgttacatcttcctctgagaaaaatatttgaaacactttgcaaatttatcccataaattcactcctcaaaggcagttagaagacaataaaacatgctatttatctgtggtacctgagcctcctgggattcacagcccgtccatccatcctccttttcctcaggcagttactctttaactttcatgtgcttcagaaccacttggtgggcttctttaaaacacactcctagacctactcccagaatttctgattcagcaggtctgggagtcggggaggattctgtatttctaaatggcttccaggtgatattgatactgcctgacctaggaccacactttgacaactcctgccataagtagtgcttaaatttggctgcacataaaatcaacaactggggaacttttaaaaatctttacgtcaaggccatacaccagccaaataaaatttgaatcacaggggatagattccaggcctcggtatttttaaaaaactcctcaggtaattacaatgtgcagccaagtttgagaacctgtgccctataggattaagtacaattcccctttgggccttgttatggtagactctcaagaaaatctcttttatgggacctgagactgactatacgatatataataattttcctactcatgggaagcaaataggagcaagagatgaggattactgggagttgtggttaaacaagaatctgtgtgatttaacaagcgtgtagaagatgacaggcatacctactttaaatgacttgccagaagcttttctttgtttagaaatcatgattgcttctgatttaaggaaggaaaggaggacaaaagacgtggctcaaatgaggcaaatgtactgtaatctttgttacctctggttcacaagttctgccaagggaagtaataaatggcatcccattcaaagacttactgggtctccagcctgtttccctgcacatatttttctatgcatagaacctgctttccaggtagcaaattagagggcatagtttgtaactagggcttcaagtttgttttggggagtctttagaaaagaggatgggatctacatttctctgcttctggggatcttgttggaaatttgacctcaagtagctgagtcatacttaaatcaactccagctgcttaagtctgaattggtgcctcagaattccaactcatacaggcttgtttccttagagtaggcagtattatttctctcttttcctaaattattttcattaagattgacaagaggggagacccctctgggacatcaagaaattcaaacctcagtaatgctctgctgcagtaaagtttgtgcaattcttatataacttattccaataaaattttattctcaaaactattcagaagcctctttttactaattgcaaaaatcatagtcttaatacatatgaagataacttttctccctcttattggtgtacaaatccctatggttctctgtgatacctagacccttttcaagtgttagatgttcagcctgagatagatgcatgggcagttttgatattacatgtgacctctgctgctgggacctgttaactttctattcatttctctgagtgtgtcctactagcctcaatacttaagtggcatattaaaaccaaaactcaaaattcccctttccaatttctgatccttacttcccaggaatgtcctctgattttttagtaacaggcggcctataccagaggctttaacgtttgcacaacagctgtctcacagaaggagacaggttctaagaggtctgccctagaagatggaacatggatggaactttggatcagttcccagaagccagactatgaacctccttgctccttacagtacaaaaaaaaaaaaaaaaaaaaaaaaagcaagtctctggatgcagtttgatcaccaaattccaaagtccttattctcctgctgcttcttaaccactcttgtaagctcaagaactttgaacaggtctggctgtgagtccctcaaaggcagtttcaytgatgtcacagtagttccacactaactctagtggcctgtgcaaggttaatctctacttctccagaccaggtatccaacaatttagattcatgatgtaaatactctcctgctggtttctgaggtggagatttagtatagatttagtcctgaactgtagcacaaaggagctgggtgaaaaatcagtgacacctgattccatttgggttctccaggccttgtagtctcatttgtctctatatagcatcatattaatccaggcatgaaaatcagcaattctttgatattctctataaagttgccccatcaaaattccatattaattttgctgaagatttgacaagttctggggatggggcatatcaagtactgcacatcatttccccaacatctcattggttttctgtcccaaccttggcctctcttctcaaatagtaaacaacttttcttgtctcaaagtacttttacccccttttctgaagttttggggtcaagagacagctatgcttctcagagtcacttagcacaagtgaacttgagacatattcctaacaaaaacagatctcttgctaacaaaaattctcatgtgattttcttaagaaaaatgtcaagtgccacttattggccccattcaatatgccagatgttatattcaacactttatgaacattattccacttaatccttgtaacaatcctttgcaggaggcagtgtgtttttccatttttaaaagaaaactcaagctcggagaggttaagagcatatacatggtaaatggtggaagtgaggtttgaatctaatattgacaccacagcctatgttcttaatcactaccactgcgcatcaactacgtttctggcacatgccgctggggatatgccagatacatactcttttgcaccttgtacaataccacagagaaatgcaaaataaataatttttaatagggcaaagggctcggtactctcaaaagcagaaatagcccagagggagggcttgagcccgtaattctagcactttgggagactagggtaggagtatcccctgagaccaggagttcaaggttacagtgagctatgattgcgccactgcactcacctgggtgacagagcaagattgtcttaaaaaaaaaagtcacatatatacatagaatatgcaattaaaatatatttcataaactatctgctatgaaatctgtgccagtgtgarctttctccaagttttaatttatggctggctgtggatttagtcctgagtctaacaaataacacaacctaataattattgcctactttgaggaagatattcttttggtttttgttaagaatagagtgaaccataaaagattatatcagacctcaagagtttattataattgggttataaggcatgtgctctcgaaaagttgttacataaatacgaaaaatatactgttaaatgactggcccaactaaatcagttcccaaagctgtgctggttagacaaacctacaaggaaatggtgaaatttccaaggaaatggtgaaatttcagtccaattttgaagaacaggttttgaagggctgtagagaaagctggaagcacact

SEQ ID NO: 94944 - DNA, 242149 bp, Homo sapiens
  misc_feature (1)...(242149): n = A,T,C or G
caccatttgctctcttccaggtggttagaggcatcaggcccattagaaatctctttttcactataccaaatatgtattttcttcatttaaggtacctagaactatgttccaatatttgagttgagcagtcttttaaagagctttcaccaaagacatcctactaaattatcatacaggtatggatctgtcaggaatatatgagatctaagaaacatgagaaaatgattactagtgaaccattgcctcattcagaaactcagcctatttatattaagtggccttgaaattgggagctaaaattagttrctatttaatagttgcctatgttgaaaaaagaattttgatatttcaaattaggtgttcagaaacttttcataaaaggacctctgaggttttaagctttgttcattaagttagtagaggtggggatggtgaaggagacaggttaaagtctacaaaatgaaaattagaaaggacatttgcttaaaaataaaattatacaaatttttctcaataataataaagaaagatatgttagaatctctgaaagagtaaaactatccatagaaggccctcaggggagcctagttccatttaacataaaatgattaatgatttttcaaacgactgcagaagaggcagtgtgtactgatgctcaagcaatggcaattcaggttaagaacagatgcctgttataaatggggcatgtaaaggtactaatgccaccctgacattcagataggaagttaaaatagaacaatgattttcattagatgaaaagaaaatgtgtttatggaaaatacagttaatgcaagagaaaagaaaaggaaaacttttctatatcaaattatcaatactacatattggttcatagtttctgaatgcaagtcatttcctataatagtttgtttttattgttgttgtttttaaataggctttactttttagagtggttttaggttcgcaataaaattgcacagaaggtacagagatttcctttattttccataccctacacacacctcctcaccatcccttactatcaacattctccaccagagcagtacatttattataatcaaacctacattgacaactcattattactcaaattccttagtttacattaggtttcatttttggtgttctgcattctgtggatttggacaaatgtataataatatatatccacaagtagagtatcatacagagcagtttcactgtcctaaaaattccctgggttccatctatccatccctcactcttctctaacccctggaaaccactgaggcttctacagtctccacacttaaaccttttccagaatgtcatacagctggaatcatacagtatgtagccttttagatttgttttcttcacttagtaatataaatttaaggtttattcatgtcttttcatggcttaatagctcacttctttttagtgctgaataatatttcattgtctgaatgtaccatagtttatccattcacctaatgaaggacatcctggttgcaccaaattttggcagtcacaaattaaaactgtgtgtgtgtgtgtgtgtgtgtgtgtgtgtgtgtgagatggggatttgtgtacagattatttcatcacccaggaaatagtgcctgataggtagtttatgggtttcaccttcccatccactctccactctcaaagaggcgctgatgtctgttattcccttctttatgtccatgtgtactcaatgtttagctctcacttatgaggacatgcagtatttgtttttgttgttgttattgttcctgcattaattgatttaggataatggtttccatctgtgttgctgcaaaggacatgatttccttctttttatggctgcacagtattccatggtgtagctgtactacattttgtttgtccagtccactgctgatggcttttcgcctattttttaaattggttagttttctttttcttgagtttcaacagttctttgtatattttgataatagtcctttatcagacacatattttgcaaatattttctttcagtctatgacatgttttctcatcttgaagcatcattgttttagtaagaaaaataaattaactacagcaataaaaatacacacacacatacacacctatacacattttaaggcctaaagttagtcaagctcttatagtttcattgaattgtgaaaataattttatcaatagataattgccagtatttaaatgagaaatggtatagaactgtgacatgtatttattagaaaaaaatgtggttgatgaatatcggatgaacatgaactttaggtaacattctgaaatattgtggaaatcttgtaatttgacaaatattttaaatgtttggtaatgtgaaaattatttttaaagtctcccttgtggttaaagtcttccaaaggctagtgaaatatcagtctgtgtgtctctgaactgattaattagaaaatattcaaaattgttttaaaattctcattacttctattgcatactgctctatttctttccccccacaagctagctattgtgagcaaagatgagcaattagcaaatttcttaatttgcttatttatcatgttgtaggtaataataataattcgttttagggacatttactgcttttataaaagtaaacacataaatgagtactccacaatttcaaaattattttattttctattaggataatctagcattgcaaaaaacaataaccataatcatggtagattttgtgttatgcttaccaatactaaaaacagaaacagaactggaattcactaattatataatttttctctagttccaactattatctttactgcagtttcacagttgtggtagtcactgtgatgtgccatggcttaatgaacttttgctgaactgttgggagtacaggtaacaaatagcatttatctgtcagcttcttcagggatggccatagctgccttgtccaaatcatgtcctttcccaggtcagcttatatccatccaatcattgaggttataaaggcccgtcaaattgtgctctccattggacaactgtaactagccttttaaactccagggtattctatgaggtgggctgaggctattgggcttgcaccacagctcgacttctctctcagctcttttgctttcttaccttcatcttcacatactgatcccaagtgtacagcctaataaacactgcacacacatactaaattcaatctcagagtctgcttctcagagaattccagtggtgaaaatagttccatctccagcaggaactctgcattgtttcaaacttaacatgtcccagctacgtttatcatcttagtgtcaaaatttctctctcatttttattaacatatatctgaaaataacaccacatatctcttggttatttattatgcataattttttttaactcttccatcctcatttcacaacttccagtgagatatcaaatttggtcatttcttccaaattcaacattcctttctatttctattgccagaactactgtctgggtccttgtcacttggtacctgagatactgtcaatacctggacaccgtatctcttattttctattctggtccttcctacatattagttatagttttcctgagccaccagtttcaattctctgttgatgaatctctggtggtttggtatttcataaactctggaaatgttatttcatgattttatgtgtatttgtctttattctccaacttgtaaactcctgggactaagacttttacttgctatatgatgacaacaggagatgtcaataatggaaatccaacgtgttagactccaaacgtctaaatttgaataagtacataattaaacattatgtaataaacattaccctcagagtatttttaaaaagttttaaaagctaacctgatacctattattatttcctatcatttatattatgcatttttaattttgattctcaaatattccagtaaactgtagagaatgaaagatggaaatttaagtgattaaaaataaatgtaaacctacttaacaaaagtcagcgttttcttttctgaatgcatgataacttggtaacattttacaatgcaatttacaaaataacaagttagtgtcaagatttcattttaagtaaacatttatattcagaaacgtttagtatctttgttggtttcttcaaatcaggatgcatataacttgttgtcagttactaataaaatatgttgccagagttaagaaaagctattagcaagagggacctcagaactttatgctggattatctcaatagataacttttttttttttttaaacagggtgtggctctgctgcagaagctggagtgcaatggcatgattttggcttcactgcaacctccgcctcttaggctcaaaccatcctcctatctcagcctcccaagtggctggaactacaggcgtgtgccaccccgcctggccgatttttgtactttttatggagatgggttttaccatgttgcccagactgctggtctcaaactcctgggatcaagtgatcctcccaccttggcctcccaaagtgctagaattacaagcatgagccaccacgcccagcctggatactttaagtatccacagatcattagaaattagcctacaaccctgcctccataggaatttgtcttatttaaatatctaatcttcaaaagttaatagaaaaattaagctttttttcaacataaacaaaaaaattatacaactctgtgatatatgcacagaagagattttctctcctttttatgggagcatttgccttatagttatgcctattcaagttgacacattacaaaggtaccactgttgacaaaaacattttaggatctataatcttagtagagtgtctctaagtagctagtcacaatatctcctaggaatcctttctggaacttgggtagaccagtatctcaattttaatgatcacacgataattggagatgctgaaagaacctgggtgcccagtaggaaagtagcctagatgatgatagtcccaaagaagatggactagaaaaaaataaaatgacacgtggcagactactggttgttctacaatatccattctcctggatactggcccaaaccatcctcctatctcagcctcccaagtagctggaactacaggcgtgtgtgccaccccgcctggccgatgcgcggtggctcacgcctgtaatcccaggactttgggaggccaacgcaggcggatcaatggaggtcgggagttcgagaccagtctgaccaacatggggaaactgtctctactaaaaatacaaaaattagctaggcgtcgtgacgcatgcctgtaatcccagttactcaggaggctaaggcaggagaatagcttgaacccaggaggcggaggttgcagtgagccgagattgtaccattgcattccagcccaggcaacagtgtgagactccgtctcaaaaacaaaacaacaacaaaaaataataaaataaaagaaagaataaataatctctactgggttaggaaatggccttatggagaagatggcatttgagtaagctacttagggttttttgctctgtaagtcggtgtcaacgtcccgttttcacgtggtggcctgatcattttgtcttatagtgatgtctttgcgtgcatgtgcgctcatctcctatattggacagggtctagagcagttcctggcacagagtaatcactcaatattacatcactatactaaaaaatcatgatagtaattcttgacgggataaatgaaggcatgaataaatgtatgaattaacgagtggcagtgagctcttcaggggtggtgggtcttgtctcactcgtctttgagctgcggcctcgctgagggcatagtgcgcacaactggctggtgttccagattccactggcagggaccaggatcgcagcccgagcgccggggcgggagggatgactccggacggtagggggcaccggcgtgcggcccggccgagcccccaggtagctccgcgcgcacagcaggaccgtcattgacgccatgagcgcgctgctgcggctgctgcgyacgggtgccccagccgctgcgtgcctgcggttggggrccagtgcagggaccgggtcgcgccgtgctatggccctgtaccacactgaggagcgcggccagccctgctcgcagaattaccgcctcttctttagtaagtagctcccggaggttcgccgagcggcgcaccggagaaacctgggtgggrgatggaatgggggacacttgggacgccccgcgcggtctcccttctctctttttggggccctcagcggtagycgcgcggtccaggccaccttacttcccgcgggagcgcgcaccgagtcacgagaactgccagcgaggaggcggcggatcaagaccccaaagcggagagcagaggcgcagggctgccggctggggggtagatagcgccctgtgccctgccagccgccctccccgaggggtaggcagagtgcaagcggccaccccgcggcggcctgcagccattagccggcccggccgccgttcccggttcacacaactcagtgaggaagggaaggcagagcccgcccacacgccggccttcctagaggcgtaagaaacctcctactgcgggagctccctgacgtcggagaggcaggcggaactttgcggatgcctaatccagcgcgtcttctttttttggagggactctgatgaaggttctttccccagaagcttgacttggtacgcacaagtttacaccctgagtgtgatccaccatccaaagcctcgttggttccggagcagccccttttcctccccaagctgaacaagcccagaaggctaagcgacttcgggggkgtccctgagttgccgagctcagagaaaggacccaggtcttcgtgactcattgttccgtgtaccccattgtttcactgtgtacgttaaccgtaacagaaaatagcgatgtcggtcgcttgccttcactccccactgactgcagagccttggagtggtagtatcaaagtgggccttgcattatcgctccccttttcggagcactggctctggaggctttcagttctaagcaggccctcgagttcttcacgtcttaactctgtgaccccggacgagtttaagttgctaagccttgttttttctcatccgtaaaatagggctgcaagtattacatgacattatatatgtaaastgattagtcacagggcctaaaatataaattactattgttaataccgataatcattatagatatttgtaatttatgagagatttgcagttatgctacatgagtttagggtcgaggattattttgtgggaaagaagagtttgcctaaagtcgtgtgattataatgcaactagtactagaatttctattttcttcaaaattggttgcagttttcaccctatgccacatattttcttctatctttggttaagactgatcaggtgaacaggaagtctcaaatttctgaatggattatgttctaaaaggttaccatgtgatgattaatgggaatagtcagaaaaaattatgaagtggcagttcgctttttaagcagattgaaaaaaggcctgtctactgcaagtattctagatttgcaataagtacggtaattaatagatacccaaataataaatatttatgaagtgtgctagacactgttaggcatagyacagagattcacaatattactataattatggaaaaagtaaatacactggttgagcaaaaacaggcttgagaagccaggagcgcacagagtagttgacccagtaccggatttggaatggggagtcctaggccataatcttggctctgccgttaactcgctgtgtgctgttgggtgggtggttacttcagttctttctcacagagccagtttcttcagctgtaaaatgaagcttttgaccttgaaacgatgatcctcaaggtccttctcagcactggtattccctgaaggcattggatgaataacggagattctaacagtctctgttaagacaggatgtcgaatgggggcatttttgggagtatgttggcctcttattgttggtttgtttctttagctgcaaatgtacttaggactcatgatttttctgtaactagagtgccacaaataaaatacgtttttcattcagttggataaacagggcaggaaagaagaaaacccgattttactaaggtaaatgggcaaaaactggaagaaaggggagtgtggttttggagagggtcccgatggtaagatcctgattggaaggtgtgttggttaaacaatttctgaactaaccgccagatggcatcactggccaggactgtttactacctgctagaaggggtagggcaaagtgaaacgaagccactctagggcgaatggggtaaggggaaagcaacgaataaattgccctttataaagatgatcacagattggatatttattactcagtgtgtctgtatgcagtactagggtggactaatgtctcacttcaaaaaaaatatgagtgtagtatacttsgcctaaaattgttactcagtgttactaaagtgtaatcattttccacatctccaaatatattccaagtctctgaaatactagtgcattgggaggtagaacattttcgagcttcatgtctgtaaatggtttctctttactgtcattcagtaaaatcagaataaatgattgatgtaatacttaaaaaaaaattggtgttaaactttgtagaaagagtgagacaggatgattaggggaaagggtatcctgatgggaatcatcaggcctcsttggtgccagccctgaccctgttagtatcttgctgtcacttcacctccctgcatctcattttttaaaaccatggaatgaggagattggaccagatgatcattttccagactgcttagttgaacacaagcatcccatggtatattattaggttttcgttaaaacagagggtttcatggtttaataaattagaacacttcccattttattacttttttgaagaagaatttgcctatttaagttctggaaaattcggatgtaacttctccaaaaactgaaccacagagtacttatttctcagaacatttgttaacatcttagtgacatcagggttatgatttctgcaacttccagaakcaactgtgctgtaacagttctaaactaatagtcaaaccacttaagttgtagtcctgactttaccgtcttggacaagtcactcgactgaattaaccagaggcatcccttaccttcagatgacatccggtagctcagtttctccgtaaataaaatggggatagcactagtaattttatagaattgctgtggcagttaaatgagactaygtgtgtaattatcagtgtctcacacgtgataggtatttaataaatgttatttatttttcccttttgactttaagacattagactaaaatccttattattasattctgtgaagggagaaaataaggtgatgtgattgattattttgaagtgttcctgttaatttataggtttcagaargtkttttgttgttgttgtttattcattttatttttatttttttggkttgtttgtttgtttagagatggggtctcatacttttgcccaagctggagcacagtgtgcaatcacgactcacagcagccttgacttccccagctcaagcgatcctctcacctctgtctcctgggtagctgggactacaggcatgcaccactgtgcccggcttcctaggtcttaaagttttaatgggtacttgcagtcttttaaattaactgtgaaatcataatgaagttagactcacttatattgagccaaagacctaatgctgcatgccagtattcctttgatatcttgcrtgtttttgtttgttttgtttcgttaataacttgaaattttattttagatttcatactgttctcataggatagggaaaagctatgctttccataattaggaattttgttattatgggataggcaactggtttacttagagaaatagtgctgtggataattcaagttgcttttatttagtctgggaatgaaccaagcagttctttaaaattaatttgctttgtcacttatagtaagcatgtgcttgtgttgaaattactgtaggttttctttaygtcatttgggtagtaggaggaatctgccattgaaagtgctgtatctttggacttaaaagagaacttcccgtgaataatccacaaaatttgtttgagtcttaaatatgagtttctgtaactttttaaagttggcctatatcatagaacttcaactgatataatggaacacaatgggttttgtgtgaatatagaaaaagtattttatttgatttttcagtccttaaaaccttaaacgttttctatatcagtgctgtgaaataggaattgtgtgatctatatggaacagaggaagcatttttattgaagtttttaggctcctttacatttcttaatctttttatcagaaaataaaacaaagktagctttagtcattgctgaagcttccagtaagaatctctataagtggttttgtagtcgtgtgtaatcatatgttggtatatggcatacatttagctgtctggtatagatacataaaattaggtatggttttcacattccattcaattttctcacttgctctagtgtaagtaataaactttcatcctgatacaacttgctcttgtgagagaaagaatcacatagataacttagaaaatgctagaataaaatctgatttcagaccagttgaagggagaattttgaccactgtttggcaatatcgtgtagattgatgggcctgatagaggttagcaattaatgcctaaggacacaatctgatttttgacgacagtgaaataccatggcaaaaatgacacagtgactacaatcatttatctcttttcccctataataaatatcctattaaagtgatagtaagtgaggataagaaagggtaaccctaaaacaacagataaggagccaccaaagcttgagattttgaaatatgtataaaagattaaaaaaccaatggagatatggttattaatgaagcagtgtggaagaagtcccagcttaagtatatgtgttcaggggacgtagtttagggaaaagccgagctgctgcagaacctcagagaggttgtgggtgtgttgatataagataggatagagagttagatggatgtagaacttaacacagggggattagtttaagttgtactacaaatagtacacaaatgtttcccatgcaggtctaatgcatgagggttgtgttagttccaactgtaaaagtgaatgaagagctgagagggaagtaggacccctgatggtgttggtgccccagcagtactctgcatgctggtatttggggaccccagcataacagccagcctcctacccattcatctctgtgggaacacagagttcccagtgattttttctagtctttttaatataaaccaaatagtcaaggatcacctaacttaggctttcatcgctactgttctaccaactgctttttgtcagggctacctgtcacctccatgctgcgaccttaatggtcagtttgaagtcctcatatgacctatcagcagtactttttacagttcatcactttctctttgaaacactttttttgtctttcccagaggaaactgctttcctctgggatgcactttgtcttagttttgatgcttctccttcacattctcccttgctgaacctttgtcatatttccgaactctagcctttgaaatgcccagggctcaatcctcagcccacttctctatctatactgcctctctagggcaggtgttggcaaagttttctgtaaagggccggataaggaatactttaggttttgcgaaccattcagtctctgtcacaactactcagctctgccattgtaacatacagccatggacagtaaaagtatgactgtggttatgttccaataaaactatatttacaaaaataaaaccaggccatgtgacagatttggcccataaagccagagtttgctgaccattgctgttgctctgggtgatcccatcaggtcccatagtgttagacgctgtttatgattccccaatttataacattagccgcatctcttcttgaactcagaatttacacatccagctttctactctgtatttctacctaaatgtttaagatacaactcaagattaacagcacaaaacagaactcctgactccccaccctcaccgaacttgtttctctctttagttgctaacccataacctgggcattcttcttgtcaccttttactcttatcccacagctaactcattagcatatttttttgaaatgtaccaaaagacaattccttctgtycacttccacccttctcactttctctgtttcaccatcatctttcccttgatcagttgtaacctcctgattcttcaccctgcttccacccttagccctgtatagtctactttccatacagcaatcaccttcatccttttaaaatgtaagtcagataatgtmcaagctctgctgaaaatgccagtggctttccatttcactcaaaaaattttttgaaatatgtaccatagcatgtaaggtcctactggatctaatactgggctcctctctgaattcattgcttgccacttttccttttgatcagtgtcctcctgccatcctggcctccttgctgtttctcagacatgccatgtatgttctttcctctgcacacctgtgctttttatgccttcagtgctcctccctagaggtctacttgatctcttccctcacttcattcagatctgtgctgaactgttacccaccasagagatcttccctgaccattcaatatcaaatattactccttctgttacagtaggtagctagtcaggcatgagcagggcagaaragggctcccctccctcaacacacaccaggaatgacaggcaaacatcaggtgatggtcaggcagttgttaactgtttctctaaaatattaattggttgcagcctgcaccagggaaaggcagtctccaaataaacagaarcacctgaagctggtgatcagcagcttcccatgagatctcaggaactgggtgagtgggctcaagcgtttgcactaagaggcaaaatggcagagtttggtatgtgacctcctagggacattcgactggtaagggaagaacacctcaagtgaacacgcgtacaactccagtaaacacgttgcacatggtccctttcccaagtgctgggaggctactgtgtgtgcagacagcctgccccaagggaagaatcaggggagatgggacacaagatcctggaagtatgcyaacatataaaaccccaagttgaaaggtcaaaccgtgcatttgtcttttcaagttgcccactttgccctcttccaagtgtaccttccttccctttgttcctgctctaaagccttttattataataaactgattccatctstaaaattgcctcagcctctccttctgccttctgcccctcagttgaattctttcttctgaggaggcaagaattgagattgttgcagagccatagggatttgccattggtaacgcttccattattcattcttcactttccctaatttgttttcctttatctttatagtgcttatgatatgtgatagaataaacacataatcattgcttctgcaccccaactagaatgtgatttccataggaacagggaattggaatttgtatctagtatctagaaccatgcttagtacagtgcatatattcaagaaatatttactgaatgaatttaaggaaaacttaaaaattaaatgggaaaaacaagaaacttgaattttagaaggtcaagtgggtgttctctattacatctgctataaaaaaaaggaagagtkggctgtgaagaaatggcaatcaagaccaagacctctttagcaaataacttgttaaaacaagtaagtcagtagaaggtgtagtgggttgaatggtgttctgagacacgaagtttgtggtagtttcttgcagcagtcctaagaaaaagaatatagatgaattagaagataaggtaaatctatcagaaagtagaacamaatgtcagagatagaaaaaggaggcaagaagaagtgacgtagagattgaatccagaaagtccaacatttgactcatatgggtttcagaaggaaagaacagacaaaatggagaagaaattgtaaaagggataatagaaaaaaatctaagaattgaaggacccaagttttctgacccccccagtcacattattatacagctattgagaggatcccacatgtcttgctggggggtggtcagctaacaggcctgcaacactgaatgctcgaagactggagtaatgcctttgaaattctgagagaaaagagttttcctcctagaattttctacccagccagctgtcaatctggagtgagaacagagtaaagacattttagmcatttaacaacttgagaaattggcctcacatgcaatccttcttacagaacacttattagggatatgcttctgcaagacaagtaaaccaaaaaaacgtgaatgcatgggatccagaaaatgatagatctacactggagagcaaagaagcagtcttaggatgcccggaaagcatccagttcatattgcagcctgaggatagagggttcctgaaggagctgtttgggtaaagagaggattccataattttgatgatatccgtgaggcattggaataacttatagacgtgattatgacaatgtaagaaagataattagaaacacgaagaaaaatagaagctgaaccaaaaaaggaaatttaattatagcagcatcctcaccaaaaataaacacatagacaacgcttctcacacacctgagtgtaagaattatttgggatgtttgctaaaaatacagatattcatttctccctccttgagattttgattcactagatgtgggatggtggttcagggatctgcattttaatgagcattccaggtttttcttatctaagagaaatttttgatatatataataggaaatgcatagaaaattcagtatgattacagaacattctatcagccttgatatgaaaaaataaatatgcagaagacaaaaattagaagaatgaggaaagggaggtaaaagtcaggttattgatgttaagaaatactgtatatttgtattagtttgttttcatgcagctgataaagacatacctgagactgggtgatttacaaaagaaagaggtttattggacttacagttccacatggctggggaggcctcacaatcatggccgaaggtgaagggcatgtatcatatggtggcagacaagagagctagtgcagggaaactcccccgtatataatcatcagatctcatgagatttactcactgtcacaagaacaagacttgcccccatgattcaattatctcccaccaggattcctcccacaacatgtgggaattcaagatgagatttgggtggggacacagccaaaccatatcattctgcccctggcccctctcaaatctcatgtcctcacatttcaaaaccaacatgccttcccaacagtcccccaaagtcttaactcatttcaacattaactcagaagtccgcagtccacagtctcatctgagacaaggcaagtcccttctacctatgagcctgtaaaatcaaaagcaagttagttacttcttagrtacaatgggggcacaggtattgggtaaataaaacattccaaatgggagaaattggccaaaacaaaggggctacaggccccatacaagtccagaatccagcagagcagtcaaatattaaagctccaaatgatctcctttgattccatgtgtctcacacccaggtcacgccgatgcaagaggtgggttcctgtggtcttgggcagctctgcccctgtggctttgcagggtatagtccccctccttgctgctttcatgggctggattgaatgtctgtggcttttctgggtgcatggtggaagctattggtggatctaccattttggggtctggaggacagtggccctcttctcacagctccactaggcagtgccccaatagggactctgtatgggggccccgacctcatatttcccttccacagtgctctagcagaggttctccatgagggccctgccactgcagcaaacttttgcctgggcatccaggtgttttcatacacctgaaatctaggcagaggtcccaaacctcaattcttgacttctgtgcacccgcaggctcaacaccacttggaagctgccaagtcttggggcttccacccgctgaagcaaaaacccaagctgtaccttggccccttttagccatggctggaccacctgggacgcaaggcaccaactccctaggctgcacacagcagagggaccctgagcccagcgaaaccaccttttcctactaggcctcagggcctgtgatgggaagggctgccgtgaaggcctctgacatgcgctagagacattttcatcactgtcttggggacgaacatttggcttcttgttacttatgcaaatttctgcagctggcttgaatttcttctcaaaaaatgggattttcttttctctcacattgtcaggccacaaattttccaaacttttatgctctgaatgcttttaacagcacccaagtcacctattgaatgctttgcttcttagaaatttcttcctccactagataccctaaatcatctctctcaagttcaaagttccacagatctctagggcaggggcataatgctgccagtctctttgctaaaactgtcaagaatcacctttgctccagttcccaacaatttcctcatctccatctgagaccacatcagcctggatttcattgtccatatcattatcaacatttgggtcaaagccacttaacaagtctctcgggagttccagactttcccacgttttcctgtcttcttcagagccctccagactgttccaaactctgcctgttatccagttccaaagttgcttccactttttcagttatcttttcagcagcaccgcactctactggtaccaatttactgtattagtttattttcatgctgctgataaaggcatacccaagactgtggaatttacaaatgaaacaggtttattggatttacagttttacatgggtagggaggcctcactatcatggcagaaggtgaaaggcacgtctcatatggtggcagacgagagcttgtgcaggaacactaccccttctgtaatcatcagatcttgtgagacttactatcatgagaacagcacaggaaagacttacccctatgattcagttacctcccactgagtcccacccacaacacgtgggaattcaagatgagatttgggtggggacacagccaaaccatatcaatatatttggtggaataaaaaggtgtattaacattagccaattaagaacttatgtagaatagattgaactaaactatctctcagaattggaatcagtaggtaatttctacaattgataaacaaaaactactaaatatgctatttagaaagatgaaggtaaccactaggcctaatacaaagagttgaaaatgggttgctctcaggagtggaactagactggggagaggtagaaactattattttttcagtcatggacctgcattgctttggcttaacaacagcaaaatagatgttttaaaaagcaaattggcaatagcttgttttcaactgttaagaaacaagcagcctgagcttcggataagaaagttctaacctaagatgtatcactaatatattctgtggttctgaggaagggctgtctgatgtgtgcttcagttctaccacttttttttttttaacctagtgctagataagttctactgtctttaaaaataacrgcatgtgttgccacagcgcttgttccatataccatatccctctgtctgtagcgcatatgtaccatatagattatctcattcattttatagaggatcaggatagatactacatatctttaaatccacctttagagaattttaataccctttaaatggaacataatagcatatcaacatgattggccctggaaaacttttaatgagttcttatccttttgcactttagggaaatgttcagttttctaacagtgctgagaggatgcctttgtgtttaaacttactaggtgatgatgatgatgacagtgatgtaacgtgtcttgtcttagctatgggcgtggatcactgtgtagcacttgtctattccaaaatctagtacaattccttttcatgtgaaacactctgtaaatacatattgcttaatgcaagaaactattgagaaaattaagcttcagagaaattgagtgactgttgagaaataaactaaaattctgagcccctcagttgactgaatgggtctccttttggccaagggaaccctagagaaaccttgaaaactgagttcttggccacgactggaatggggaggtcaactatgcctgcttataccctttccctcactaactgccattaagttttcttccctaagggctaaatagaaaccagccctttcgaaagactccacagatgctgataccaaccgaaagtctgactgctgcccctcccttttgtggtttccacaaaacaactgaccagcgttccctcctgataagagtggttctggcgaatctatggagaatgtgcagtgagggttttcatgttttccacttcacctttcgacatcagagagctgaaaactccaccctcagatcatgctaacaccaccgttttttgaacatgggtcccgtggagaagcatgaagctcaactgagcatgcttgcaggttgcagccctttatgagaaataaagctctgctttccaaatttatgarcctcatcattcttcagttgccatttttatgaagctgagtaactagaagtcaggtttttggcctttctagtcrttgctcctgtgcaaatttatagatatattgcccattaaagcattattattatctgagatctaaggccatatttgttttctagaagtagttatatttttactctttttcttcactattacatttttatttattaatactatttcatgaaatagcttctagtaggtatggttatgtaagttagtaaatacagaccattcactcatttgtaatctttttaccttccaaatgacaattagaaaactatatatatatgtgatcttacatcttaataagtattgggcttgtccacagttaacaagagcattggatctttggggaaatttaacaccaaatcagtgtcctagatttatttactcttaattacaaaggcagcctggcttttctgtcaagtttcttttacccccatgataacaaacttcccttgtttgtgtaacttcctggattcttagagctgaaattattgttcatttctatcacaatgataggtcccaaatgaacgttgaagtaatctgttaaaggattgtattttttttcttttcagaattctaccttttttactttagtgacttgaagagaggacaatcacagattgatgattgttcttggaataagagcttccatttatacattacagttgtccctctgtatttgcaggggattggttccagaaccccttggataccaaaatttgcagatgttccagtccctgatgtaaaatggcgtagtatttacatatgacctatgcactcctcctatttttttttcccttatgggtgggggagggtggaaagaaaccaagagaaaggaaccctcttgtctacttttaatcctctttgaattacttacaatatctgatgccttgtaatgccatgtaaatagttgttatactgtattgttttatttgtattatgtttattgttgcatttttattttttaaagatttgcagaatattttcgatctgcgattgtttgaatctgcagatgcagagggcttactgtgtatgtcttcttaacctcctcctagttgtctttcagctccatatttacttatttttaaaattacctacagtaaaatttactttttttgtggacacttctgagttttgacagaaagtagatttgtgtaaacagcatcacaaagtacagaacaggtctgtccctccccaaaaaattttttgtggccccctttagggtcaaccctactctcttaccatcagcccctggcaaccaaccagtgactgcactttatcctatagttttgccttttccagtatgttatgtaaatggaactgagttgagcttctttcgcttgatacagtgtatttagatgcatccattttattgtgtgtatcaatagtgcattcctttttattgtggaataattaataaacattgattaaaagaccactatatgagtataacatagtttttctccatttaccagttgtacatttgcattgtttacagtttttggtgattccgaataaagctgctgtaaacatatagagatttttgggtgaacatgtttttatttctcagttaaatacttagtgggatttctgggtcacatgctaattgtatgtttaactttacaagaaacagccaaactgttttccagagcaagtgcaccattttcagttcccatcaccatattttattttaattgaaaacatgtaaatgtggcccactttagtatctattacatttagaaaagtaaataatcatgtaaaaaattggtaattttgttttttgtgttcttgtgttactcatagataactttgaaaatcgggcagagaatttgaaatctgatgtaatatatgaaagagaagttttttttaagtgcatccctttactgatgaaaagagctttatagaccatagccaaagttttatgtacttgccatttgtgtgctctttctcatttttatccttacgttgtgcacacatccttcaggaattaccttgttgctagggtggggaaataaaaattatgttaacagtttaaagggaaaaataaaatagtaatagagacatttatctaacagatatttgctcagcaagtatatattggatgcctattaagtgctaggtactttcccagatgctagagatccagtagaaagcataacagaacaaacaaaaatgaacaactacaaaaactccagaacttaattctagtgataagtgctaaggtaaagcacaaagcatggtagggggaaataaaatattggtgggaattaacaatttcattgttaagttacatgcctttttttttttttttttttttttttttggaggkggagtcttgtgtcgccaggctggagtgcagtggtgcgatttcggctcaccgcaacctccgcctcctgggttgaagctattytcctgcctcagcttcctgagtagctgagattacaggcatgcaccaccacgcccagctaatttttgtatttttagtacagacggggttttgccatgttggtcaggttggtctcaaactcctgacctcaggtgatcctcccgcctcagcctcccaaaatgctggaattagcgtgagccatcktgcccggccatgcctytgtttttgttgggcaraatccagggcttatttgttgttgttgttgtttaataaacttcattttggaataattttagattgggttaagctgcaaagttagtacaggattccagcatactccgcaccccagtttttccctaattttatcatcttaacatcatttaccattgccattgtacatttttcaaaactaagaaactaacattggcacatgcccttaactaaactccagattttatttggatttcactagtttttccactaatgtcatttttctgttccaggatctagttcagcataccagactgcatttagtcatcatatttccttactgtctaacaatctgttacggtttctcaatcttggatttgtttcttctctctcatttattttatcatttgtttgtattagtgtggattcatgtatatttgttttatattttgttgctcaaattgttccagctttggcctttggggactctttcagattggttcacatttccctttaccatacctccagtcttctgatgtttgagcacttggttgccttctgaccctacaagatgctccaggctcatcttgggtattctttgctccagcattagaatcaagcctttctccaaggaggcctagttccttttattggagaatggcattttgaaaccaaaatctgggccaggtgcagtggctcacacctgtaatccctatacttcgggaggcccaaagtaggtggattgtttgagctcaggagttcgagacaagcctgggcaacatagcaagaccctgtctgtacaaaaaactttaaacttagctgggtgtggtggtgcatgcctgtagtcccagctactctggaggcttgaggcttgagaccaggagattgaggctgcagtgagccatgatcatgccactgcattccagaccctgtctcaaaaaaaaagaagaaagaaaccaagatgtggttgctggtgtgctcattgctattgggatttagccagtctttgttttattttgttaaatattcttgaaatctaaatttgaaaattatgccaaacaggtagcaggtcagaagtaaaacagcctgatttaggaaattacaaagtgaaaattttgtagggctctattaagcttagcttttggaaacagatgtattccagtaaaagtgcattgtatttatttacaaggcattgtgtttatttaaatattgaaagtatttaaaatacacattttggtatacaacttttaaggtaagatagtttctgttattgaagtttgtttttgttctaagcttaccttagtattagcatccttaccacattgaatggaaacaatatttcttttcttttaattgaataggaactttggacttttcttcccatggatagtaggtagaaattgggaatactattgttargtttccccaagggaaattgacatcagttttaatagaattcacttagtaatgagtttctttttcaaaagtgatgtttttttttttaatatgtattttgggttttagtctattgtagatattttctgctttggatattttaagccacagggataagtaaattatttcagcaacccaaatatggtttagccggtatatatttcttttcggtccttaratggtggcaagttttaaaagttgaattaactttaagttgggarttaaagttagctttgtaaaaaatgsgtaagtttaaaagtggwtaaggatgtttattattgctgtatagaacaatgkgtctattgctttaattctgttttgttttgtttgtttgkgtctttgcagagaatgtaactggtcactacatttccccctttcatgatattcctctgaaggtgaactctaaagaggtattgttttgacttgttttgggaatgaaaacgtgtactgccagtatcaccattagatgctttttggaagcaccttgaaaggaaaaagtgttgttggaagtcaggaggacaaacaggagttactataacagggtcataagcctcctatatgaattaaaagttgtatgagaataggattcttccatgaggaattgggagaaaggggtgttactggtacataaaacttagaattcggtaggaaataaagatttaagggtagtaatttaggaaattaccaagaggtttatttacaataatcagctaacgtttgtggattattttttatttgctagccactatgtgaacatgatgttatttaattgttatgagttgctatttttctttccaaggacactgaggctcaaggcatttttatagacttgtctaagatctggtaagtgccagagctagttttggaattagcttctgaccacaaagcttatgctctttaaccactctatgaaacaggtgttagagaaataaagcaggggtaamaatggtggtgtttgaatagctgttctcttagaactgaaaatcacttgacagttgtcagggtgtgaaagatgccaggagaactgatgctatcaaatcaaaattgttggggtgtttcgagatctctcatgattagttggtaatatggcatatttggtagtattcatgatcatcattaagttgtaggttatttccttaaaatccaagtagtgaattaccaaatttttaagggggtacaactattaagtaaataaccaggaccacattccatgttgaaattatatgtaactcgttaatttggggttgggttttctaggatgtggggtgatcaatataggggcagaggccactgaagaactgaggaggctacttcagatgcaagggttgtttgaccctggtgttacctcagaggctgaatattatgcatcatagtgaggttatgggatgtgaagtaggatttgtgctgcttcccagctcttcagaataaggaactggcagtagaataatatcaataatttatcaagtgcttgtggtacttagccagcactgtgttccctgcttgatatggtttatctcaatccttctggctttacatttagtacccttattttgttaacgaggctaagtaccttgtccatcatcacaaatctcgtgtgttttggaggtgggattggatttaggtgctctaactccagagtttgtactcctcacttctcttgtgtaatgcctccagctcattacttttaagtgtgcagctccaggacaatagaaggaaaccagaggcaaaaggaactctatgttactgtgtgtgtccatgcgagtgtgtgaaagtgcgtgtgtatatgtgttcctgtgttttgttttggccactgaactttcaaacctaaatatctcatgtctcccaacacttttctttgcttttggctaaaagtgcatgcattcacttattcattaatttattcattcaatcaatagtcattgaatgcttattatgagccaggcactgttctaggcactgtgggtgtagtagtgaataagataggtatagtccactcaattggaggagtcaaccataaaacaagtcagtcagataatgttaagtgctataaaaatacaacagggaaaggaaagataaaatgtgactggtgggtagtgttgtcaggggtatgctatagcaaaatctgtatacctcatcataacaacaataataataaagctgtatttttgagagtcgtgtagtagatagaggtagaggtggaaaagagtaagctagaaacatgtcagtgagaataacattttgtctaaggaggatgggttttgggaaatgtgaaattagagattaggcaaaattgatgatagggccagcaaatacaacaggatatgccagtgaattctggagatatggaaatggatacgcatggtggttgtgtaaataggtttccctagatctcagccagtaatgattaaaactcgtgctttgtactttgggatgtggtatattaagaataaaaataatggctgggtgcggtggctcttgcctgtaatcccagcactttgggaggccaaggcaggcggatcatgaggtcaggagatcaagaccatcctggctaacacggttgaaaccctgtctctactaaaaatacaaaaaaaaattagccaggcctggtagcgggcgcctgtagtcccagctactcgggaggctgaggcaggagaatggcgtgaacccaggaggcagagcttgcagtgagccaagattgcgccactgcactccaccagcctgggcgacagagcgagactctgtctcaaaaacaacaacaacaacaacaacaacaacaacaacaacaacagcagcagcaaaaacaaaaataatgtttcagagctgatttggaaaaatgattttgtttgttttgttttcttcattagtagtcattttggtgtataaacgttacatatgctggttgagcatttgtgaatggcataatttttcttcccaacccaccacgaagtcagttttaatttaaaagtgcttggtttaatgggaaaagaaaaaagaaaaaaagtgcttggtggaggcctagtaatcacaccttggtagaattcacaggcaggaggtgcagctgagtactttcacagcttgttagtcatgctccctggagcttcatttcaataatgaaatgactgttttaagcataatcactggaaactaccagtcttttcttaaagactgaacagagcctttgcttactttataaaaactgggaaaatatacgtgaaagaggtttggcttttctgatcatttattttatgaaacactttgatgctctattctggggatacaaatgctcaggggagaacgaagtgggcatttggtaggttctctgttgactcagatttctggacagtctttgtgtagaatgtctatacaatagtcatatttttattgctatgcagtgccactgtatactttcatgaaatattgcagtctttcaccatcttttcttttataggaaaatggcattcctatgaagaaagcacgaaatgatgaatatgaggtatatccaaaggtttttatttttgtgaatcacttttatattgtctgttaaataccttgatgatagtttgcatttgtaaaatgattctaaggtttttacccctgcaagactttcatgtgcattccgatgtttttctttaaggcagctagggcagctattgccatttaactttttttattgtggtaaaatattcataacataaggtttaccattttaacttttttaaagtacaatttagtggcattaagttctttcacattgttgtggaatcctcatcaccatccatctccagaactttttcaccatcccaagctgaaactctacacgttgagcaacttctcatttcctccctcccccgaggccctgggaagcactattctactttctgtcttatgaatttgactgttgcaggtatttcatttccacttcattttacaatgggaaaacctgagagaattagcacaggaacccagattttaataataagttaattatcttggtagatggtctaaagtaaatgtacttcattataaatgaaatatttcactttaaattataagagagaagatggtttgagaggctgttttagaacccaggaacaataatcttttgggagtagaggagaagaaaaacacttataccaaccgtatgctaaaatgaatatattctaaatatatatattctaaatgtatgctaaaatgaatatattctaaatatatatattctaaatatatctaaacaaatatatgtggctgtcaaacctttaatagttcttgacttaggaccagaacatttgattgatgtctgtcattccatctcctgctacaagtgtccttttatccctctgattctgatgccaggcagcttttcctgctgctttcctgtctccttttacctttccagcttcatttccatttattctctaccccaactgaaacttacagctccagcatttgaatctacttccaaacatacctgtgggggcctttaaattcctacaacctttgcctgctatctgtcttctatttttctaagctggtgtgattcttgaaccatctacactggaaccacttagagtgcttgttaaaaattcagattccgtgccccatctcctatttactaagtcagattctccgctggatagggcctggttaatctaggtatttcacaagtattctaggtgcatcctaaacgtgaagtttgagaaccactgccctagatgttgagtgaacaagggtttccagatccccaggggacttagtgtattaacctgaaacagttatttcaggttaatgaaatacattagtgggaaaaacatattctgagcccagacattcaaattaaaatttaattcttagaacacagtttttatgttagagactgtctgatttgagtttatttgaaattttcaggattagagaggaaagaagagtgatttcttcctgtcttttccccatgtatataaaatgtactgactgctttttcatacatcttattagtttttctattttgacttctgcaacaaaaatacaaggaaaaaaatggagagaaagaaaaggactgaaggagtagttcacagtccttgccacatacacaactttctggtttgacttgtgctccttttatcttttttattttcagataaaatttggcagaccattgttggtttataattaacattaatcttaggaaaaccaggctaacattggctttaaaaaattaattacaggacaaatgcatcttagctggagagaagaaaggcaggttggaaataagctcttagtgattacgagcaaatgaagagggagaatgtggtttgcaggcttaaaattcaaacctcatttattgttcatttggcctaattcaagtatctgtgagtggttttggtaggtgttattgtgtaaaacgattgtcaccagcttggtcttcttggtcacctctgagtattcatctgcaagcatttgttcccgtatagccaggctttcagggatgaataaattatgtggacatctgccatttactttggtttttctttttaacagctacttcagacatatttaaacaggtgcaggggtacctcatgaaagagcatagaaaatgaaacataacagcaggactgtatgtaaggttgctaagataggtatgagacatacttctaaggagcagytattgagaatttattctcagctttgttgtttatctcattatgggcttgcagctttgccatttgtaacctttagtcttatgtagaaaaacttaatataaatcatcattacttttatggctcaatatctatctacatttaattgtgtaaatagcattctttgaaataacagcattccatgttacactagaaaacctctgtgatactcttcagcaatgctttagtccagctttggctgcatattaaaattgcttggagagcctataaaaataagcagtgccctggctccacccagagcaatttaattcagatagatgagagacggggctctgggaaactttcttttttttaattggttgaagctggtgaggtggtattgatgtgtggcatgatcgaaaataagtatgttaaatcacttctcaaatgatttgggatgaaagactagttttttggctggtttatttctaattggttgtaaacagatacttaaaaaaaatgcaatcaacatgaatcgttagaaaagtgttggcagggcgcggtggctcacgcctgtaatcccagcactttgggaggccgaggtgggcggatcacgaggtcaggagatcgagaccatcctggctaacacagtgaaaccctgtctctactaaaaatacaaaaaattagccggaagtggtggcgggtgcctgtagtcccagctactcgggaggccgaggcaggagaatggcgtgaacccgggaggcggatcttgcagtgagccgagattgcgccactgcgctccagcctgggcgacaaagcgagactccgtctcaaaaaaaaaaaaaaaaaaaaaaaagaattccagaccagcctggccagcatagtgaaaccctgtctctactaagaatacaaaaattagcaggcgtgctggcgggcacctgtaatcccagctgctcgggaggctgaggcaggagaattgcttgaacccaggaggtggaggttgcagtgagccgagatcatgctgctgcactccagcctgggtgacagagtaagactccgtcttgggagaaaaaaaaaaaaaaggaaagtgtaattcagattccaattttttattattagatttaacagatataaaaattgctcttttaaattgctacaaatgtttgtaaatgagccagtaacaatcggtttgcagactggccctggtctttggctacacttggagtacagtgttttaaaccatcgttgtttccttgataaattgttagttattgatgtcaaaatgtgtgcaaatcaactttaaccttaagactttctctttgtaaggcaaactgtagggaattatttttactcatcattgacctagggtctcctttggtttatgcattctacaaagttcagaaattaaaaaaaaaaagtgaagccatagtgagtttgtaactttagggagtctgaactcaccagatatgcaagctaagtctggaatatttagtgtagctctttgtgaactctgtaatagctgtacttacatcctgaattttacactgtgattgtaacttggatttaattattattttatcattttaaaatatattttacttcataattttctgtatattgtcattgatctttgtaacaacctcatgtggtgagtgggacagagatgatcacacttactttacagattggaaaagtgagactgaatccttacatgagggactggttctctcacttctattttagttggaaaataaaaattgaaacacatttcttgactccattctagttttgtcactacwcatcaaagatattctcagactcgtaacctctgacactgtgtgtaagtgctcaagtgacatggtggcctaaatttggctgtgttttagacaactctaatttctagaaaaaatttaaggcataggtagatgtatgatggagactcaacattttttttgtcgggggaaaacatctaaggyattcttataagggaggtaacggaaaaaataaaaggtaaaatttttaatgttctctctttkttttgtttttaactgcagaatctgtttaatatgattgtagaaatacctcggtggacaaatgctaaaatggaggtaccgatatactttattaatatgaaaccgaaatgattataatgatataaaactttgttgcaagttgtttggcataatattttaaattttttttttttttttttttttttttttgagacggagtctcgctctgtcgcccaggctggagtgcagtggcgggatctcggctcactgcaagctccgcctcccgggttcacgccattctcctgcctcagcctcccaagtagctaggactacaggcgcccgccactacgcccggctattttttgtagttttagtagagacggggtttcaccgttttagccgggatggtctcgatctcctgacctcgtgatccgcccgcctcggcctcccaaagtgctgggattacaggcgtgagccaccgcgcccggccaatattttaaatttgagatagttcagaaaaatactcaaagctaagtatatacgttatagttttatagagagtttttttttcaattttgcctgtcagtttgttatatacatattaattttctttttttctcctttgaaaatggcaaatacttttaaaggttgtttaagtagattctgagatatatttggttcatagatggaactgaaacttttatttggggctgatggcaattttaatttattaggactcaattctcctttagattttattctaccaggaaataaatcatttcctggttaactcaatttatgactatcacagagcatctgctatttttctggttagctttttttttttttttaaatttttccgggaaatgaacctataagaacttcctttttgctattcagaattttcttgttctttcttcagttagctatagaagcttatatataagcttccttatagttctaagtgaaatttaatttacgttactttgtttagttatataaaccttctataactttgggtgtgatagcaaatattattttaagtatttaaattaggcattattatgtaggtgtatatttttcagaatttatatttggaagagaattgtcagtactatcaccaggtcctggcagtattttttgttaacactttagtaggaaaaggtaaagatattagattattcttttggtgttgtttcatgtataatgtttcatcattcttgctagtctacctcagttaggtggaggatgcaaggatctatgagaatctacctaacttaagcagtgtttcttcattcaacatggcttatttttttgtttcctatatacataggttttaaagatagcaatgtgaatatacatgatagaaaactaactttgaggccgagtgcagtggctaacacctgtaatcccagcccattgagaaaccaaggcgggcagatcacttgaggccaggagtttgagaccagcctggccaacatggcaaaaccccatctctactaaatatacaaaaattagctgggcacaaatttttgcatggtggtgcatgtctgtaatcccagctatttaggagactgaggcatgagatttgcttgcttccaggaggcagaggttgcagtgagctgagatcacaccactgcactccagcctgggtgacagaatgaaactctgtctcaaaaaaaaaaaaaagaaaaaagaaaactaactttgaaataaaatcagttggtgagaatctcttttttggtgattttttaactttattgtatattgacaagttataatcgtatatatttatagggtacaaagtgacattatgacttatgaatacagtatggaataacttaagctaaataatatatctgtcacatcaaatacttaccattttttgtggtgagaacatttgaaatttactcttagcaattttgaaatgtacgttattaactatactcatcaagttgtgttgtctcaacaataaaacatcttattcttcatgtctgagattttgtatcctttgactatcatttccctattccccctacccttagcctctgtaactataattccactctctgcttttatgagttcaattttttagattccacatataggtgagaacatgagatatttgtctttctgtgcctggcttatttcacttgccataatgttctccagtttcatccatgttgccacaaatgacagaatgttctgctttttttaaggccaagtgctattttattatgtatatataccacattttctttatccattaatctgttgatggacacttaggttgattatatattatttccaatgttttttgatggagtctctagagttgtctatatataagatcatatcatcagcaaacagtgacagtttcacttctttctttcctactttggatgccttttactgttttctcttgcctaattgctctggctaggatgtccaatactatgttgaataaaagtggcaaaagtgggcatccttttctttttccaaatcttagaggaaaggctttcagcatttcactattgaatatatggkaggaatctttgagttagttttattatcataatattgatgataataaagcctgagattagtaacaaaaggcaagttgattaatctttatcctcttgccatctcaatcattttattatttgtgttagaaataatggagtacataaataatagagtgactaaatatatgatctggtgtttcctttccaaacaatttttctcatatagtgctataaattagtaataagagctggcttaatttmttttaaagcatctttgatcattaagttgaaatatgaatgtttagtctgaaaatagcagatttttaaaagtactatttggacatagaattaattatttcttrtcccatctccttttcttccttctgtgatttgcttagattgccaccaaggagccaatgaatcccattaaacaatatgtaaaggatggaaagctacgctatgtggcgaatatcttcccttacaagggttatatatggaattatggtaccctccctcaggtaasatttttgttacaatggtaaaatgttcctgtcttctgaaaaaattgccttataaatcctgtgaactactgaatttaaattggttctgaggacatgtcatttggagaggtttgtaaatttggaatttattaacgtggatggagttttagtatatcaataaattttgttttaaaccatatatatgtctatactcaagttcttggagtcaggcatatggaatgttcacatttgacattttgaatacatttttttttttctggtcttgcctattaagtgtcagtgaaaaacttttaagcgaggctttatctacagtcattcctttgaacatgacaagttatgcttttatacacatycatatatgatagcacaaattttatattttaaactttaacagatgaatgtgttaaattattaactttttcctggaactcattgtaaattgaattgcacaacttatttactgttatgagttaataatttttaagtagaaagcagagaaaacaagagctaaataatgataaggtagcattcctgttggagaataacaactatttgcttttcttcctttctttacctcttttggttttctctcatgtttcctcattcccaggaagaggtaactcttccagattatttagtgagtaaaactcagaatatgctgaatcaaaattctaggttttggggacacagagaaccatctgcctttatgtttataaaaaccatagaccatctgtctggaaatttaatttttatatttttatttattttaatattttgcatgaaatttcaagatggtattggggaaatatctgagaagagaggtcttgttttatccaacatgaaaaagcagctgcccgtgtagaataaacattcacaggaaaatttwaaaaaaaaattgttttctaaagagtcaggctgtctctgattcagttagatcacccacatggatacattcttggttaaaatgggcacttctaaagtgatatgctaagaatgagaatgcctgtggaaaccatgaaagcaggttttctaactctccaggtacttaaataggtatgctgtttgacccaacagcaaaaggttgaaaaagttctgtaaagcttaggggatgcagcctgtaggaaatgtgtggatgagggtaatgctgaagaagccaatgaattagagacagacaaaaacagagacgtaagtagaggagctagagaataaactaaggtgcatgtatttatttctttaaacatttattaaggatttatgtgctaggcaggatattaggtgttgggtatataaagacagatgggatatagatgtgacatcaaggcctcatartaagtgactggaaaatgtgggtttgggagtgagattgtcactttctagtaatgtgaccttgggccttgggaaagatacttttcctcattttcttcatctgtaaaatggagaacataaaatatctacttcttatctttgtgttgagattaaatgagttactgcatttgaatagtgtgtaacatgtagtaatcaattattgttataattaagactggtacttttattatcgtatggttctttccctaaagttgtttttagtctgattggggcaatcaagaactaaactgctggttatgatgtggtataataggcactactaattcatctactaatttaaaattatgaaaaaaataaaaaagcaaacctattgacaggaaagagagaaggggaggaacggaggtaaaaacaaaagaagcttctgtagttttccatttaaagtcctgccaaacttctgtgctcctctggatgtgtctggatttccagatgttctgcagtggtattaatctggcaggtacggtagttcttctactaataaaacagaattagactgtggtagtcccttaattcattattcaccctgcattcaccattgcctacctaagtttcatactccatccaatatccaaattgatatttttaaaacacaaatttgcagatgcttttcttgtacaagaacaccttaatggtctcctgttgcttaaaagataaaatacaaaattcttaacattgctactcaaccctgtgtgatctggcctccgcttacttctctatcctcattttgcagcattccccctttctcacgtctatccaccacaaagtcttcttcagtgtttctaacttacctcattgtgtcctcaccaggccttcaccaaactgttcattcattcartacatatttattaaaggcctgtatatttgcaaggtgttcttgtaagtactgcaggtaaagcagtgataaaaagtgacagatatttctctggagcttttattttagtcagataaacagacaataaacaaaataaaccccaagtaaaatgtcaggtggtggtaagtatgtcaaagaaaagttaagcagggaatgggactaggggatattaggattgttgcaatttagacagggagacgatctcagtgaaaaggtgttatttgagtaaagatctaaaggaagtgagggaacaagtagtgtggacatctagaggaagagcagtccaacaagaaacagcaagtataaaggtcctgaggtggaaataggcctagcatgtgtgagtatcaaaaaggaagccagtgtggctagaatggaagtgaaagaggaaatagacctgcattctgtctgccattttcaattagagatctgtactacttttttaaacctgactgatcttggagagagagagagaaaaagagagagagagtctgtgtgtgtgtgtgtgtgtgtgtgtgtgtgtgaatacaccataaattgcatataagttagttatttatcaaagaaaataactaaattgaatgatgtttttaagaatgctgaaatcatgccaattgcttatgggatagcttatggaatagctctacctgatttttttttttttttttttctgcttgatggttgatgttcagacatgaccctgttaaaatgaaagccagcccctggtcccatttatctttttaatctcatctccaactctccttctgccttctgcttcttcacttccacactggcactctggtgctcaaagcacactgatgtctcaagccctcaccttcactgtgtcctttcctgggaacactcctttccaggtatgcacatggcttccttaggttgcctttaactcatcttcttcatagtatctgccaatcatcctttaaaacttttaaccctactcccattccccctctcatactttatttcccttttctataacacctgccaaattgtaacctgctgtataatttatttattatgtttattgttaatttctcccagctagaatgcagacttcatgagggcaggtattctgtctcttttgttcactgatacattctgactacccagcttaatgcctgccayggagtaggtgwtcaataactgtgaaatgaataaattaatgcattgtgtatgtgtgtcacatttgtttcataggcgtgtgtggatactttagctgttctatgattcgtcttgtaacagcaagaaacttgttcagagcagttactgagccaactgtgtacttagaagaacatttaagcagcagaatactgtttaagtagtagtctatccacttagcttgtgattcatcagtataccatcattattcagaccttcagctgtctagaccgttagcctgaatagcatctcccgcactcctaataatgccttcctcaaagtttgagcttccctgggcaaaaattcatctcgtcttcccaccagtttattcatattgcccacatgtaatgggttatttcagtgttacatctcattgagtgaatatttagaatacctgtctggaaaatattaaaagactagattcagtttaaattcaaaatttcttcagtcttaatgtagtattgatatgtttattttgtgcttaattataaatttggttcattgacctccccaatcaaatatatagtcctacttattagctttataacctgagacaagtgactaaatctctctaggcctgtttgtttatctgtatgatcatactacctaccctacaaggttattgtgagtattgaatgagttgatcagaggtgtttggccccatagtgagttcttaataatattaactcaatgatgatgattgctactgatgttagctactagtagtaaaaacactggtagaggcttttgctccaaattaaagctgggaaagcataggtgatggctcatccctgtaattccagttctttgggagcccaagacaagaggatcagttgaggccaggagtttaaggttgcagtgagctatggtcacaccactgttcttcagcctgggtggcagagtgaaaccctctcttaaaaaaaaaaaaaaaagtgatggtagtgggaaagtcaaaggtcttccttcgacttgtgataggaatgctggttaatcaggaagatattcttaagaaccacctgtatatatggctttgtatgattcagggattttttaagagacctaaggaccagagtgtggtgattagaaatgtattggccattacttatagattgtaaggtaataatcacaaacacctgcatgaaaatgagaaggatttgttttagggtataacaataatatgtgtattctgatttattcatttttatagctttataatcatcttttctataatactgttttcctgttgataggttgtttgtagctttcttgggtccatgctaaagttttctgtatagatagtaaatatacttatatacctgttagtcaaattttgagttgtataactattctatagatagtatatatacttatatacctgttagtcaaattatgagttgtataactattttactttactaagtatttccagattgttataaaagaagttgtgacaatttatactcctgccagcagtatatagggttccagtaccgtatatccttactaatattttagattataagatttttaggtttttgaaatagtatcttattgtgattttaactagtatttttctgatcagactaggtatcttttcttaatttataagtcattcatgtttccccttcttttaattacctgttcatatcttcaacccattttagttgggttgccctttttcttatttagttgccaaaactatttctaaagtctggaagctaatcttttgtcatttttgtgaaaccaatattaagattttgaacttctgcttcttratatttcttctccagtgtttgttcttttctagttatttgtctgttaatagttacacacataagactccacaagagggcataaccaaagcttaaatttgtcaagatttcctttcctgttgaagttatactgtattttcaagttaaattagaggtgagttagtgtgtctttttgtagtaaaaactaaggcctgtagatgcagagtattaaaggttggaaataaagagaaccagtctggtatttttgctggtaaggaaaatcatgaagaattggccctaaacataacaatattgtagagtttaagaattttcyacttgggtacttaatttctcaacatatggaaccatattgctaggtaatgttgaaattggagttctgaggaccaaccaaccaacagaaatagtcaccacaactaagttaatgtcaagacagtctttgtctctgtgtgaggaatgacttaaaaaaaattaatgctcatcaaaattgtcataagtaggtcataagtatgtgggcttcatgttcactggtagcattcatgcagattgtaaatgagcactaacaatctcagcattttagggctagaatgtgtctaaagatcctcttattggccggcgcagtggctcacgcttgtaatcccagcactgtcggaggccgaggcaggtggatcacgaggtcaggagattgagaccatcctggctaacatggtgaaaacccgtctatactaaaaatacaaaaacattagctagggtggtggtgggcgcctgtagttccagccacttgggaggctgaggcgggagaatcgcttgaacccaggaggcggagcttgcagtgagccactgcactccagcctggtagacagagggagactctgtctgaaaaaaaaaagaaagaaaaaaasatcttcctatttaagcctttcttaatagctgaagaaacagatctggatagtttaatcaagatagtttgtggtagaatctagatgttttcctttaggccaatgggacttctagcttgtcgcatttgttctcttgggagtgggagtagggataagcaaaattatgagatgggatttctgcattagcaaggaggaacctctcagatattttctgattctgcagtaggttgtttgattctgattatacctgggtgtcccatcctggtttccccagcacgttaagattatcattctcagcaaactatctcaaggacaaaaaaccaaacaccacatgttctcactcataggtaggaattgaacagtgacaacacgcacacaggaaggggarcatcacacactggggactgttgtcgggtggggggaggggggagggatagcattaggagatatacctaatgctaaatgacgagttaatgggtgcagcacagcaacatgacacatgtatacatatgtaacaaacctgcacgttatgcacatgtaccctaaaacttaaaagtatcataataattacctttattgcatttgtcacaaatgccatgccatttattataataataataattcttattacctttattgcatttgtcacaaatgccataccatttattaacatgacactctccatggtattgactgtttcctataaatctctgttactggcccaaagtaggtactcaataaatgttttactgtatgaatgaatgcctgttaatagaaaaaaagaagcagtaacgggaagactgggaaagaacagaacctctmtaggaaagttacttaggagattgctcagagtaagagaaggtatttgaaagaagagaaccgtgaagtagatggggttatatttgaaaataaatgccattcaattgttatcataatttgcacataaaaaatgattagtagcatgagttctaatacaatctttaccatatagaaaccatgagtttgtgcaagtttaaactctgtgtttcaatttacttatctataaaatggaattcgttatggtatattattcatgtggtatgtatgtatatatgtgtatgttgtgtgtgtatatattagctagaaagtgtttgtcacctatgaccagtatgtaagattaacaattgtggttattcttatattttcttagtagtattagtatttggggcagtgaaatgttgttggacttcatttattgatttttttttttaagataaagttaggccaggttatttctgaataaactaattagtactagaaggaaaatattggaatttctctaatgcttagctgtaaataagtttgtttgtaattatctatataaaattaaaggaaataagcttagataacctgaaatcttagataataatgataatctgattcttgggatgayggtctctgtatcccttttagtttgaatttaaagcaaataattttagggaacttctacagttccatttagaatcaggcaattctgaggctttttgggagagatagtgcctaagggatctttaatcttactagcaaatttctattacagtcttcatttataaaaattcctatgtgtatattttgtaaccaacagggtataatcttgccagtaaactaaagaattgatgtcttttcatgtttttatcaaggtccttgagatttgacaggtagaggattttttaatggaatgaataagacaaaataggtttttattttctttagtagtgttttgtcctttcatttataaagggaaaactggrttccttttagtaatttagatccatgtgctgttaccgggtcaaaggaagcggtgaatgacggaagccacagttgaggcagtcagcggaaacacagaaacaagggcacagacagtgggaacatccactgaaactctaaaagtgaatgtgaatttattccctgactgaacttggaagatgagtatgtctgcatataccacccacttgcagatgcaattataccagcaactgagagayggaggaaatactataaatctgttttaaatattatgatccttagggacatactggcctgttggccttgggcctatgtaatttctgataatgttttctttggattattgttatctataaaactttgtgattatgtggaaagattaaagtacattatagtattaacttacatttctgcttttttttwaaaaaaaaattttagacttgggaagatccccatgaaaaagataagagcacgaactgctttggagataatgatcctattgatgtttgcgaaataggctcaaaggtttgttttatagactgtattaattctaacgtgagttttggtttattcatgccataaaatttcattttagcctctagttcttcaactcttcagagttcaagcctattgatttctctgttatcagtccctccttttatcttcactttcttgtcttaaaccaggggttggtaaattatagccctgtaacaagtcaaagccagcctaacacctgtttttataaataacgcaggtatgcccattcatgtacatactgtctatgactgcttttacactacgacggtagagttgaggacttgtagcagagattgtatagtctacaaagccttttattattattttattattttatgtctaccatctgaccctttatggaaaaatttgccaagtcctgtcttcaccttccttgcctattatttagataaaaacttcaattctcatgaaagtcatctgatactttttcattttttgtgtgcctgcttccaggttgccacatcctactgaataaaaacaaaatccacaatttcagagaytgatgctccccatcaattcttctatatgtctttggtcagttctttcttctattttctactacgtttattgttactatttcttrttctctgcagacattcaactcttctcccttttttctcactcctagaagaacatcttacctttaattttgtagagcctcagaaaccagcacataaaaactttcaatgtggtttaaatttgtatttctctgatgattagtgatgtagagcatttttcatgtgtttcttggccacttatatttctttttttgagaaatgttggttcgtggcctttgcgcactttttaatgtttttcttgttgagttgtttgagttgtcttagtcctttgttggaggcatactttgcagattttttctcccattctgtaggctgtttattttgttgattatttcttttgctatgcagaaggtttttagtttaattaagttaaatttgtctatttttgttttcattccatttgcttttggggtcttcatcataaattctttgcctaggcgatatccagagagtttttcctagattttcttcrggaatttttatagtttcagatcttaacatttaggtctttaatccatcttgagttaatttttgtatgtggtgagagataggggtccagtttcattcttcagcctatggctagccagttttcccagtaccatttattgaatagagtctcctttccccattatttttttgttatttgttgaagatcagttggttataggtatgtgacttcatttgtttgttctgtrttttgttccattgatctatgtgtttatttttgtaccagtaccatgtttatttttataccagtackacagctatgtggtataatttgttgctgagtaatgtgatgcctccagatttgttctttttgcttaggattgctttgactattctggcttttgtttggttccatataaacattaggattgttttttcctaatgctgtgaaaaaatgacattggtaatttgataggaattacactgaatctccagattgctttgagyaatattggcattttaacaatattgattcttccaatccatgagcatgggatgtttttccctctgtgtcatctatgattcctttcatcagtgttttgtagttcttgcagrgatgttttacccacttgattaaatgtattcctgcggggtgtgtgtgtgtgtgtatgatgcgtgtgtgtgtgtggctgttgcaaatgagattttttaattttgttctcaacttgaacattattggtatgtagaaatactattaatttttatatatagattttgtatccttaaactttatcgaagttgtttaacaagtctaggagtcttttggaggagcctttagggtttcctagctacactatcatgtcattagtgaacagagatcatttgacttcctcttttccaatttagataccttttatttccttctcttgggtgattggtctggctaggacttccagtactatgttgaatgggagtggtgagactggacatccttgtcttattctggttcttagggggaatgctttcaactttttcacatttggtatgatgttggttatgggtttgtcatagatggctcttactattttgaggtatgttccttcagtgcctagttcgttgaaggtttttatcatgaaggaatgttgaattttatcacgtgctttttctgtatctattgagatgatcatgtggtttttattcttagttttctttatgtggtgaatcccatttattgatttgcatatgttcaaccatccttgcattcctggaataaaccctacttgatcatgatgaattatctttttaatgtgcttttaaaggacacaagaacaccagtggagtgttgaagcctcccactagtgtattkctcaggttcttaggtttagtagtagtttttttatgaatccgggtgctctgatgttgcgtgcatgtatatttaggatagaccttgatgactgtgtgccttggtgatrttcatcttgcatagcatctctcaagtgttctctgaatttcttgtatctgggtgaaaaacatggaacaattcatgaattcacatatcatccttgcatcttatagccagagaagtttwttcctttaattaataagacctgaaataatacttactaaatatgaaataaatatatgactaccatctaaanaatagttctcggttaggggtatgctcctttctttcatgcctggctatgagatgagtggttgaatcagctgtaagaaacatagtggtaggaagtcacttttaacaccgcattgttaatgggcagagggaaagaagcagagtcctggaagttggtwacagacttagaaccacagatatagaaaacttgaatgttctaagtcccttgagggattttgtattgttcatttggtgtctaagaaaactaaatgttatactttcagcacagatttgttgaattgatttagattgaattgaagcgtggtggttttgtaagaattctaccatttattcctaagcatctagtttttggtttgattgagttttcctttccagtttttaacggtgttacagcaaaacactgctttgtttgaaataaaactgtgcctttctgttgcatgtgaagtcaaagagtgtgtctcattctgaggcaacttggtaatctgggcatgcttccttgcttgctttataacctatacatgtcttatctgttcttatgttgtttgaaattttaaaataaattttgtgaataaaaatagataaaacaatttagaatgtgctttttaaaagctatatgtgatttccaggaattcttataccctgctgccagagtcatctacaggatttcttaactttgacactattgatattacagatggataattctttatgagagaggactgtcttctgcagcatcctttgccttttcctactagatgctagtaatacctcctccccagttgtggcaacccaaaatgtcttaggatattgccaaatatcccctagagggcaaaattgcctttggttgagaaactctcatttagtgtatccagtgtgaattaaccagtatagccaactttaaactggcaattatgtgataacttcaaatttgaacatttttgttttataaaggatcttacacatcttttggtccaatgtgccataccctcctgaagacttctgttctcaaggctttttattctagttgttccttatctgacagtttctagattattttccactctggttccttttcactagatcatctctgttaatgcccatgttagaatggagcagtctgggtgcagtggctcatgcctgtaatcccagcactttgggaggcgagctaagaggatctcctgaacccaagagttcaagaccagcctgggcaacatggtaagactgagtctcaaaaaaataataataaataaatagaatmccatactaccacagctaaacgcccttctctaaatatgatccagcctgtataagttagcaattacatatgcagttgtaaaatttttctatggagtactttagttttgatgtatattcagagctgcaaatatcatccatatctttataatcacttgtcatatgttccttttgggcttgagaatctagaatttaagcaaccasagtccamacttgaggacatgtatcagaaatactttgtgattgcagctggtaagaagcatgccggagggcasggaatgggaaaggaacagacagtatttcagacaattgagacctcaactgtagagggaaattctttgtttataatgtctcttcccgtggacagtgttgtcattatatttccttcacagatgtagctttagctattaacccctggaggcatgcacaaagagcagctgagctaaacacacagtggcttctgtgagttggcaccaatatcagttcagaggagcccatataaatctgctcatctcccattttccatctccagagccatcgtttctgtaatttttcaaatgggagtctaattttggagtggaagcagcttagttgtttacctgtaatttggagactaaggaagatgaaacttctctttctattaagaaatagaaaagcaggttaagaaatcagaggtttggtgtttttttaagaatgctgtaaacaatggttacatgcccttttatagaattagatcactgtaggaaataacatataaagtgtccctcagaaaatctgattccttgtctttgatcctttaggatattcttcatgaggygtatacttttcaaaaaaaacttctcctagcctttttgtttactgagaatggtaaggggaaaaatgaatgatttcctttaggaacccaaaccttaatactgatgcttatagtaaagtactagtctataaaccattatttgaggtgctctataagaattatctcatttattcttaaaactgctatgctgtgaaacaggtatttttattttcaaattttacataaaattatattccaaggaagttaagtaatttccccaaacttacattgctagtaagttggcagaattgggattgaatcccaggtatcttgtactggagcctgtgttcctagtctttacaccaggggtgtccaatcttttggcttccctgggccacattggaaaaataattgtcttgggccacacataaaatacactaacactaacaataactgatgagctaaaaaataaataaataaaatctcataatattttacgaaagtttatgaatctgtgttgggccacattgaaagccatcctgggctgcatgctgcccgtaggccgcgygggttggacaagcttgccctatccccttctgcctctactgctaatacttgtgagaattgatccacatatttatatccatcctatttatattctttagaatttgcaggttatagccatatgatttcaacttttattattcaaaatgacagaattctaatttttgagatttactttattaagatatgtttgattaaagtcttgatttaaatcagctgcattgcaacaagtttttctgcataaagtttgttcttttgctttaatttgataaatgtttgtatttttttgattgacgtttttaagaaattatctgatcaattttgtagttaaacacaaaaamgtaagtattttgttcattatagaataaacttgaaggtaggtattggaaagaagcgaaccattcacttaatgataacakagtttcaggagagaggacttaagggataggagctgttttattatggttcattttgacatgtatataacaacctccaccatcatcaaaaataatttgtgattaattttttaaattgaggtacaattcacataaaattaaccattttaaagtgtacattaaaattagtggcagttaatacattcacagtgttgtacaaccatcacctgtatctatctagtcccaaacatttcatgacctcaaaaggaaaccccatccccattagcagtcactccccatttcattctctaactggcccctggcaaccactaatttactgtctctatactataggtttacctattctggatatttcatgtaaatggtctcacatgatatgtaaccttttgtgtctggcccctttcacttagtgtgcttttgagattcatccatgttgtagcatgtatcagtacttcattcctttttatggctgaataatattctgctgatggataatattaccttttacttatccattcattagttgatgggcatttggcttgtttctaccacttggctattatgaatagtgctgctatgaacattcatgtatgagtttttgtttgaatactcttatccatttttttcacctaggaatggaattgctgggtcatatggtaattctgaatttactctttgaggaaccaccaaactgttttccccagcatgttaactccaacgaacaatattcaaggattccagtttctccagatcctcaccaatactcattattttccctttttgttttttaacaatcatcctagtggttgtgaaatggtattgtgatttttttaattaaaacaagcttacgtctgattttatcttaaacaaatgtggataattattttatccaataaaataatgcatttaaaaaaatagttttagccataaatgtgaagtagatttttttctagctttgttgagttataattgacatataataaactgtacctatttaaagtgtacacaaattgrtgatttttgatataattacatgcaaaattattatcaaaaataagaaaatgaacatatttatcacccccaaatgttttcttacacttctttgtaatctcttcctttgacactcccaaccctctgtcctcaggcaaggactgatctgctttcttagtacagtttggcaggagaagaagctttggctcagtttggggtatgaatcccaggtcttccattcactagttctgtgatctcaggcaaaaattatttaacygttgtgaatcccagtatctttgtttccaagacagggataatatctacactgtacactagtttttgtaagtgaagaataaaatgatacccatagaagacatactgtagtgcccatcacacagtgtctgtttggtaaatcattttcttttctccttgtacactatttgtttttccttataaatatttcactacccttatctagactatccactgtcatgtccctaatctagatccaaattacctcatatctatagtgttatagtcttctgatttgttagcctctatcttgtccttttatcatattagagaacctaccttgacactctgttgcctagatcagggcagtggcattggaaatgaagaaggcacagctatgagaaatgatgcacgtagtgttgatattacatgtttaaactcacatgtgttcggtcttatatgctgttcggccctggggygtctaagtcacccaaataagattgtaaatccttgagaacaattcattctttctttaatacacagtgcctaatatagagccgagtacttaatagaggctaaacatgtgagtgtctaatataattgtgtatattcccttggaattcagatttcagtttagtttatacaatcactttagtcagttgtgttaactaattacaattccatgcagatttatgttaagattttagaatcaacttccaaatattctgacaggatttatttgactttatgacttraaattctagtattttttccctcaaaataaataatttcaggacacagaagtgacttttttctacataccttgttttctaaatgtaaaactgcattttgaattctgagaaatttattctgaagcatgtgttcaaattccaggtttacagtgaaaatctatagccaactaaacctttaaaagtaaaaggatatatacaaagaatgcatgcatataaacttgacgttggcagcttgagggaacctcactgaaataactttcttaagcacatggaacatctgcttaagtcacgctatttctgggtttctcttaaaatatttttgaaatattttatgaaacctgttttgtcaatatcatttattattttcttaaggctttactctattatgttttacttttcactagtaaccgataaatgtggtttgttaaaaaggtactatgaagcaatgtaaaaggattctcaggtctcttttcccctcaagcagcaggaatcaagtttatattatgtaatggtacatacaggtttattttctatttagtgtgagtgtctaggcctagtagataccttaaatttcaagatatgtaaataacttcagtttcagcacaaattgcaataggttgaaactgtaaacaggtccactttcttggtgcctaattttttaaatatatggattgcttttacttacataatgtgatgagattttgatttgttaattaaaaaattgtccttagaccttaaaatgacttttttcttaactttttaattttggaatattgaccattatatgaaactttgcaggtaggcataagggaataagttatattcgtgctgaaaatctcagactcattgatgatagctgccagtgacaggagtagtrttgccactgtaagatacgccatctttgttagttactctcatctactcgtttcttgtattctgcctcttggtcatctttgattctcatttatctgcaaattttcttggtaataaaataatgcacttctagccaaacttgcctatgctctcttatgtccataattttggggcttgttttggcagtagaatgaaattaaaggttttgcttcaacttctgattcctctagatggaagaagaaaaatgatcccctttgtagatttagagcagccagagaaattccctccagaatagagaaagcaaaatatggaggagaaggtcaagatgacaggcaactacctattgtgtgagaattctgcaaacactaagcagggatattaatttaaaccacaaggtatttatattatgaatgagcttgaacatctttttatacccctaaaggctgttttcatttcttctgtgaattgcctgttgttcatggtttcttccatttcaattgagtttttttcagtttatttatttattttttattatacttaagttctgggttacatgtgcaaaacgtgcagttttgttacgtaggtatatatgtgccatggtggtttgctgcactcatcaaccagtcacctacattaggtatttctcctaatgctatccctcccctagccccccacccccaacaggcctcggtgtatgatgttcccctccctgtgtccatgtgttctcactgttcaactcccacttatgagggagaacatgagttctggttaaagtctgttttatcagagaccaggattgaaacccctgctttttttttttttgctttccatttgcttggtagatcttcctctatccctttattttaagcctatctgtgtctctgcacgtgagatgggtcttctgaatacascacactgatgggtcttgactctttatccaatttgccactctgtgtcttttaattggggcatttagcccatttacagttaagattaatattgttatgtatgaatttgatcctgtcattaggatgctagctggttattttgcgcattaattgatgaagtttcttcatagcatcgatcatctttacaatttggcgtgtctttgcagtggttggtaccggttgttcctttccacgtttcttgcttccttcaggagctcttgtaaagcaggcgtcgtggtgacaaaatctctcagcatttgcttgtctataaaggattttatctctccttcacttaggaaacttagtttgcctggatatgacattctgggttgaaaattcttttctttaagaatgttgaatattggcacccactctcttctggcttgtagggtttctgccaagagatctgctgttagtctgatgggcttccctttgtaggtaacctgacctttctctctggctgcccttaacattttttccctcatttcaaccttggtgaatctgacaattatgtatgttggggttgctcttctcgaggagtatctttgtggcgttctctgtatttcctgaatttgaatgttggcctgccttgctaggttggggaagttctcctggataatttcctaaagagtgatttctcacttggttccattctccccatcactttcaggtacaccaatcaaacgtagttttggtcttttcacatagtccyatatttcttggaggctttgttcctttcttttcactctttttctctaatcttgtcttctcgctttatttcattaatttgatcttcagtcactgatatcctgtcttgtgcttgattgaattggctgttgaagcttttgtatgcttcacgaagttctcgtgctgtggttttcagctccatcaggtcatttaagctcttctctacactgttgattctagttagccattcgtctaactttttttcaaagtttttagcttccttgcaaagggttagaacgtgctcctctagctcggagaagtttgttattatcgaccttctgaagcctacttttgtcaactcatcaaagtcattcttcatgcagttttgttctgttgctggtgaggagctgcaatcctttgwggagaagaggcattctggtttttggaattttcagcctttctgctctggtttctccccattttgtggttttatctacctttggtctttgaygttggtgacctatggatggggttttggcatggatgtcctttttgttgatgttggtgctattcctttctgtttgttagttttccttctaacagacaggtccctcagctgcaggtctgttggagtttgctggaggtccactccasaccctgtttgcctgggtatcaccagcagaggctgcggaacagcaaatattgctgcctgaaacttcgtcccagagggggcacctatctatatgaggtgtctgtcggcctctactgggaggtgtctcgcagtcaggctacatgggagtcagggacccacttgaggaggcagtcttgtctattatcggagctcaaatgccatgctggaagaactactgctctcttcagagctgtcaggcagggacatttaagtctggagaagctgtctgctcccttttgttcasatgtgctctgccccagaggtagaatctagagagggagtaggcctgctgagctgtggtgggctcygcccagttcacacttccctgcggctttgtttacactgtaagcatagaactgcctattcaagtctcagtaatggstgacacctctccccctaccaagctcccacatcccaggttgatctcagactgctgcgctagcagtgagcaaggctctgtgggcatgggacccgccgagccaggcacgggaggggatctcctggtctgtcagttgtgaagaccatgggaaaagcatggtattttgggcaggtgtgcaccattcctccaggtacagtcactcatggcttcccttggctagaaaagggaaatcccctgacccctggcgcttcctgggtgaggcaacatcctgcccttctttggcttgctctccgagggctgcacccactgtccaaccagtcccaatgagatgaaccaggtacctcagtttgaaatacagaaatcacctgtcttctgcrtcgatctcactgggaactgtagaygggagctgttcctattcggccatcttggaggcaacctcctatttttttaactattaaaataaactttaagtcattatgtatatatataaaacatatattacaatagaatatactcattttaagtatatggtgagttttgacatatgtatacacacacataacctcctccttcaattaaaatatgaagcatttccatcatcccagaaagttccccctttcccctttgcaaagtctttatgactccyggcattctaggttggtagcgtttttaagaattttaaagatttcatttctttgtcttttggcttacattgcttctaaagagaaatcagctgtcattcttatcatcgtacccttatgtaatctttttttcccctctatctgcttttaagatttactctctgtcactatcactggttttcagcactttgattatgatgtgcttcactttggattttgtttgtttgtttattctgatgggtgtgtgtgtgtgtgtgtgtgtgtgtgtgtgtgtgtgtgtatgtgcatgtgtcctttctcaatctgtggggtttatacttttcatcaaatttggaaattttttggacgttatttattcaaatattttttggcctcctctttcccattctggaattccatttatacatgagatagaatgctgaatgttgtcccagaggacactgggattgttaattttttcttaacctttttgtttctgtgcttcactttggaaagtttctgttacagtgtcttcaggttcactaattttctctttggcaatgtctattttgttgttaagctcattgagagaatttttcttttcagattatatatgtcttagctcttaaagttctatttggttttttttgttttctatttctctcttccatattgtcatgtttttctttaaatctttgagcatatttacagtagttgttttgaggttcctatctgttaattccatcatctaacatttctggaaatgtttctgttgaatgatttttaattttttccccatttagggtttacattttcttgcatattgacaggatcttggatgttgtgttatgtcgagtgcctggatgttgttgtcttcctttaaagaatatttgtttttacaggtagttacttgtgagtcagtttagttgtatccaggcacttttaaaactttgttaggacaggtctagagtaacckttgtttgagagccagtttagtcctaccattaatgcatgcctattataggctcactaatgaatgcccsttgtggtaaatgaggttttcctgggtggttggaactcattttataggtctctggccattattctttgccttgacttataaagtctcatcccatgaatgcacaggttagtgtttaatccgtgtctcaaaggaacccctatgtatattgctgtagttatttcttatttctagtaccatgccctacaaattccagctgcctcatcctccatttttttttaacctcagtgagatccctgtcctcttactgggttcctttctctctgctgtggtttggaatgtgtattgagcagaaaaccaggrcaatcacatctcttctcatttgtttacttctctctgggatcacagtcctgtactgcctgttgtttaatgtctgaaacgagtgatttcatatattttgtccagttttttagttgtttgcaatgggagggcaagttgtttatctgtaaaataattcagtcattggtgaaagtggaaattttgagaaagttaactctaaagggacattgcaaggcagactttggctattttcatattatttttaattattgaggctttgttacatttcagtctgtagttcttttaatcttttatatggattttgtgatatgtgagtaaactctccaaagccttgcaaatagtgaatttcttttttctttaaagattctttcttgtggagaagttattcatgtgaagatccttggaattttggctcttattgatgaaggtgaaacagattggaaattaattgctatcaatgcgaatgatcctgaagcytcaaagtttcatggtaagactgttactttccagaaagtgaaagcaaattagtgtgtcattggaattctgagaacttaaaagaagttcacataggggagttaaatgtactttttaaaaaagagagaggaaaagatgtagatagacaaattatattttaaatgaagaaagtacattctactggtttccctctattccctttttcttccctctcctgtcacctctctttcactttcttcctctycctttcactccttccttccctcctttcttctttccttacttccatgattttgatggtccaactgctgttgggaactgttttgaaagcatcctttgactaggaataaaagcatacgatactggcatttttaccctgaaatctcttttgttcatatgactaacaagaagaaactaaggaaggagtgttcatcgatgacaaaagctatttctgcacctagtttttgtctcttcttgtacaaatgaagggaaaagtaactgccctctaacgaaattttgatgtcctagaaattttaagttctggaaatagcttggcatgatttaattttgtttggagtcagacagacttcagtttaagttctggctgtgctacttcctggctgagtgactttgggtagatcattcctgaatttcagttgctcatctctaaagggagatgattatacctacttgtaaagttgttggcaatataagaaacgatttatttaaagcatctggctttcacataccagtgttgaatatatgacaactattattattctttgaccaatttttyctctatttttctttcctgttttattcttgctcaggatcctctttacttgtaaacctcgattctaaactggaagatattaccatttctaagatgactgaacctcattaacaatgtattaatcttagtttatgtacctttttttgcacttgaaacaggaagagatttcttttttgtcattcttgtatataactgagaaagggagaggtctgatagcgtgaagtgcatgtaacctcaggatcaaaagtaaaatgtgaaaactacaattaaaatatgagctcaagtctataaaccatatatattccttatctcattattttaccctgattttttctatttttatacttttcatatacatatatatgagaacagtaaataaattttatttagttaaaaacattttttagcatcttaactgctcctcaaatgagaattgataaggtaatagtcccacaggcagccgaaacaaatcatccacctaattcatttgtgatctgctacactaaagtcatgaaactgtgctaagggatgcccctttaaactgaaaaagctgagcacctgaatgaaaatgaaaatattatttagagagtagtagttcagtactgttggagatgtgatttaacattttaaactctctagcatataacaagcgctggtgcctgttatagtagatattgttcttaacttagaagatggtcagagaatgtaagtgacttgcccacctttgcaaacatgtaaatagtacacagtttgaactcatttctgtctgattctaatgtgtgaattgctcagtactgtattgagcaatatatagcccatctataaatgagcaatatatawccaagcaattcatccttgattctagtaatttatatatttgtaactagaggtattgaaactagatcacataagcctagcatgactccttgagtttcgtaagtgttagaataaaaagttttaactctattcattttatttctgttgcrtactcagaatggagatgactttgcactttggacacctttctaaattcctttcatatttgcttttatgaagagatatgcagaaacactaaagccagttgctgatttgggttgagaagaaattattgaacttgagtagttaaaacaagatgttattgttttagaacaccaatacatttatcattgtattaaaagtgaatacatgtattattttcatcatgaaaaatacaacaattcttattcataatatgtttttgaactcctaaaagaatgagtaaagtgtatggggaaaatgaaaattgtttattttaaggatatttgtatattgttctcattagttagtacttaaagtactcttctcctatatctagattttataaaataagtttggtagtttttttttgaggcagtctctctctgccttccatgatggagtgcagtggcacaatctcagctcactgcaaccaccgcctcctaggttygagtgattcttgtgcctcagcctcctgactagttgggagtacaggcgcgcgccaccacacctggctaattttttgtattttagaagagatggggtttcaccgtgttaaccaggctggtcttggactcctggcctaaagggatctacccgcctcagcctcccaaagtactgggattacaggtttgagccaccatgcccagcaagtttggtagttttaagaatcacacatttttttctcattccttttacctacacattatcgttaatatattctgcatacctttgttgaattttcttctttactttacagagaccgaggaaaaaaattgatgtaggcacaaattgaaaggaagaagagattgtagtataaatgttttttatttttgaaaaattatttttagtcaacagtgtttaatcctaaatcaagcaacttttaaaatgttttggtatttatgtctttcatatttaccatctaaaatcacaaacacaggattttagatggcattttaaaaattataaaattaattttatacatggaaataaaaactcagaagtataaaaaaagtacataaaatgaaagtaaagtttttyttcctacctcccacctcatcttytcagatcttatcacagatgttttttgttcttttgaatggttgcttccttctgtaaatgatgtgcttatatttcttaatttatgcattttccctgttgactcaaattattactttggaagacaaggaacttaaattcttaaacatttatcaactgtgttaccatatttctactattaccctaataactctaagttgtatatttggagctggatttattgcttcattgactttgaacaataactcttaactgcccagtgtagaacttagagcatttggtttctacatttttatccttttctgtcccttacaacctaacttctctcagctacactatcaattctacagtatcaaaatttataatgtttaaattatgttaagtataattgtttttcctattttgcttcatggttgaatctgaaaattaaaaactaagtagcatttacagtattgttatgtaaatattcatttagtttatcatactatttattaagtgatcatctttgaacagactgttctctgaacctcctgcatagctatcacctgcgggtttcttttcaatgcttggttagttctacttacttaaattctaccattccctctttagttttcccttttcattgttggctggtgtccattttccaaaaatatctaatgcagtaactttaaatataaattgctgtrtataaattgaaatttctattacaaaggaataagtgattttatattttatgaccgtttaaacatttgtcatctatacttcttggcatatttgtcagtcagataaacgagagaaatttaaaaacacttaggagagggcagctatcaggaattttctttttaattgtgtagttttctgggtatgtgtgtaatataggagyatatagagattttttaaatttcctatacgtttttattgttattaggcatttaaaaagtaaatccttggccggcatggttgctcgcaccagtaacccarcactttgggaagctgagacaggaaggtcacttgagtgcaggaggtgagaccagcctgagcaacgtagtgtgacttcgtttctataaataaataaataataaaaattatatccatcctattagtttctactatctttagaaaaagaggccaaggcaggcagatcacctgaggtcagaagttcaagaccagcctgacccacgtagagaaaccccatctcttctaaaaatacaaaattagctgggtgtggtggcacatgcctgtaatcccagctatatgggaggctgaggcaagagaatcacttgaacccaggaggcggaggttgtggtgagccaagaacacgccattgcactccagcctaggcaacaagagcgagactccatcccaaaaaacaaaaaacaaacaaacgaaaaaaaaaagaaagaaaaagaagctgttatttggcatggtttgtcagagtttttcttttttgaaaatgaagctcgttttagttcatagtatgtccttatgtatgtgtattttctttttactctattcatatagacacgtttaagttgtgattcttcaaagacattttggggttgttttaatttgtgaacaaatacaataacttttattttttttgatataaataaaatgaaataacttttttgatcctaattaacatatgtacagactttggtagactatatatccctgttttaatacttacagtttttacctatgatgactgaacttaaactagccattgcatcagataacatttttcaattagtaaaaaaagtttttcttgttatagttctgtaattttaacattactgttttaagtcttctagtttcaccttctaaaaatggagtagccactgtaaaagtctaaaaaatgtccaaataacatttgaaatgaaactcgttgtattccttgatacaaaattggtcacttcagcaggctcattaacaaaaagccaaacaccacatgttctcactcataggtgggagttgaacagtgagaatacatggacacaggatggggaacatcacacaccggggcctgttgtggggtggggggagcggggaggaatagcattaggagatatacctaacgttaaatgacgarttaatgggcgcagcacaccaacatggcacatgtatacatatgtaascaacctgcacattgtgcayatgtaccctaaaacttaaagtatacataaaacaaaacaaaacaaaacaaaacaaaaaaacagagcactaagaccattttatgccctgtaattaggtttcatgccctaatgctcttattggtaccctaatggcctgaaagagttaataagactcccaggacacctaaattgttactagaaaataccttggccagtgtgaataatagctttggttatgaaataaccaagtttagagctttttaagaagattgaaatgctagggcatgtgtaatttttctcgtggttaaattaaccaccttctataatgtacagcttcagatactcaccaaacagatgtttgtgcctcttcagaactgccactgatgcctaaggaccttatgtcaggagaactaatgtcacgaggagctaatttaggcctagatgctatttcaacttgcagagcaatgaagatttcttttgtttggcctttaaataaatgaaaactattgtctgttgtgctgcaataactgtttacctgtgcagtgattttatagttttaaaaaatgaaagatttaaaacaatcgaaatcagaatagttatattgatatrgatacattgtggatgaataaatcatatragcaattatttaaaatgagaccgttctgacattttcataggccggcatcacacttgtcctaaaattattaaggtatgtcttttgtatatgtagaatttcagcttatatttagagaaatttaaaaataaaaactactctctttcaaggcaaaaataaatatgttgagacacaatctatttggcttaaatgttcatttgctaagtaaacacttccagtgcttctgtaattattatttaaaaataagcaaattaatgtagtgtttgatttcctttcttcctaaaacacaacttaatactgtcatttaggggaataaaaagaatagcatagtgatcttaagggaaaatattcatgttttgtaaccagaaagaatagagttcaatttgtgtgtgttagaagacagcagaatgtactggcttggaaaggggcttgcatatcagcatcatcaacctaagagctctaacatttgtcaaacaattgcaatatgcctaagaagaaactatgctaagtgcttcttttggaatatgtttaatcttcacacaacttcaatgaagataagttattctctttttttaaggatagagaaactgaggcaccgcgtggatggggcatggggcatggttagtaactagcctaaatcatatggccagtcattccactccagtctggctccagagtccatgttcttcattgctgcattacatcactcttctgaaaaatgccgggttagtcagctgtatttgtggccttggaccttgtcgctttctaagattgctgaccatttgctcttaagtaatttaggcatcagtgggacaatgatagagattccagtgaaaagttagctcttttgatcatattcctcttatttcattaatgggtgtaggtatgtagggatgggttgtaggaggaggcagttgaggaacaaggacaaatcgagttaaaaaattataattgagatggaattaaattaccgagaacctgctgtctcttttttgaacyttgacctcttacagtttttttttttttggtttcagtcattcccatgatatggtgaagtatgggggaggcctaaattctaaaatcctctttttgtttattaattatctgacctcggaaaagtcataacctctcaaagcctttgtttctttatttcttaaaattgtagagtggatcttctgatcactaaaagatccctagggtttttcccatctctaaatttttgttataggaaatatttttaatctattatttktagcttgttgtcttctgttagtaaaaagacctaaattatcttcaaagttagtgctrtgggaaacccagtttaaattaaaggattagatgatttcttggggacattggcacgtttttaagtgctttagggtaactgttaagtgatgaagctggaagttcaatggaggtcagtctgacctgagacctgtgcatttagccactttgttatatgcttcaaatcaaaattagattagaaatatttgaattccttccatatacaaggcagstgtatggttttcattttactggtcatgtgaaattacttgtaaactggtaatgaatgtmtatattttgagaaaaatctaagtcttttctgagaggtttttctgctacagtgcatatagtctmtatgtagaattaccttgtttggtaatactcactttgacatgtgttaattccattattttttcatgatgttaatacacatttttagtacaggttttgtcttggtaagagtacaatttatgaaaaggagaatggagaaggaaagggcaagaacaatgaaagatactcttcattagcccatgaatgttaaacgtagatatgcagaacagtttggaaacatgaaaatcttttagagattctgagtaagcataaattattaagaaaatcagttctctttgcagggacctctatttgtgatacagaaactacaatgaatgttattaaatgaaacttgtttcttgtgaatgtttataagtcattaaaaacacatgttcttgcttcccacagagtttctttagagggtactagttgtgcacatgtttagttctgtgggagcaacatttatagtactgggatgagagtgttgtgcaaatgaatcaacatcacttcctttagtaaagtggaaactcctttttcatttttcttttytcctcccctttggacaaaattttagcataaggctatatcctggtgtcttttttccccttttatataataagggcaaagagatagggtattacttttatgtcactggtttttatctaaaaataaaaaattctcagccgattgtatgctttcttcactttgtgttatggytgggtggagataatccaggtaaagcagcattttaatgttttttcgtcctaacatttgtggaagtatatgtagccctcaatttgtgaaagcggatggaatgtttagagatgtgaatttatatagtttgataaagctccctgggtaattctgatagatttccttcaaattgagaaccattccattaattaattcttttctgctggttggacattctagtcctggatgtagaataattggtaacaattttgatatttattcagttagaagaaggtcttaagatgtaattacctaattaactttgatatttgcctcacacacacctgtcactccatttttaaagctaatattttgattccctttgagatcttgagcaaattacttaaccttttagagtcctagtttactaatttgcaataaagagataaataatacctcatttacaagttgtgaagtttaaatgacatactattgttggcagcagtggcccgtctggagcagcygctgcaaagactggctgcagccggggaggcacagccaaggctgcacactccaccgrgctacaggagccaggaacaggtgggagccccacccccttccgagttggcagggtgggatcaccaccttcctggacacagctgcagccacmcagccacagctgtggacctgggcatccctgcactctcgggggcctgagaagcccccacccacctctgcaggctcggaagtgcctgctactgctgcctggcctctccccactctgattttggagtgaagtcgaggccgatcctgggtgctgttgcaacgcagccaggtgtgccctcactcatagtggcactgacacaccagccccctgccacctcggccccctctggacttttggcgctgacgagcatgggagggaggccaaagaggtgctgagggtggcttggtgcaggcctgtaggtgccgcttggcacaaacagcctgggtacagtggatgatgtatagatagcgggaggcagacaggctcctgggcggaaagaggtgggtccacagtgaagccccaccttaaagccagggatggcctgaagcctggggaccaggctgtctgttctgggtgaaatctgtggcctggagtgagaacctaaggtgcgttttctgggcctaaccatggctgcccatgggccaatcagcacacacttcctccctcctgagcccataaaaaccttggatttaaccagactcgggaggacgggacaacctgcctgcgttaggagctacccgctctggatgtcctctctgctgagggctgyagtctcagtgggcctcaggctcaatgggatgacctacctgtggataggagctacccacttctgatcttctgcgagctgtactgtcagtaaatcaccttgccttgctcaccctccatttgcccaggtacctcattcttcttctgtacgggagaagcactcgggaacacycaaatggcgaaactgaaagaaccctaaggcaaacaaggctgaaacatgccacctcctgatcctgctcgccacattgcaggcaacaaggagaagagaagagctgggccccttcagggatcccagacctaatggctccctgagccagggctgtgacaccctctttggggctctgcacttcttggtgcctccaagcttctaagtgccaccgtgtttcctggagcctctagtggaagccacttgcggggtttgcctggtccagctgcagcctcgcagggagccggtgcctgtgctggtgcccggagttgcctgccctttgccactccatacctggcttgcccttggcatgcgtgggatccaggcttagcacgagcggagygcagcctgccaggccgagtgggtggaaggagcccagcgggccgagcaaaactcgggaaaaggcgccactggccacagaggtttcmagctggaaaagcgacagctgaagaatcctgtggcactattactgagccataggtttaaagtatttcaaaattttactagatattatcaaattgccttttgcagtgattgtatcatcagtgtatgagagtaaatgcttcctaaataatagtttattatttttttgccaatctgatacataaaagatgattatcttgttttaattctttatttttctgcttactactgggttggaacatctttcttgtatttctattggcttatttgtatcttctcttctgtgaattgagtatgtaaattgtttgccccttttctattggggttgacattcttttggtataccagagtttttgcatattaaccctttattatttaggttgcagacattctatttgcagagatgctatattgacttttggcttacagaggttttaaattttgatgtattccattttatcagtcttttttaatacatcactttagtgttttgattcctgtttaaagatttgttacctcttggtcagaaagatgtttttattttcttttcactcttgtattttattatctttacaatcgagtcttgaatttatgtggaatttattttgtctgtgtatacaatttttctaacactgctgaacagaaaaagtcattttcttcctcctgttttggaatgtctttcttacacatttcattatacaggagtctgtttctggattctatatggtgtcagtgatagaatcctgtgccagcatcatgttattttaattatgaagacttctaataaggcatatatgagactaatcttccaccttttgttctactttttcaaacttgatgtttcttatgcctttattcttttttttctttttatactttaagttctagggtacatgtgcacaaagtacaggtttgttacataggtatacatrtgccatgctggtttgctgcacccatcaactcgtcatttacattaggtatttctcctaatactatccctcccccagtcccccaccccccaacaggccctggtgtgtgatgctccccaccgtgtgtccatgtgttctcattgttcaactcccacctatgagtggtgtttggttttctgtccctgtgatagtttgctcagaatgatggtttccagcttcatccatgaccttgcaaaggacatgaactcacccttttatggctgcatagtattccatggtgtatatgtgccacattttcttaatccagtctatcattgatggacatttgggttagttccaagtctttgctattatgaatagtaccaataaacatacgtgtgcwtgtgtctttatagtagcatgatttataatcctttgggtatatacccagtaatgggatctctgggtcaaatggtatttctggttctagatccttgaggaatcgccacactgtcttctgcaatggttgaactaatttacactcccaccaacagtgtaaaagcattcctgtttctccacatcctctccagcatctgttgtttcctgactttttaatgattgccattctaactggcgtgagatgatatctcattgtggttttgaattgcatttctctgatgaccagtaatgatgagcatgttttcatgtgtctgttggctgcatacatgtctttttttgagaagtgtctgttcatatcctttgcttactttttgatggggttgtttttttcttgtaaatttatttaagttctttgtagattctggatattagccctttgtcagatgggtagattgcgaaaattttctcccattcyctaggttgcctcttcactccgacaatagtttcttttgctgtgcagaagctctttagtttaattagatcccatttgtcaattttggcttctattgccattgcttttggtgttttagtcatgaagtctttgcccatgcctatgtcctgaatggtrttgcctaggttttcttcttagccagttttcccagcaccatttattaaataggggatcctttccccattgcttgtttttgtcaggtttttcaaggatcagatggttgtagatgtgtggtgttatttgtgaggcctctgttctgttccattggtctatatctctgttttggtaccagtaccatgctgttttggttactgtagccttgtagtatagtttgaagtcaggtagcatgatacctccagctttgttctttttgcttaggattgccttggctatgcgggctcttttttgattccatatgaactttaaagtagctttttttccaattctgtgaagaaagtcattggtagcttgatcggcatgtcactgaatctataaattaccttgggcagtatggccattttcacaatactgattcttcctatccatgagcatggaatgtttttccatttgtttgtggcttcttttattttgttgagcagtggtttatagttctccttgaagaggtccttcacatcccttgtaagttggattcctaggtattttattctctttgtagcaattgtgaatgggagttcactcatgatttggctctctgtttgtctgttattggtgtataggaatgctcatgatttttgcacattgattttgtatcctgagactttgctaaagttgcttgtcagcttaaggagattttgggctgagatgatggcgttttctaaatatacaatcatgtcatctgcaaacagggacaatttgacttcctcttttccttatcgaataccctttatttcattctgttccctgattgtcctggctggaacttccaacactatgttgaataggagtggtgagagaggacatccttgtcttgtgctgattttccaggggaatgcttccagtttttgcccattcagtatgatattggctgtgggtttgtcataaatagctcttattattttgagacctctttgtaggtctctaagtacttgctttatgaatctgggtgctcctgtactgggtgcatatatatttaggatagttagctcttcttgttgaattgatttgtttactgttatgtaatggccttctttgtctcttttgatccgtgttggtttaaggtcttttttttatcagagactaggattgcaaaccttgcttttttttgctttccatttgcttgatcttcctccatcctttattttgagcaaagtgtgtctctgcacttgagatgcatcttctgaatacagcacactgatgggtcttgactctttatccaatttgccagtctgtgtcttttaattggggcatttaacccatttacatttaaggttaatattgttatgtgtgaatttagtccygtcgttataakgttagctggttattttgcccattaatttatgctgtttcttcatagtgttgatggtctttaccatttggcatgtttttgcagtggctggtaccggttattcctttccatgtttagtgcttccttcaggagctcttgtaaggcaggcctggtggtgacaaaatctctcagcatttgcttgtctgtaaaggattttgtttctccttcacttatgaagcttagtttggcttgatatgaaattctgggttgaaaattcttttctttaagaatgttgaatattggcccccactctcttctggcttgtagtgtttctgcagagtgatcagctgttagtctgatgggcttccctttgtgggtaacctgacctttctctctggctgcccttaacattttttccttcatttcaaccttggtgaatctgacaattatgtgggttgggtttactcttctcaaggagtatctttgtggtgttctctgtatttcctgaatttgaatgttggcctgccttgctaggttggggaagttcttctggataatatcctgtacagtgttttctaatttggttccattctcctcgtcactttcaggtacactaatcaaacgtagatttggtcttttcacatagtcccatatttcttggaggctttattcatttcttttcacccttttttctctaatcttgtcttctcgctttatttcattaatttgatcttcagtcactgatatcctttcttccacttcatcaaatcagctgttgaagcttttgcatgcgtcatgaagttcttgtgctgtggttttcagctccatcaggtcatttaaggtgttctctacactgtttattctagttatccatttgtgtaacctttttcaaggtttttagcttctttgcgatgggttagaacatgttccttaagctcggagaagtttgttrttactgaccttctgaagcctacttctgtccactcatcaaactcattctccatccagctttgttccattgctggcgaggagctgcaattctttggaagaggagaggtgctctggttttttgatttttcagcttttctattctgttttctccccatctttgtggttttatctacctttggtctttgatgttggtgagctacagatggggttttggtgtggatgtccttttttgttgatgttgatgctattcctttctgttagttagttttccttctaacaggcccctcagctgcatgtttgttggaatttgctggaggcccactccagaccctattcgcctgggtatcaccagcagaggctgcagaacagcaaatattgcagaacagcaaatactgctgcctgatccttcctctggaagctttgtcccagaggggcacccacctgtatgaggtgtctgtcggcccctactgggaggtgtctgccagtccggctacatgggggtcagggacccacttgagaaggcagtctgtctgttctcagagttcaaacgctgtgctgggagaaccactgccttcttcagagctatcagacagggacatttaagtctgcagaagtttctgctgccttttgttcagctatgccctgcccacagaggtggaggctgtaggccttgcmgaggggcactgaggtccacccagttygagcttccaggccgctttgtttacctactcaagcctcagcaatggtggacgcccctcctcccaccaggctgycgtctcacaggccgatcttagactgctgcgctagcagtgaacaaggctccgtgggtgtgggacctgctgagccagacacggaagggaattccmtggtctgccagttgtgaagactgtgggaaaagcgcatatttgggtggtagtgtacagttcctccaggtacagtctgtcatggcttcccttgcctaggaaagggaaatccccgaycccttgtgcttcccgggtgaggcaatgccctgccctgcttctgctcgccctccatgggctgtacccactgtccaaccagtcccaatgagatgaaccacgtacctcagtttgaaatgcagatatcacccatcttttgcgtcaatctctctgggagctgcagaccagagctgttcctatttggccattttggaagtgactgcctttattcttgtgtacagattttagaatcctaattgtcaaggatttttggtatctttaaaacattaatttttacatcagttgttgatatatgtttcccatttattcaggtattcttgtttatcttttatatcttgtatatcttttmgcacagtctgaaaatatcttaaataggtgtgttttaacttattttaaagggagaaagcattcatttgtacttggaattttgccatttttaactattgcagttgtgttttagtcatatatacattctaaactttgtcatcttgttcttcagtgatctttcttattaagttggtaccacagtttgtcaccagattccctcaatttgacctcaaatatctttcagtccattccctccttcttcctattgtgttaaactatcatatcttgcttttccattgaatcaatgttaacatttctctaattagcctcctgacacaaaaatstatctcccacactgtttaccagacttattttattttaaagaaaacgtatttaaaaaaaggttttgactcagagcttacagaaaaatccagattctctaacttagtaaatgcttttttttcctagccatgcacactgtttatccaaagttcttaacacactgagcttttcaccctttcttatatataccaggtagttttgcaccttagtggttttatcttttgagaaccagtttaaatatcatctctcagtgaattctctttgactctgcaaggcaaaggcagttggttaattgccacttttttcactcccacactgttttgtttgattctgtgaaatgtctttgatttcacagatttataatttgtttgtttccttatctacccgcctatctagattatgaactctttcagggctgggactctctctctcttttatattttttagcccactttgaggtataaattacatccagtcaaattcaccccattttaagtatccaattcagtgagttttgataactatatagtcttctagcaactatcacattcataatacaaaacatttccatcacccccaaattcccacatacccctgtgcagtcaatcccttcctcctaccataggccattagcaaacactgatttactttctgtcacaatagtttgccttttctagaattacctatcaatggagtctggcatcagtgattattcacatggctgggtatatgacttttttctcttgcctaatgttttggagattcatgcatattgttgcatgtatcaggttagttcttcctaatttattattgaacggtcttccattttttagatataccacagtttatccattcacattactgttggaaatttgggtttccagttttcagctaatgtgaataaagttgctctgaacagtgaattacaagtcttcatgtgaacatgttttcatttccagtggggaaatactcaggaatagttttgctgagtaagatggtaattatatgtttaacattgtaagaaactgtcaaattgtttaccagagtggctctaccattttgtattctactagcaaggtatccagttgctgtcagaacatgtattcattctttatactttgttacagattgtcttaaataacaaaatgttttttaaagaaagtaagagaaatacatttgcctgtgtacatgtgtcttttacatttgcccacatatttgccatcttcatacccatgtattttgtttcttcctgaagatctgtagatcttagtttccacctggtgtcattctctttcagttcaaggactttcacatatgcttgtagtgcactcctgctggtggcgaattttcttttcttttttttttttttaatatggaacacttcacgaatttgcatgtcatccttgcgcaggggcyatgctaatcttctctgtattgttccaattttagtatatgtatgtgctatttatctaaaataatctttttttgcctttgttttaraaatacaattttgcttgatgtcaaatttaaagttatagggttttttaagctttatattgatgttccattttctatcagcccccattgcttctaatgaatggtgaacagccatttgtattgttacctcatatacagttgacccctgaacaacatgggtttgaactgtacaggtccacttatacatggatttctttcaaccaaatgtggattgaaaataacaatattctcaggttgcaaaacccagtataatgagggtctacttttcatatagctggtttctgcagggctactgtgagactttcatatgcatggattttgggggagcaggtggtggtcytggaactaatccttcatgtaaaccttgttactagtgtataatgtattattttttctcagactgctttaaagattttctccttatctttggatttcagaaatttttttttctttgataagctaaggtttccttttgtttgtatttattctgcttaggatatactgagctttgtggatctgtaagttcatattttttcatcatatttgggaaattgtttgccattattatttcacttttgcgggggctctgttttcttacctgcgttctgagactaaatacacatattttggactactttttattgtcttacaatcactaacacgcttccagtctatttcatcttttttttccttactgttatttagactggataatttctgttaatctatcttctacttccctgtttttttgtttttttgtttttttcctgccatatccacgttctgctgttaaatctacctgatttttcatttcatatcctccttttggttctttttttttttttttttgaagttttatagtttctgttcctcatcttggatttccatatgttcgtgcattgtgaccatgtttcctgaaagtcctgaacatattcataataactactttaaaattcttgtttgcataggtcacataaggattgatttctgttaactgctttttctcttgayacaggtctcagaaatattccagtatatacaataaatcgcatagtcatcctgccttcacttgacaggagccaaacttccagcctgtcctacctgcctgcacatcaggattcctgtgtgcccctggatgcagccctacatgttgttttgtatttttgttccctcttgggtctacaaagttacttatcttgtttttgagtctttttgatgttaatctgtttataaggtatctattttaggtaggttagcctgagggagtacattgaaacacgaatttagtgcccctcctgtcaaaaggtctctgttttttccgaagcagaatgctttggaaacttgaggagtctttttatttgctgataatttggttaatatgcttgaactcagtgaaaacctcatttcagaaataaatatttataagtacttcactcaagtaattctatttatatattccctctccattccaaatgtttaaaagaggggttaatttaacttcaacacagtggaaaaaaataaatttataagaactaaattgtaataatattagagataaaagtaaacgtgtctgttgttaaataagaaattaattacaaattcatttagggtctttactataagtgaaaaactatatgtgtatagcaaaaagttattaataagtatgcatgtgtatgtgtatatatgtatacctagatactttttatatatgttatttttagtctttgtgtttgtttataactatgcctacctacattgatttttcaggagcattatacaaattaaaataactgtcaatattaatgaaaatctgtttagtatttttctaaaaaaattaactcatgtttgtgtatttatttatttattcatttatttatttttgaggcggagtctcactctgtcgcccaggctggagtgcagtggcaggatcttggctcactgcaagctccgcctcccaggttcatgccattctcctgcctcagcctcccgagtagctgagactacaggtgcccgccaccaygcccagctaattttttgtatttttttagtagagacagggtttcaccatgttagccaggatggtctcgatctcctgacctggtgatctgcccgcctcggcctcccaaagtgctgggattacaggtgtgagccaccgcgcctggcctgtgtatttatttttgaaagataaaagcttgtaaagctattaatttgcctgtaagtrtaactttggctgtgttcatggacaaagttttggggaattggagagataatgattgatatttgttaagaattattcccttttattaggtgattttcacccatwatttaatccccatgacaaccttgatttcttcttccctattctggatttgaagaaacaggtagtacatttttcccaaagtgatacaatatggaagtaccagaaatggaatttaaacttagtgctgtctgattccaaacatgtttttctttagttcttgttagaaacttcctgagtgttctcattgtcattattttctgaatatttttagagttttgattttcttttggacccgaaagttatttatttagtaagactttttattctttgtttatttgcttttaatatttatcttttaattatatttaaaaaatcaggggattgggggtggttctttttcagtaggcaagagtttttaaatgtgtttattgttgatctttaaatttattatattgtacttatagaatgtgttgtcttaatttccatgtgtttaaaatttcttaacattttcttttttttggtatataattatttttaaatgttattgttttaatatgtctctagattaaataggtctcatactttctctaaatttctctctcatatatactgttcatggtctttgtatataaaatataccttatcaatttggcttttgaagtcatatcattactattaacttacttccaaagtatgtttaattctgaagtgtgggtaatattgaagtcttggcaaactcatgtgattagaaacmcccctggtgcaacagagtgtgtttttggattcaaaaaaaaaaaaagagtagaaagaattttccaattagattttagaaacaagtgaattggtttatatggaaaggaaatttggttatatgaaagatatacagtatccccagtgaaggaaaaaaaagtcataaacgtttctcttagaaagtattatgttagatttatctcatgtctgcagagataaaatggtaggttttcattaagttattataggttttcttttatagaaacataaaccaaagttagttaagaaaaactaaattgaagtgagagctctggacttggaaaaacccaatggaaccttaagatttgtctgttatattgcttcattattacctgtttttcaactggaattttagagagaaatttacratattttcaatgtatttatatagaactatgattatttataaaacatatttttatagttttaatacaaaaattcccttaaggagattctatataatctttgttaattaaactttcaaatttgaaagtaaatcatggctgcacactatttgtcagaagttatgacactctttataaagccttttttaaaaatctggggtgataggcwgggcatggtggctcacacytgtaatcccaacactttgggaggccaaggcaggaggaacactggagcccaggagttcaagaccagcctgggcaacaaagcaactaaaacaaaacaaagcaattctactggaaaacaaacaaamaaaaaagattagccaagcatggtggtgcacacttgtagtcctagcttcttggaaatcgaaagtggatgaattgattgagccctggaagtcaaggttgcagtgagccgtgattgcacagtgtactccagcctatgtgacagagcaagacactgtgtcaaaaaagaaagagagagagagagagagagaaagaaagaaagaaaaagaggaaagaaaaagaaagaattttgaggactgctttcagttttacatctcatgtacatctcatctttactggtttattattgttaattttttttccattggtaattcctctgagttttactttctaaaacatacccaaaatcttaccatttatcactacctccatacaactacgtttgtctaggccctcatcatagttcacctaagtagactctcttagcagccccttattggacttccagcttccattttttcctctatgtagtcttttctttacacagcagatagaaagatcttaaaacatttactcctctgcccaaaaccatcccaaagttaaagctataatccttagtatggcccttagagtcctctgtgactggcctgtgactgcttctctaatcgtatctcctaatactttctgttttttcactgtgctctagccatgggactttcttactgtctccctgaaatgttaaaagcacacccttagttcagaagatttgcatttactgtcttcctcccagactgcactcctttcagatacctgaatgagttgctcctacagttcatccaagactctactaaagtgatttcaccagaggatatccctgacctctcatatctacaattctcttctttccttacttgcaaagcagcctatatgcataactgtagatttttatggtttttttcctcctaatgtttaactgttttcttacccaggcctaattttttttttcttttttgtttttatttttagatggggtctcactatgttgcccagaatggtctcaaactcctaggctcaagcaatcctcccacctcagcttcccaagtagctgggattaggggcatgccatggcacctagctccaggcttaatttgacaacagatattttagcaatgttttattgaattctttcagaacattcaaattaacttcataaagacaaacacttttttgtactcataaattcactggtgtatgtaatatttaattacatctcataattataataaaagatacagttagcataaatggtttgggaataaacacacctgatgcttggtaaagctaaaacttaactgatggaaatagaagtgtgggcttcattctagagtactctgccagagtcagcatacataatatgtgaacattaatcagaatgttctacaaaagtagagtctttactaatcagtccagtaagttgatcaagtagagttcgattaaaagagcttaatttgtaatcaaaattagaaactgaaatagatttagcttaattacatatatagcttttccagattatcctaactttattggattagttcatctctaaaattcatataaaattaattccacaagtgggaataaatgactactagagaactgccacttttcttaaaataacatagattgtaaaaaaatatatctaatcaaagatgtcctacaaatggatagtgttgatggttgcacaaaattgtagacatacttaatgtcactgaattatacacttaaaaatgcttaacatggcaaattttatattatggatattttatcacaataaaagaaaactgaaaaaatacatctttacttacattttttaaatgtaaataaaacttttgggcaatgttactatgcagtatagaagaaaaagcagaagtcatggaattagaagtcttgtatttatataatactagttctatcatgagtgagttggatagattttggcaagscttttaaactatcttagctgtagttttcttatgttgaatataaacatacttgtttttaactctcaggaatttcgtgaggaacaagtttaagttttatatatatctatgtatgcttttcataaactacaaataagtttatacactttagctggaactttttataatttcagaggggttattgaactgactgttggcattggatataagaatttggcttcaggcatttgctattraggttttaaaaatgtttaaatatcttactgtaatttttttgttttgttatttgggacaatgcagctgttttctcctagggtataattagttgagaatggaaaagtttagcttatatttggagagttatacttcytatttccattataaaattttcagtttttttcctaatttgtgtctttgcttattgggtcctctttatgacttttggggagaaagcctcctagactgaggtagatattagataattagctttctctttctccttggaagtcagtgagttaagtaacaaaaatcatayaaaagttatatgatttgtaaaagttatatacagtggaagagaaaatgttagtttgagtaaggtacaacgatgaagtcataaatcagatttaagcaacagaaaattatttattgctttgttgcccaggctggagtgcaatggcgtgatcttggctgactacagcctccacctcctggactaatgcatttctcctgcctcagcctcctgagtagcttggactataggcaatcaccaccatgtccagctaattttttttgtatttttagtagatatggggtttcaccatgttggccagactggtctcaaactcctgacctcaggtgatcccaaagtgctgggattacagacatgagccaccacacctggcctagaaaattatttatcttgggcattgattaaattgcatttctagacactcgccgtcagtagactaaaagatttttttcccctctgaataagaaaaccgttcgttcaaggaactcaatattaattaatttttgcaaaacatccctgtttgttttgttataacaaaacagtataattttaatatgctctaataaatatattgtatacaatacaatatgctgtgacaatatactgtaataaaattaccagcaccactactctcgtgctttgtggccattctgaagcaaaataarggttaactgaacacaagcactgccatatcaagacagtggatctgctaactgagaaggctactaagtgactaatggtgggtagtatatagaatgtggccacactgggcaaagggatgattcatgtcttggacaggatggagcaggacagtgcaagatttcatcaggctactcagaatggtatgcaatttaaaacttatgaattgtttatttctggaattttccatttaatatttctggattcagttgactgtaggtaactgaaactgcagaaaacaaaaccgtggataaagggagattgctgtgtatatgatcctcagtgactggcttttcctaggtgtctcctccctctcccctgcctcctaacagtgatgttctatccatgcagaaccatctttgtatattctaaaatatagtcccttgcttttatgtgtgctgttccttctaccttttcccctcttgtccagttagtgatgtacttctcacttttataatgctttcttttactccctcttctatgacattaccattgcttctgtttatctctgttaaaacctcattgcattttaattgcagtttatctmtttgtctctttccctgagttaaaaactgagtatcttgatgaaaagaactttgttgtatccatccatttattccccatacatagcacattgtctgaagatgctttgtaaatgtttgtrgagtgcaggaatagtattatacatatgaaaacacaaaagtctgaaggtgatatacatatcaatgatgatgctgctctaggtatcayaatcaattgtgcttctggttagactgggccccatgtttcctggctcsctcagtccaatgctctgccactaaagggaattaattttggttcttaacaaaacatctttttgtttttttctttacagatattgatgatgttaagaagttcaaaccgggttacctggaagctactcttaattggtttagattatataaggtaccagatggaaaaccagaaaaccagtttgcttttaatggagaattcaaaaacaaggtgaagatgagaatctttattttaaaatgtacctcctgatacctgtacaatattcgtttcacttgggaagtttcttatgtgaatatgtatatatagcatggttaaaaaagtgctttttactaacttacatatttaaaaacattattttattatttaaattctgtttcagaagatctaagtgaatcaacaaggctgaaaaatatatatttccatctatgtgtctatagctcctacgtcttggaaaatgaaggaatttcatgatcagactaattttgcaaattgtgtacatagaaaaactttctatttactgttttgtggaggagaaagttactcacccttaatgtaaatccataggggmctccctcctaagtgttcattctaccacgacggaactaagctgcttaacaattgaaaggacacctgaattatcttactgtcataggatttttctattagaataccactgagttaccacaaagtatctctaatatgacacaratggagagaatrgaccaaagagttaaagtctaaagcatggaattttttttaaagttattaccactaggtaaattgaatatttgaaaccaacttttaagtggataccagtaagtatgttttataagtgaaataaggcatgttaatgaaaacttaaaatttataatgggtattttgctgwaaaagaattgattgctggactctgtttttttgaaagcacattaaaagaatccttcaaatcttgagggctttgtctgggattattaaatgtaaatataaaattattattttagattaaattatcttaaaggattgaaaatttatacattatttttcttttaaaaattttcattttattattsagataattgaaattttaaacctatatggtatttttgcctcagggtaagtctgccaagtcacgaatttgtaaagaatgaggtagtttttggtttttgtttgtttttaacaaatagtaattcttttctgtataaagatgaggtcatttatacaacttcaccagaaaataattgttttatgcattgctttttactactgctatttaaaatatagagccttagtgcccttagtattgctatgaaagaactgctgaggctgggtaatttataaagaaaaggtttatttagctcacagtcctacaggctataccagaagcatggtgctggcatctgcttctggtaagaacctcagaaagcttccagtcatgccaaaagatgaagggggagcaggcatgccacagggtgagagaggaagcaagtgagagaggtggaaggtgcccaggctctttttaacaatcagttcttgtgggaactaacagcaagaactcactcattactctgaggaggcaccaagccattcatgagggatccacccccattatccatacacctcccattaggcctcacttccancactgcggatcaaatttgaacatgagatttgagaggacaaatcccctcaaaccatagcagggtataactcaagaattgatttgtgcctctttaacatggttggaaagatggctcctttcttttattgtgggtttttcttgccactcctttaaacaagtattgaaattggttctaaataatcacacttatccaaataatttgattaaaaatctatccttacataatcagataatgtattagatttcttgtcctgtatctgaagtgagattcccgcccaacactatctcattaagatataagtcgtcctccatngcaggcaatcgtagacccgagagaaattctcttttcagaggataaatttcccattattactgtacctcagttcccaagattctttagtttctttattatcataatgagtttagttatcattgaagaagaaaggagctactttgaactaaccagtaaggactctccttaaggaaaacaaacaacaatttttgggaaaaaactctaaagaactttctgctttggaattataaagcaagttttccttagatrttcttactggatgtatatccaacaagaggtatatctattgttgcttatgcatttttagacaatgtcataaatgtcaaggagatgtactgctttcagacagtggatagtctaaaattacttcgattgaaaaaactacatttagactgcctgcagttttgatgatgctgagattaatgggtgcatgcttactgacaagccgggtactgggttaagcactttacatatgtcatctcacttactctttcaacaactctgtgacttggatcaggggttggcaaacttttttctgtaatgggtcatatagaaaatattttaggctttgmagatcgtatgatttctgtcacagctgctcaactctgctatcgtagtactagagcagccataggccaaacacaarcaaatgtgactgttcagtaaaactttacagggggcagactggattttacccatagttcctagtttgccaacccctgatatagattatccctattatattctacttcatagatgaagaaattgaggcttagcaagcttaagtaacctgcccaaagtcacacagctgacaaataaggaagccagaatttataccaagctttgcctgactctggagctcatgctcttaacaattaactgtcatcacaagattagttttgtgttagtgtaacaatgtgactgatattaaatacgtctttttttatttgtttggagctaggcttttgctcttgaagttattaaatccactcatcaatgttggaaagcattgcttatgaagaastgtaatggaggagctataaattggtaagaatttgtcttttctatgtaagtaatgttattttatattaattggtattaaacagccacataataatcagatttcagatttttgcattttttttaatttaaacaatacagattatctacctattcattgggcattactaagtgttgggcactattaaactaggaattgacgtgatcttttttctcaaggaatttataatttagtgggaatactgataaataaatggacatttaattgaaatacattgtgcaaagatgaaaaacgcaatttttcagcatgtaaatctatgcrgtttctttaaaatctaataactaccatataatttcttagaaagtraaagcctccttattcatcatgatcactaattgattgattaagaggaattaagtaacagtaacataaacatttaatttaaaacatttaaatgtatattcacccatttttggatatagggctgagccccttttaatatagattccatatagattttatatayactctaacataacacaggatagaaaataaagattctgtaatccttaagctccttgtaacttaaaattcctgacagatttttagggttcttttaaaaaaaatcatttaaattatgttatmtacaccaaatttttgtagtgattcacctttattgaggctttttagggcctcagtattgtttaaagcctcgttagttttataacctacttaatgttcayagaaacagttcttccacactcttttacagttcatctgtgaacataattaatacttaaattttgaaattatagtaacaagtacaattgacraacacatttaagaactaaaaactgactcttggtaagtctaagtataggaggcaaaagcagtcctgtgggggtactaaagataacactatgaaatacgatagagtccctgtgctctctgagcacagtctgggaatcaagagggtcatttaaataaattactagactaaggtaatcagatrgagtaaagaattatttaatatcaaggaatattttacctaagttatcaagaaggcccattttgcctacaacacaaatgcttggcattgaagatattgactttgtttctcttgcttactaaagaaacactgtcaactccttggccttctcccttttttcttacctcgtatgcagagcactcttttttttttaagcataatcttaaaatgcaggtaattgtttctaatataaataatataatttattaacagcaaagctggatatgattgaatgtcctctagtcttgtctatcctagtaaatggtagagtgagctattctttgtggkctaaaattaagactccagtgtaatgagtccctccagtatgaaggaggagggggtctgtgattgtctgaggaaatatttgcttgctctttgctgtcttatctccttcctaatcactttctaaaaagcttatgcagtctttgatgagacttgagtgtttccccaggtttcctcagctacacagccagagaccctttgtttggttagtatatatatagcttgaaytcattccttctgtgctgagtctaattatccttactgtgaaggtaactttatttctaagctctggaatcattttgctatagcctcctgagtaatgataaggattacattaacagtaagagttaacatttattaactctatactatgttccaygttctgagtgatttatatatgttatgtaattaatactcaagaatcctataaaatatgtattgttatctccattttacacatgaagaaattgagtccacataaagatttaggtaacttacctaaggtcacacaatgcattgtggagccaggatttaaaccttactctcttttttttytctttctttttttttttttttttttttgaaatggaatcttgctctattgcccaagttggagtgcagtggtgcaatctcggcccactgcagcctctgcctcccaggttcaagtaatttgcaattctcctgcctcagcctctcaagtagctgggattacataagcctgaaaccaagcctggctaatttttgtatttttagtagagacggagttttaccatgttggccagggtggtctcgaattcctggcctcaagtgatccgcccaccttggcctcccaaagtgctggaattacaggcgtgagccaccacacctggcctaaaccttactctgttaatagctatgttcttttacctcctctacattttttataacaaaataactttttttagtttaagaattttcagaatataagtttcagtatatgtatcatatgcatctagaaaatttaaagtcaagagcttcagaattttaactcaytttaatccatttttctctttatcataacttaatttggaaatatattcagcgttgttagtttttatttcttttgcctttctgtaatgaattgcctatctttcttaattccttaaactgtaccattgtagattggcaagcttcctctgccttcctttttgaaacccatttttctcactcagttcagtttaggtccatactatcatagacattctctcaatgtatatgtaatacacagaattaactagggaaattgttagagaactcagatacatwgtccccttctttaaacctagtgtattagtatctttaggaagtagaatctaaacrtatatgtttttaaagccccctatgtgattctgatgagcctctctgcttaagaaccatattattattattattattattattattattattattattattattattttgagacagtgtcttgctctgttgccgaggctggagtgcaggggcgcgaacatgactcattgcagccttgacctcccagagttcagcgattctcccacctcagcctcccaagtacaggcatgcaccaccacacctggctactttttaaattttttgaatggacagggtctcgctatgttgctagggatattcacgaactcctgggatcaagcaatccacccacctcagcctcccaaagtgctgggattacaggtgtgagccactgcgcccggccttaagaatcataaaatccaaacttgttctcatggaaaaacaaacaaggccgtccaagatttagataacctttcttgcctcattttccatcacttcttgtctcctatttcatgttacaacaactgaaggccacttgtcactgtgcttgtagtaatctctagacctktactcattttgtttcctttgccatgattgtcttctcatttcttgaactggccatgttactcatcttttaagatttaatttttacttygtcttctctaggaaacattccctcatatgctagttgaaatgccagtactctctgtattccttgtcttctgtggatttttgtcattacatctgtcagttaytaaatacttggttaatgaatttatcttcttctctagaatataagttcctcaagagcagatgaataaagatgccttattcatctttatattcctaatgcctggcatgtagtagccactcaataaatatctgttggagtaaattgttgaataatattttaaagccaaccattttcttttttttttttttgaracagagtctcactctgtcacccaggctggagtgcagtgatgcaatctcggctcactgcaacctcygcctcccgggctcaagcaattctcctgcctcagcctcccaagtagctaggattacaggcacctgccaccatgcctggccaatttttgtatttttagtagagacgaggtttcaccatgttggccaggctggtctcaaactcctgaccgcaggtgatccacgcacctcagcctcccaaagtgcggggattacaggcataagccaccactcccagccttgtttttgtttttttttaatccaggtagtgactcttctcttttcaggagcactgcttttattaagttcttttcattgataccttgaaaattctctttctccgaagttttttttkttgttgttgttgtttattctttttttccactgctggatgtttactctgaaatctaaatattatwttaacagagagaatttaatttctagtcttacctaagaaaactttaaactygattctgggagaaatcattttttgacatttgagtttactcttcagtcctctcccactttctcttcaaccagttgatataccttattaagaaatcagaaatgtactattctgtttactactttattttattaatcattatttattttgatccatctgtcttacatatttttcaagttttgattgattcttgagtgccttctagttataaaactrcactaattcagttacttagcatttctttactcataaagtaatgctttatttctttactcatactctttttttattaacaatcattctcctgtttaatatattctatacaatactgccagaattatctttcaaaagtatgaatataactcatttttatgcctaaaaacgtcttatgattcccttcaaaaatgggatttcatccaacccttctattcttaaacaatgtgtccaaacctrcctttccagcctcatgggctcttccttcctrtccccttgtctttctttggtggacrtcttcattttttcgagaagcagtttagatgtcacctctgcacagtttcatttctgttgggctgttgtatcactgctgtacatacctctatgtagaactggaggtggattttttttttaatactttgtattgagtttttacctcagcactcaatagcaggacttgatgcagtaggtagtctaaatatgcttactgaataaataaataaatatattcaattcatctaaattctttaggtcttaaagttgtttctttttacattcctagagaaaggtatattaacctggtacttcctttttttttttttttttttgttactttaagttccaggatacaygtgcagaacatgcaggttygttacataggtgtacatgtgccatggtggtttgctgcacccatcaacccatcacctaggtattaagccctgcctgcatcagccatttgtcctaataatctccctcccctccccccaccagcaggccccagtgtgtgttgttcccttccctgtgtccatgtgttctgattgttcagcccccacttgtaagtgagaacatgtggtgtttagttttctgctcctgcattagtttgctgaggatgatggtttccagcttcatccatgtcyctgcaaaggacatgatctcattcctttttatggctacrtagtatcctatgatgtatatgtaccacatcttctttatccagtccatcactgatgggcatttgggttggttctgtgtctttgctattgtgaatagtgctgcaataaacatacgtgtgcatgagtcttaatagtagaatgatttatatttctttgggcatatacccagtaatgacatcgctgggtcaaatggtatttctggttctagatccttgaggaatcgccacactgtcttccacaatggttgaactaatttacactcccaccaacagtgtaaaagcattcctatttctccacagcctcagcatcatctattgtttcttgactttttaataattgccattctgataataattgccattttagtaatcgccattcatggcgcaagatggtatctcattgtggttttgatttgtatttctctaatgatcagtgatgatgagctttttttcatgtttgttggctgcataaatgtcttctttcaagaaatgtcygctcatatcctttgcccactttttgatgggtttttttttcttgtaaatttgtttaagttccttgtagattctggatactagacctttgtcaggtaagtagattgcaaaaattttctcccattttgtaggttgtctgttcactctgatgctaatttcttttgctgtcagaagctctttagtttgattagatcccacttaccaattttggcttttgttgtaattgtttatggtgttttagtcatgaagtctttgcccatgcctatgtcctgaatggtattgtctaggttttcttctagggtttgtatggttttgggttttacatttaagtttttaatccatcgtgagctagttttttgtataaggtgtarggaaggggtccagtttcacttttctgcatatggatagccagttttcccagcaccatttataaaatagggaatcatttccycattgcttgttttcatctggtttgttgaggctcagattgttgtagatgtgtggtgttatttctggggttccattgatctatatgtctgttttggcaccagtaatctggtacttttttatgtattgatagcctcagttgttttggctttgtgtacatttattccaaggtcacttccttctataaactctggaggttatggtctaaaattattgtcattctgatctctttaaattttctctttgcctttttcttgactactttgatttagaatgaaaagccttgacaaatctttatcctgracactgtctttgaggattctcataagtgtgggccattgtttgatttgaaatttacttgaagaaaatggtttcccttcacaaaacactattatctgtctagtaatatactttattatttttatatgtaatttgggcttgttgtacacagcatttttggttttactgattttttgctctaatgtcatctgcttsttttggtcaacaaggttgtatataggtcatgtaacatttatacawttagaatataatatttaatatcttagtataaaaaggaaagcagtgcattctttttagtttttttttttttttttaagtttcgtttatagtgggcactaacagcttagtcatccctcctttaaatgattatactgcttttcccctggcaggtcgtagtmatagtttgagaagtaaaaagaatcttaaagattaaaagttccttggggcctccatgattcaatattgtgtctccagcgtctagaagagtccctgacacatagtgtgattttttgatttggcaaataaatatgaatcaatgttaaacaactatttttacatgaaggccagttcagaaaaaataaaaatatttcttggtatcatgccttttattacacttttaaacattcaaagtacaaataactattaaatccaagagaggataaagtacatttaggtatgtacacacacatatttacatwcatatatgttcttacaacctagattacatatattattgactaaaaggacatcaktgaggatgttggcactgtttttagctgatagaagagcctatttgataaatagaaggaactttgtaatctttcatcctatgtatcggtttatcttacaagaatctcctaagttcatttgtatgtgcttgccatttcatttttcattcttaaaacagstaatttttttttttttttttttttggagacgttgccttgctctgtcacccaagctggagtgcagtggctccatctcggctcactgcaacctccaccacccaggttcaagtgattcccctgccttggcctcccaaggagctgggattacaagtgtgtgccaccatgcctggctaatttttgtatttataatagagatggggtttcaccatgctagccaggctggtctcaaactcctgacctcaggtaatctgcccaccttggcctcccaaagtgctgggattactggcgtgagccactgcacccaaccgctcatacattttttaaggtgaaaaaatagcagagtcaatttactttcccaagatatccactactggttacttgtcaagacattttatcagagatatttttaaaattttttaatttttaaaattaaaataaaattttaaatatttttaaattttaccgtgctggcttaaatattgtcattcttttctaatattcctattcatagtttcattttgttgtaagagtaggggattactttagaagtagggttatcagatttaacagatgaaaaatacaggacaccagttaaatcactttttcttctatttaaatatttcagaataacaaatattattccatgtaagtgtgtgtgtctctttcaatatttgggacatacttattctaacaaatagtttgttgcttatttgaaattcaaatgtaattggttgttatgtattttatatggcaactatatctagaaaagacctccccaccccygccccctgttctctcaccttcatttttccagaatttccaaggaatgttttactttggtttagttataatgttaaaagcattgttgtatgcattgtaattagtactttgtatatcgtagtttcttcacaggaccagcacttttttgcagtgtctaattttttgcctggttctttttaaattcatttttgacagtcatcaaggaaacatctaacttacagggctctgcctttttcaattgtcagcttgtttaaacatgagctgtagaaaagacaaaaaactgtcttttttttcccccctcaacttttaagttcaggggtacatgtgcaggatgtggagttttgttacgtaagtaaacgtgtgctatagtggcaaaaaaaacttagtcttaaagatgttactgctaactttcatcagattctattcatgccaagaatgaaaatgaatcccacattatgagtctggatagaaaccaaaatgaccacttattataatcgctgtatactcagygtcatcaattacaaacagatatagacagatgtttttatcaccgatatctcggcatatttcacacagctattgtgaaaataaatttgataatgtatatccttaggtccacttgagggggaatatgtttacgtgtgttttacctattattttatcttttaggkatctgctaatcactttttcttctatttaaaaaagttaatttggctttaactcccttctctaccacctctttatccattttaatctgcctgttcctgtgatgaaatttttaaaaatcagccttaatatgtttcagaggaatgatgcttttgctttcatctagagagtggcagtatgtaatgagtagcatgcttttagaggtataggaaaggcttttgactctatggaggcttccctagtcagggaaggagctgctattcctatgcctggctgaacttccctacatataagaaaacaaactttacattcatatagtttcctctttaatctccttatctgtgaaagagattccgcaaaaactttcagtagctaattacaatgtttgttacctcacttagaggaaaatttatcctaggtcccattgtgtgggtcaaatttgcttcctcttttcttcaataaaggtgaagtgcaattgtggtgtagctttttatatatacctggaaattattaggatttgtgtaatataatttttaaaaatcttttatcattctggagagtgctttgctgtggactactctatacttagaaccttgcctgaaagaatatacaataattttcattgtcttaatttttattcattcagtttctattcattggttaaaattatacaacagatgtggagtatttggagttagtttttggggtttttttggtaattgtttctttttatcctgtttaataataacattctcttttcctctccagcacaaacgtgcagatatctgatagccctttccgttgcactcaagaggaagcaagatcattagttgaatcggtaaggggcaaacatccaagacatcctttaatcttataaatgtcataggaagtctagtagaaattctgaaatctctagcaatgaaatgtgtcaagtccttttgagaagcataaagtttacagatcaccttgaaatctatttctgtaattcaaggaatttaaattaagaattttaaaaccttttagttgagtttttaaattttgtatttgaaagttcattaaccatttagctaacttcatatgatgctgtttttcttatcatccgtttattattgtttatataaatatgctctcctctgtactgttgtatctccatgaattatcctctgtccgtgtctacattggaactggctattggcacagttccagcttaagaataataaaattggcccagcatgggagctccttcccgtaatcccagcattttgggaggccaaggygagtgaattacttaaggccgggagtttgagaccagcctggccaacataaggaaaccccatctctactaaaaatataaaaaattagctgagcctggtggtgcatgcttgtaatcccagctactcggcaggctgaggcacaagaatcacttgaacctgggaggcaaaggttgcagtgaactaagattatgccactgcactccagcctaggcgacagagtgagactctgtctcaaaaaaaaaaaaaaaaattgaaaataaaataaaattatgtttttcagcttaagaaaaataaaattggtgagaccctttgcttttttatttctctttagtttggctgtctcacatgctttccttctgtaagctgagatgatatccttggatttttatatgtcttagtgataatgctgcatagaggcaactgaatttattagtaaattaatgactgatttggagatcactaaattagaaaatttatattcagataatcaagtaatattacttgtataaagtgtatttaggagtgatcttaggctagaaatctcatttataaattaagggtttttaagaaygatgagatttaaaagctagtgaatttagatctttacactaagaacaactaaaatgttcctaaatgttagttgatcactgtggctgcttttaatttattgttttttttgtttgtttttttgttgttgtttgtttgttttttgttttttttttactgatgtgtcagctatctaattatgttatgtggtaagatataggttctgggaatgcagtattaaagaaaagacacaaaaacctctgcccttgtgtagctcgcattttatctggagagatggataagaaggaaatatgcaagtaaaataatgaacgtttcagagagcaataaatgccttctgaaaaaatgacaaaaatgagcagggacaaggggataaaatgccagaagtgggatgggagttgtagttattaaaaaggcagtcagccacagcctcactaagaagagggctgacatatgtgccaagaattgtagaaggtaaggtcaagcgaaggaagagcattcaaggccacactcccaaaggtcctgaggcaagaggatgtctgaggtattcaagaaacactcaaagtgaccatagtgactggtagagtaragaaagtatgggggagaaaggaggagatgagattggaaatgtttggatctgggtttgaaaatgggagttgattatggaagactctgtgcaggctatttaaggattgcatttcttattctgaatgaggtagggaaccattaaaatattttcagcaaaggagtggtctaatctgactttgattttaacaagatcattctggctgcattggtgagaatgggctgtaggccataattagattagagaagatacaaggaagctgtcacaataatgcaggccacattattttctccaagttatcagttttgtatctatgtagattatattcagaatttggttttcattacttatttaaggatgaaaatgaaggaaawcaaaaacttttcatctttgtacaagcagtctgtctcactaatctcagattaagtctattccatgtatttcagttttagattcataaataatatagtagatacttgtcttaaaattagcgagaggctcaaagtttctatattagatcctgttttttcattgctttctgtcacattagtggcaaaacaaaaaaataattggaggacatatatgtgatctagttagattagaggaataagattagaattcagaaaggttaacatacagctttaattacctggcttggtaacttggttgagctttataataatgaagaagatactctactgaataatttttcactgagaatactgcatcagaaattcacaaattagagaaaccagtrcctcttcactagctcagtggaacttcatgtatgccagttttcatcattcaatatttgtaagtcaaagaattaccccattagcaccctcatgaatgatttsggattcttagagcccagattagttaacacctttctcatatagtgtttaatttgttataatgaaattctttgtcataaaagtattttgtctcatttcctttcttcagaatcacattgaagtatttgaatcagaattatttaggtgtatatttccatgtctcttcattttgctgtatactgaatattgtacagtcttcaaagtgctatcaggtttttttttttgtcctttaattgcttagaataattgaagacacagaagtcattcatcatacttgatcagattcagaccgtatcaagtcctgggtttgtatgaaacaaattagaagacccaaaatttgttagtagcttagaatgagcgaattaacagctctaatatgtacctaagtaatattatcttgagacttatctgtagatgttaaatgagwycaaagtatggtcattacaaggccagacagtaatggaagttttcactttcgagatgcatattgctagaatactcagggtgtgttgattgagattttagaatatggttaactgctttgtacttttaaaatagacaaggaaaagaaaagaaatggactaaacttttgagtggttgatagaactattgkaggaagtatatgctggrtgaacatttattgatcaaaacacaattaagtgtaacattgagacgaaacaaattgttagtcatccaacaatatgtacaaatcagtcaggaaatccaagaaaaataaaatataaactaacmaattgatgattattattaagaaccatcttagaaacaaaatagaaaatatctacagaagtaatttatcattcttaggttagagatctttagaaggatagatctgaaagatctgcaaagatttcagaaggagaatttaaatgatcaaaatgattattgggctttgtttacaaatatagatgtttgaactatacatgatcacaaaaagcatgactgtatcataaacaagttttgttcatttgatcccaacacactagggaaccataaaagggagagagagtgctctgagtgggctacagcatgtggaccctggcaacaggaccctgtatgtaatagttcaactgcaggaccactcaattattattatttttttttgagacacagggtcttgctctgccgcccaggctagagtgcagtggcatgatcatacagttcacagcagccttgacttcctgagctcaattgatcctcccacctcatcctcccaagttgctgggactacaggtgtgtgccaccacacctggcgaagtttttctagtttttggtagagtgggagttttgctatattgcccaggctggcctcagacttctggcctcaagcagtcctcccacctcagcctcccaaagcaccgagattacaggtgtaagccatcgcacccagcctacatttctttttgtaaagtttttttatttttttaaccttcacctgattttatagccaaaaaatatgagattcttccccaatacttgagaattttgtgactaacagttggatctttatttcagggagcaaggcttagagaatttatagagaacaaagaatgtgtgtttgtgtgtgcatgtgtgtatgtgtatgcaaagacatgatttgcctttcagataatattagttgatagtctttaaagacttgatttgactattgggggttaagatgctacttttaggaccctttagttaaatattattttgagaatgttgagaagattcaaacaaaatgtacaagattaatctaatgcacatacataattagtgaatacataattttttcaagtatatgtacacatttccaaaaattgagtagatattaggccacaaatagagttrcaaaagacttgctgtcatgcagaccacattctctgtctacaatataatcaattatgaaaatattaaaagaaaaaagcacaagttcatgtgtttgaaaatttaaaagtacttataaataaattaggcctcaaaaaatataaataatttatatttaaaactaaaatatttaaaattggaagacaactgagtcagtgtatgttaaaacttatgtaatgcagcaaaaatagttcttgagaaattaaatgtatacaatatagcagaaattaaagaaaattatagaagttcaacttaacaattacttgtacattttgtttgaatcttctcaacaacttctcaaattgtaacttaacaattactctgttcgtttttctgactttttatattagaagaaaattataaagagtagagtaaatatttaatgaaacagaaaacaaataatgacaggatcaactaaaacaaaagctgggttttctttcttttaagactaattatacagacctgtggcaagaaagatgatgaaatagaataggcacaagtaaaaatagcaagaattaaaatgaagacataactacaggcataagacatatttaaataatcagaagagaatactgagaagctttttgcaacaactttctaaacacagatgaattgataattttgtttaaaatataaattgccaatattaaatcaataataaatagaaaacctaaataaacttgtaaaacaatacttaatcatgaagatggcartttttcccatgttaattcatgaagtcagtctatttttttcatcagaatcccaatgaggttttcactgaacctcacagggtgattctaaaatgtatatgaagtagtaaagggccaagaataacctagaaaggattaataaatttaagtaaaggggaaaaaaactgtaaacaacaaaagaaaccttaaaataagttacaagataagccattgattggaaggagatattttcatgtaaatgataaaaggactggcatctaaaataataacttattcaaactcacaagaaaaagataacccagtagaaaaaaattgtgtaaacaacatgaatagacggctcacaaaagaggaaacatacaatgaccactaaacatcataatttgctttatcttacttgtaatcagtgggatcaaaataaaacacaatacaattttacagttgtagattaccaaaagtttaaaagtctgttaataccaagagtttttaggcaagtgaagaaagggaagctttcagacttgatggtataataggagtatagatggctacaactactttgaagaacattaagtaatttctagtaaacttgatgcctataattcactactcagaaattacccttctaggtacacatcttacagagacactatacatgtgtttatgatcagaaatggaaaaattagaaactgaattacatgtctattgataagagactgggtgaaaaagcaggacacatatagtatgtaccatttatgtatttttttaaaagcaatagacatattttttatgaawacaaacatatatggtattacattttagaaacataaataagaaaagtaaacgtcaatttcagcacggtggccagaagttacctctgagaagggaggggagtaaatatgatttttatttttaataaatagggagaaagacttcagttataaagatctgaaacaacaatattaactcttctaaatctagagagtaggtatgtgttataatggtctctgcatacagaatatgtttgaagtacttcgtgatttaaaaaatttatatgcccagaaaaacaatttaaaaaaattaatgaagccaaaagctagttctttgagaagatggtaaaactggtaagcctttaggcagaatgatcaggaaagaaaagaagacacattttcaaagtaaggcacaaaacaagtaatatcactgctaattctacagatattaagagaaaaataagacaatgtgaacatattttatatcaataaatttgacagcttgcatgaaattgacagatgccttgaaatatataaactaccaaagytcactgaagaagagtaggcataaacaaattcaatttgtacttaaaaacctttctataaacacgactctaagcccagttggcttctactactattgttcagcattgtactgaaggttctagccagtgcaataaggcaataaaaagaagcaaaagccattcagattgtgagggaaggggcatgaatgtctccatagcaagttcaacaaattctacctaaaaacaactagaataagtgagcttagcaagattgtaggacatgagattaatatagcaaacaattgcagaccgggcacagtggctcacgcctgtaatcccagcactttgggaggccaagataggtggattgcttgaggtcaggagttcaagaccagcctagccaacatggtgaaaccccatctttactaaatatacaaaaataaggcgggcatggtgatgcacacctgtaatcccagctactcaggagtctgaagcaggataatcgcttgaacccaggaggcaaaggttgcagtgagccgagatcgcgccactgcactccagcctgggtgacagaacgagactctgtctcaaaaaaaaaaaaaaaaaattagccaggcgtggtggcgggtgcctgaaatcccagctactggggaggctgaggcaggagaatcgcttgcacctgagaggcagaagttacagtgagtcaggatcatgccattgcacttcagcctgggcaacaagagccagtatataaaaatagttgcttgagattatctatctatctatctatctatctatctatcthtctatctacacatattgatagatacacacatatagatatatatatacacacacatctatatatatagatatatatacatctgtatatacagagatatatatctcaagsaagtatttttgtgtactggctacaattagaaaataatattaaaattacattatttataatggtatcaaaaatacaaaagaaacacttaggaataactctggcaaaagtatgcaaagaacctgcaccctgaaaagtataaaatattgccaacagacatcagagaactaagtaaatgaagagatacataatgttcatgccttcaacattgcatgtaatatagtatttcagtattttgatatcagttctgctaaagttgatatatagattcagtccaatgtccatcaaattccaatatacttttttgtagaaattaacaagctgatataaataaatactaaggacctagaatagtctaaccttggtaaaggacaaagttagaatcataacttttcctgatttcaaggctttttaaaaaacactgcaataatcaagagaatatagtaatggcataaagatagattagtgtaaccaaatctagacacagacctacatatatttggacaactgattttcaaaatgatatttttttcaacaaatagtgcttaaataattggttattcatatttttaaaaacacatttcagttttgcactgtatgtaattgtctaaaatggatcctagacctaaatttaaggcacaaaacttaaacctattttgactttgggttagacagtatttcttagatatgacaccaaaggcacaatctgttctttaaaatgataaataggacttcatcaaaataaaaaatttttgttctacaaaaggcattcttaggagaatgaaaagaagctacatattacaagaaaatatttgaaaattatatatctgataaagggacttgtattcagaatatataaagaactttcacaactcaagaaaacaaaacattcagtttttaaaaatgtacaaaatatggctctgtaaatggatggatgacccaaaaatagaattttttaaaaagtacaaaatatatgaatgagcacatcaccaaatctataaagaaggcaaagaaacacatgaagtgatgctcaactttagttattaaatgcagatttaaaaccacagtacatgctaatacacacttttaggatgtctgaaagtaaaaggaccaggcataccaactgttaacaaggacgtggaggaactacaattctcatttactgctggttagaatgcaaaatagtacaaccatctggaaaacattttggtattttcttgaaaagttaaatgtatacatatcatgtgatccatgtgatcaagtcattccactcatatatatttacccaagacaaaaggaagtgtatgtccatacaaagacttgtacacaaatgcttgcagcagctttctttgtgatagacagaaactgaaaacaacccaaatgttcatcagtagatgaatggataaacaacttgtagtatatttatgaggaatactactcagtaataaaaaggaatagattattgacacatgccacaacatggctgaatcttaaaaaaaaatattgagtgaaaacagatatatcatacacattttttcataccatttatataaaattttaggaaatgcaagctaatgtataatgatgcaraccagatcagagagagccaggaaggaggattttacagtctcttttataagagccatggagaaacttttaggaatagtggtgaatatgtttattatcttgattatattgatggcttcatgagtgtatatatgtcaaaacttatcaaattacagactttacatgtagtttatttcaggtcaatgttagtctaatgacacatcttttgaaaaaaaatttttttttctgaagtcagattatctgagtccaaatctcagttctttaatttataacctgaaacaaattttaatttatttacatctttgacttcttatttataaaatggggcttataataatagtatcttatcaggctgttgtggagaattgaatgagctaatccaggtaaaaatgtccagcagataaggtattcaataaatgttgggttttattgtcattactgctataagtgtagttgagttaaatcgatcaaagagagagaaatcccttctattccagcctcttcyttccaatacttctaatgatgaggatatcactcctttatgagttgacccattccattgttgggtattggaaaagtcagccttactaatttttctagacatatgagaattagtcctactttcagagactttaataggaagaaagggaggaagaagaggtggaacaagtggaggggaaaagtagttggtttaaccactcttcccatctgggaattcttttccccaaaattctcccatgtgctttgtttaagcactttcctctttgaggaaatagaacactctaggcattatgcaaagttggggaaatatgaattaaacaatgtgtgaggttctctaatacttggtactgtagtcattttactggaaaaatgatcgaactttatgaggctccacacacaaacyggtggcatacagaactgaggagagagccatattcagtgctaaaggattcccagacttgcytcagacatgtgcacagcctaactccagggatttaaaactcttacaatctagaattcaggccaagaagagtaagtagctatacacttgctcagttctagggaaccagacccatgccactgtgaacctctagctcatagtagtgatggaagaagttcaaaagcttaatgacttctaaaactgagcagatagaatgcctcccagagaggtctcagcaccctcagtctgactgtttttgcctattcatcgacagatttccactaaaactagtctcggataaacctggagcacacaagactcagagatgatagtgatgatggtacataggatgctaaatggatggtgttttgaagtaaaaaagtcaagggggaattggaacttcaatataaatgtattatttcttgctacatttggtagatcttatytctcagtaaagcaacartatccatagtgttgtataaaatttggatggttgtcttatagttgatgcaagacttcttagctgaattgtaaaaagcagtgcattcaggaggccaaggccataaagtgaatcccagtgacrgttaacatcagcatgtagtgtggccatctatttcatcccaaaacgttatcagtcatcccataaatgcrtattggcattgatgtagagactcaaagatgaatccgggtgaaggactttagctgaatccatcaatataagcatttcatgtgagtctgaggcattgttatcatttggaataatagcacttaaaatcacaccaaagccatgttttatttttcctaaggatcacaagatggattaataaagcagtcagcttagaaccacactcttagaggttctgcattttaataagaaaataaccaattaattaatattttaaatagttataagtaggagaagtaatgaccagcagaagaatggtgaagttcattgtcatgttctcggataggacttgtaacagcatgttcctcaaatggttcctttgggcatctcctttatctctatttagggctttcctgataacatgacagtaacagcttccttgcatggtccacaaggagaaggcattccctggcatctggttattgaaactgagtcagctcagaactaatctctgaggttaatctggctgggataccctcttatcaccagggttgctttgacccttcagactacctatacaagaaatacttccctctatgggcacrcactttaatcaaagctgtatctccatcaaagaggactgcattttcttttagagtagaactgatcttaggatgtaattttctagtaagatcacactacaatatttatgtcatacagatttgttttatttatgaccctgagaatgaacatccttatgggaattcatttaaaaatgttttaaataatgccttttcttcataaatcagggtctgattagaaccagaccctgatttatgaagaaaagacattattttagttttatttctccctcttctttctctttttgccccttaacagctttgctgtgcattaccaccggatggtagacaaagttagtgaaagtaaaaccaatcatttacttagctactagccatttaaatgcattcttgaagaggaagtattaatagattaaacttacatgaacttaaaatatttttatgtcttctttatgaataactaagaattgaacctatattgttgattctaaagcgaaaaatcagaaaaggattgtgtgaaaagtaaaatgaatgtagcataactgctttatgaagtgtggaaatacaatgcagaaagacaatgtccggctgggcacagtggctcacacctgtaatcccagcacttaaggagaccgaggcgggtagatcamttgagttcaggagttccagaccagcctggccaacatggtaaaaccccgtctctaaaaaaaaaaaaaaaagaaaaaagaaaaagaaagacaatgtccaaggcactttaattcaactaaaaccttgcatcacctgaatgaaaaattgggaacctatttttttccctttaattttgaactcttttagtaaaatgacagaatgtcaatccctttgttatatatagtaaagcaggatactttrtattggttcagtgtgtcatgtttgttcatttggacaaatgtaacttacaggtgaaaatgcttatagggacctggtagagttatttgagagagagacacttaagtacagagcagttgtattaacagtttatatttgtttaaaatacagtttatatataaacagaaaagaaaggaatactttggcaatgaaaccgttagagtttttgaaagcaattaaagatataaagataatgagaaggatttttgggatgaggaagaggagtagatagcatttttattaattaattatttaataaaagacacagtctcactatgttgccggggctggtctcaaactcctgagctcaagtggatctacctgccttggcttcccaaagtgctaagattacaggcgtaagccaccacacccagccgtggaagtagcatttttagaatgagactataaaacaatactcattgttggtggagaatttattttgggtgagtagaggatgtccacattcttttcctactaagaaattagatgaggtaagtaattacattaaaagaaatttagaagtaagtaactaaaagttatttttttagtttcttacaatgaaaatgtaatcatagtatcccctgagagtgaagagttgggattagtaatcttttgggtactgctccatacatctctttgttccattttctgtaagtaaatgttatatttgttgttatgtttaagcaccaggaaatcattgactgtagataaagagtcaaatagctgatgtttatcatgaatccattattactgatgttttcaaatttaaatgacagtttctcttttaatatggtatttttttaaattaccttcaaactttatcattatctctgagtgtcagacttacctatgatggggtgtgtgtgtgtgtgtgtgtgtgtgtgtatttaaatatatatcatatggctttgtatattctgaatatattctatcaattgagaaatgtattttaagaatgaagaaataaaaccattctggaaattattttaaaataaaatgtaatgataaatgttttagagtagcttgcccatttctttactgtaatactttttrggttaacgagaagctgctcaattattctatttttatacactgtacattttattcctctgaaatgtttggcactccaacaagaagcagctgctaattttaagcaggaaatctaaacagctaatttgagaaaaaaaattttgtattgttatactgtccttaaattgtgcaggacacaaataggcatcctgcacaatttaaggagtatatagcaatttcatagaataagcaggttamcccgttttatggtctgtttagaaaaacagagccgtcaaatcccaaatgcctaatctcaaggagtacaatttttatgttgtgttactgtcatacccagatttaaattctaccatcctcaaaaccaacgatggttaagaatttttctttgtgcacaaactgagtagagattttattctttttgaagtacttggaaaaactaaaggatgtttttaaaaattgtaattttaggccaggcacggtggctcatgcctgttatcctagcactttgggagaccaaggtgggaggaaagtttgagcccagaagttcaagaccagcctgggcaacttagcgagactccatctctaaaacaaacaaacaaaaagataaaaattgtaattttatttacatggttacactatccttttctttgatataaagaaaataaaacaaagtctgtttgttcagcttttttcttaaaacagagtagaaagagtaataactttaaactatttatgatttgggggaatttattaggattctccagagagtcagaaccaattggatgtgcatatacagaaagagatttattataaggaattggcttacatgattatagtggcttggcaagtccaaaatttgcagttgggctggtgggctggagactcaggaaagcagatgatgcagttcyrgtgtgaaggccagcagcctggagacccaggagagccagttgagcagatgaaatctgatggctgtctcctggagaattcccttttgcttgggacagactagtctttttgttctattaaagccttcaactgatcagatggggcctaccaacattatggagggtaatctgcattattcagagttcactggtttaaatgttaatctcatctaaaaacaccctccaagttgacacataaaattagctatcatagggaatattttaatattgctgaaatataaatctttcttctggtggagtggtggctattcagtactgcccttagatttaagcacggagagccttcctcagatcctgctttttggagggtcatacttggccgttattcagtcacatatctcaccgtagggcaagaagaccaaggggccaaagttatagattcaccaggaggcatgcccccattctagaccacatccccacaaggggccaaagttagactcactaggaggcatgcccccattctagaccacatcctggctacccaggaccctggaatcctctgcccagacaggtttaagcctgtttctggggcctgtgtagaaaccaggctacacatctccccaggtccacgctcctgactctatggactttgtacccaccgttacttctgcaggggcyggtgggtggctgtttggaggtaaaaggtgcctagatatgtgggctactaaattwytacccatgtgcagatgaggcccttgaaatacagaaaggagcctggaatagggagagaagtggagcaggatgagggcctcttttccttcctctgctgcatccagacacatgtctctaaggtgtctggaatcctaaatgagagtttccaggtcattacaaaggtatttgtatcaagatagtgagatggaacacatttcatatatatattcatcagttgttagcctgagttattgtaacttttaaatatttagatatatatttgtacatttggacctctgcctcagacttaaatgctagaggcaggtatttcctatctattgaaggtcagcaaattcagagaattagaagttaattattaaatttgaaatctgaaaagtgtgttataaaatcagggtagggtagggttattgctaggaaggaaggggtcatagttggggaggggcctggcatgtttcatttctctacttggatggtggtcacatagatgtaaattctaatgattctttaaactaaatctttatggcttcttccttatggaaaatagatcttccaatggagtgctaaaaagtattattcttaattatggggaaaaaaactattgcataaaaatgtttcttcaaacttgtctgttctcagaatcttggcccagccatcagaataaatagaaacaataatttaaagttctagaagacagataaattttttagcaagtgtgtgttttatagcaagcatgaacaaacatatatttaaatatgtgtgtgtgtgtgcttgattttractttcaagacattagctgcggaagccattgaaagaaaacctctcttctcattcctagctgcaagaccttcagtggattccatgggttaagataaaaaatattttcaagtatttttattttactctaagtctgttgtttgtttatctgaaagaatgaacaatgataatgaaaagcaaaggggaatatttacctttttcaggttagagatccattgtgtgtaaactttsttctataatttcgtgaaaaaacttctggatgcgctttccacatataaatatttattgtaacagagattctttctctgtttttatttccaggtatcatcttcaccaaataaagaaagtaatgaagaaggtatagtatattttgattcattaagagtaacatgtataaatttatttgtttacagtagtggaagccaaaaactaaaactaaaaataaaatagataaattgaaaagctgtataagctaagtgaaatatttttaaaatagtcgctaaaatttcagatgaaatattttctaaytcagaaaataaggagaatgcatttaactacttttctaggttagaaaatgatttgattgtacrgtgactttttttttcgctgaagtactgagatattccagccagttctgatacatttaattttaaaagatttaattaaaaaraaactcttacatttagatatttatctttttttaatgaatcacttattttagctgaagatcttaaaatctatagttatagaattaaaaataaatataatatttttattaccattatttgaagctgttttaataaacaagtaaaaatgctctgtagtgaattttcagaatttaagcatgtgcacacatcatttgtctttcaaaatattgcaagattttggctttttgttttaatataaaatattagaagaacattcaacttgcagatttggaagaaatatgagaactatttactgtgagtcaagtatgacatgtttagaaaggagtaaatccatagacatgatttcatgggaaagcaaactgtattccttatatggtaagctaacaaattgtttctttgcgatactatcccatttggggcattttttgtgtagtcaaattttacaatacaagctttatctaaacctttcatattatagcacttctatgttgtctgctagagactaaaatgacccagaaagatacaagaaataaagtaggaaggctctagaatttttaatgtagctttatataaggcttgggccaaatgagagaacttgggacgaaagtttgaagggaaatagctttaaatagagaaatgcaactttagatagcttatgactgtttgtatctgcctaaatacttcctaaaagtcgaaattaaatttgattaatcactcccttctccctcctcttatcccttccctaataccctctttccccattttaaatgcagagcaagtgtggcacttccttggcaagtgattgaaacatctgaaattctgctgtcaagattcccatctctaaggactccaagtgctagagacaagggggtctatgagcattyactgacttcctgttaaaacttcattttttcaaactttttgagctatgcaatatataaataaacagtaagaattttaaattactctcctttggacatttattgatataaaaagaagattttggccaggcacggtggctcatgcctgtaatttcagcactttgggaggccgaggtgggcagatcacaaggtcaggagttcaagaccagcctggccagtatgttgaaaccccatctctattaaaaatacaaaaattagccaggcgtggtggtgcatgcctgtagacccagctactcaggaggctgaggcagaagaactgcttgagcccaggaggcagaggttgcagtgagcagagattgtgccactgcactccagcctaggcgacagagagagactccgtctcaaaaaaaaaaaaaagattttgtttcatttcatagcacaaatttagaggcattgagttgaccatttctagtttctatacctgaaggaacccattgattttaccagtttttatttctgtagattggatgtaaaaatcacagattcaataaattaataaactttgtgtagacaactgttactttcattttcatactatattattccttttcaagtccattgctggtagaggctttaaatatttggccaacctctactctcttattagtgcctgtgtaaatgtgttacatttattaaggctccttcctgtaatttattgttttggaaatcctaatctctttttgattctcattcattccccttatggtgatgactctggggatgaccctcatcatctctacaggatgacactctgtagtgactactccctctatgatggtgacctctataacgatgactcccaaatctccataagcagcccaggtctctttctggtgtctacctattggtcatcagtttaaatgcctttgacttctcttgtccaaacctgaattcatcttcacttacacatatgctcctttctccttattcttgaacaatggaattgactttctctaaatcttccacttgaagccttgaaatcttatggaacttctctttattcatgaagatgatctaaatggttatttkttgtcctcatttgttgacatccctactctcttgagttttcccttacttcactagactcttgttaacaggctcctatctcttctccatgactctgagatccagcccctctgcctcatccccatgctcagtatcatgcactcttacctcctaaccaagtggttgtcttgcctccagtttttctcccttcataccatcttccacatttctaaacagtgattttcttacagcatagatcctatcttgttatatttttctcaaaatgctctctatgcatagttttctrtattcttgacaataaaaatcagactctttccttttgtcaggaaacccatcctacagccatgcaatgctactcactcctcaaacatatcttatactcacactccaaatactgcacttctgtcttaccagttttgttcactactttttctccctttttctatatatcatcattaacaaattgcatttatagtgctttgtggtttacaaaagactgttttgataacaggttattatttattgagcacctattgtatatcaagcactgttttggatactatgtgtacataataccctatatgcctgtacttgagaagttctataacttgcccaaggtcacacagcgagttcagtttcagagccaggattacatagagcccattactctgtgctgtaaatcctatggtttttccatccttctatgcattcagtttctcgcatacaaccgccttgtaatgtaggcaaagctcagagctctcctctattttatagacaagaaaacaggcacagagagtttaaatgattattccaggagtaaatattctgttgaagtgtctttggtcatgtatgaacctctttgagggacaacaaagagtgtaagagaagartgaattctttttacttttatagatatattgtttaaattgtgaaaataaaacttgtagaaaggtagaaaatagagtactattattgcaatagttgtaacaagttagctggaattatcaagagatagatagtggatttatggcatgtgacatgttagtctctcagaagttggaagaggtaagctatgtctggtggtcctcttgtggggcaaggcacacctagtatttttccccctctccttctagcagtcagtagtactcagatgctacctagtgagccttgctagggaggtaaatccatttgatatggtttagatgttttgtccgctccaaatctcatggtgaaatgtaatctctttggtaatgagtaagttctctctgtattagtccattttcatgctgctataaagaaccgcctgagactgggtaatttataaagaaaagaggtttaattgacttccacatggctggggagacctcaggaaacttaaagttacagaggaaagggaaacaaacatgtccttcacgtggtggcaagagagacaagtgcagagcaaagaggggaaagccccttataaaaatcatcagctctcacgagaactcactcacygtcacaagaacagtatargggaactgcygccatgatctaatcacctcccatgaggtcccttctccaacacttttggattacaattcagattacaattcaagatgagatttaggtggggactcagagccatgccatatcattctgtcccttgctactcccaaatctcttccttctcacatttcaaacacaattatgcctttccaacagtcccccaaagtcttaactcattccagcattaaccccaaagtccaagtccagagtcttatctgagacaaggcaagtcccttccgcctatgagcctgtaaaatcaaaagcaagttagttacttcctagatacaatgggggtacaggtagtgggtaaatacagccatttcaagtgggagaaattgtccaaaataaaggtactacagaccccatacaagtccaaaatccaatagggcagtcattgagccttaaagttccaaaatgatctccttagacccgatgtctcacatcgaggccatgctgatggaagaggtgggctcccatggccttgggcagttccaccccctgtggctttgcagggtacagcccccctcatggctgctttcatcatgggctggcattgagtgtctgtggcttttccaggcacacrgttgcaaactgtaggtggatctaccattctggggtctggaggatggtggccctcttctcacagctccactaggcagtgccctagtgaagcctctgtgtgggagctccagacccacatttcccttctgtactgccctaacagaggttctccttgagggctctgcgcctgcagcaaacttctacctggacatccagggatttccatacatcctctgaaatctaggcagagcttyccaaatctcacttcttgacttttgtacacccccaggctcaacaccacatggaagccattagggcttggggcttgcaccctctgaagccatggcctaactggaccttggccccttttagccatggctagagcagccgggatgcagggtaccatgtcccaaggctgcacagtgcaagggggactgggccyaaaccacaaaaccttttttcttcctagtcytccaggcctgtgattggaggggctgctctgaaggtctctgacatgccctggagagattttccccattgtcttcgtgattaacattcatctccttgttatttaagcaaattctgcagcaggattgaatttctccccagaaaatgggtttttctttgtgcatcattaggctacaaattttccaaactttcrtgttctgcttcctcttgaatgctttaccacttagaaatttcttctgccagataccctaaataatctctctcaagttcagagttctacagatctctagggcaggtgcacaatgccaccagtctctttgctaaggcatagcaagagtcacctttgctccagttcccaagaagttactcatctccatctgaaaccaactcagcctggacttcattgtccatatcactattagcattttggtcaaaaccattcaacaagtctctaggaagttccaaactttcccacaccttcctgtcttcttctgagccctccaaactttcaacctctgcttgttacccagttccaaagttgcttctacatttttgggtctctttatascagcactccactcaatgtactatattagtccattctcatgctgctataaagaactgccgaccgggcgtggtggctcacatctgtaatcccagcactttgggaggccraggcgggtggatcacgaggtcaggagattgagaccatcctggctaacatggtgaaacctcgtctctactaaaatacaaaaaattagccgggcaaggtggcaggcacctgtagtctcagctacttgggaggctgaggcaggagaatggcgtgaaccccggggggcggagcttgcagtgagccgagatagcaccactgcactccagcctggggaacagcaaaactccgtctcaaaaaaaaaaaaaaaaaaaaaaaaaaagaactgcctgagcctgggtaacttataaatgaaagagatttagttgattcaccattccacatggctagggaggcctcaggaaacttacaattgtgacagaaggggaagcaaacacatccttctttacatggcggcaggagagaaaagtgcagagcgaaagggagaaaaaccccttataaaatcatcagatctcatgagaactcactcattaccaggagaacagcatggagaaaccacctccatgatcaaattacctcccacaagcccctccctcaacacatggggattacaacttggattacaaatcattatgagatttgggtggggacacaragccaggccatatcacttactctgrtagctcacacgagagctcacatgagagagcctggcaactcccattcttgctctcttgcacccaccctctcttgcctgctctcttgccatgtgacacacctgctccccttttgccttctaccatgatgtaagcttcctgaggccctcaccagaagccgagcagatgttggtactgtgcttatacagcctgcagaactgtgagccaaaataaacctctttataaattacccagcctcaggtatttctttatagcaacacaaaaacaaactaatataccatctgtctacattagtccagttaatgattatcttcatagtgtgtgatgttatgtaattataatcttagtatataattttgaaatttttaaaattataggcatctttctatgttgctacatagtcatcactattattatgatgacaatgtggctctttcatgattgtttcagaatgtcttccatactagctaatttaatttttgccagtccaatcccatgaaacaaattgaatagacattatactaaatacttacaaaggaaaactactgggaaaattcagagtgaattattgttaaaactgcctaaaacaaattaggaaactaaaattgatccatagatgcaattttaggtaatacccacagccagttcccatggatgtgaaaaagtaaagggggtggactatccaagaatcactctcaaacttgctataagtacaaaatctgaaatttttatgagctttcatttatttttcacataagacaaayatttcatatacgatatatttagtagcatttcttcagtctacagaggagcacttaaagtctgttcctccaccaatgactacatgcctttttagcagcttatatgcttattaataatatgatgatttagtttcagaaggggcatcattgtcttgccataggtcaaggtatgtcttgccactactagtttatctttactyattatactgtcttataatgtcttacatggtgaatcaaatctttaaattcctgttggcttctattattttcatccttctttccatattctgttttaccagtgggctgtatgaaacaccagcatcaaaatcaccaagaatgcttcttaaagtacaaattcctggtgttccctaaagatctattcatcagaatttctggggtagagccacaatcatttttcatttcccccatgagtcttagattagacttagatattcacaggatagatcatattgggaatttttcagtgttaatgttctgtttgagtttatctccccaccaagaagaggagaaaaaaaatgaggtgtctgcctgtgtagtggattcatacatagaatattattattacctcctgttagaaaaaaaaaggagtaaaagttactctaagtttagtattaaacattaaatgtggtttgggttaaaacttaaaaatttacttgatgagaataacttgttatctaagttagcaaactgtgttaaagtatcagccccacatgtagacttatgtcttcctagaacgcaatgagggataagcctctgcttctgatgtggcagctttggaggagttagaatagtgaagwagyagctctgctttaatgggtgggaggggacagtggtggccacagaaaatagaagagctttgtaaaatgtgcgagtcctagccacagatcaaggtttctgtggttgacctgacacttaccctgttctgatgacctgttaagagcagactccccttctcaaattatgcccctctatactatgactagtaaacaagactctaaaaggatccttgttcaccccgagagcaaaaatgtcaacgttgcttctccattcaagaatacccaatatatagatagttggggctctttctcctcttttgagtacctggccgcaaaagattgaatcaggcagaaagataagagggatccatccagaagccatgccactacagtgattttaattagcaagtctgctgttttagacatgatttctcatttacgtttttctataattcattcaaccattacttattgactgcctatgtgtatgtgccaggtgctattattttacgtttttagcgtgcatgagtacaaaacagacaaaatccctgctgttgtaaaacttgcattttgtgtggggaagacatatcataaacataataaataatttgtctaatatgtaaaaggaaaaacagagtaaggagaaattgggaatccaggttgagttcaagggtaagagcagcaaattgaaattttgaattgagtaggtcaaggcaggcctcactgggaagataacaactgagcaaagtggtgaagggaagcaggactgagcccatgtgggtctggagcattgaagtagcaatgccaagagcaaaagtcctaaggcaggagtgcagctggtttgttccaagaacagcaaggaggcttgtgtggctggagtgtagggagcagggaagagaagcagagatgaggcccaagagggagcagggaaacacatggggcctatgggtcatctaaggacttgcccttttaccctggttaaatgagaagccactggagggtcttgaacaaagaagcagatcattcccactgtggttttgaaaaccgattgtgctgggggcaggagcagggatggaaaccagaagattatgagatttctataaatttcctaaggtggaaatagagaacattttatagccaaataggtttttgtaaggcttattccaaggtatattgccaccggcaatatatgagatttctagtttcttctttcctattcttcccaggatagaatattttattattgttatggtcttcttaataggtttaatttttttccctacatatttactagtcatgatgttttctatgaatgtcctttgtcttttctttgccagtttatccactggatcttaatgtttttatcaattataatggtattccttagttctaggtgctaagtttggatcctcaatactggatccaagtttaaagagattagcccacttttaagtcagaaatctaaatttcagccttgaaaatattatgccaagctaactaaggaagccagggtgggaatatactaattttctctgcttgaggcaggactagctgtaggactgtccctattatgttattgcttcctgttctctttaaaggttaaaaatgaaaataagataaaaatgtttaagcttttaataacactgtaaattgaaaatggctaaatagtagtaccagtacagttttgaaaggaatcatgcagaatgccaaacaatgagtcttacctaattaaagcagctaaaattggatggctgatttgcatctgtagccttctaggagaacttagtagttggcaagaccagggattaccatcctaatgcaggaattctccccagttggagagtagaacatgaatactaggattcaggccagaatctcatgcatcaggagcattctgtccacaggtggacagaaacagctgagcctactgtgaaatcagcaagtagactgagctgtcccttcttgtgtgaacaacagcaactcagacaagaccacatgctcacagcctcttctgtgcaagggattcctgctagtttctagtgagtggtagaggcagaagtagaaaagagctctggcttttgattcaaggattaatgtccctttcactcttatcgtgttgcttcttgaactrttacttatcctcaaagtccagctcaaatgcagccttttctgtccccarcccttcacattgaaatcaattattttcttttctgtgagaggtgaatagcactatatatttattcctccattatagtctttaggtcattctgacttgtattagaattgttcatattatctcttttactagattataaactcactgagaacacagattgttttatgacaatgttggcattattgttttgcacattaacagttcatgtttattgaatttaatagatacaacatcctgtgaggaaaacaaatattctttccactttacttactgcattaagtaaagtttagagagaagttaagtggattcctggaaatcacaggccttctgcatcttgtcagcattctaatactgcatttgaaagcactttgaggggtgtctctctgctctgttccaaaagcccatgtaatatctttgaaataaaagaatatatttgttttaaggatctccaaaaaaggagacttaacatatctaacttaaataccaggtttttaaaatttagcttacttttaacatatatgtacctgatcattgtattcagagagcttctcataaatcttacggtataaaaagtaatacatttcttttcaaaatagaaataaattttataataaattaactttttgcataattcttgcctcctaaaattstactaatcattgagatttttacttaaagtcctttctaaattattttattatgttgtttgctatggagcctccaaatgaatatagtaaagatttgcctcatgtcaaaacaaaaaccagtacctctttatttatgcattctatataccttttaatgcagcctagaatgttttgtgttttctgaaacaatgattagtgttaccagttatgggttgctttttttttccccaaagtgaataaatgataccaagaaagtaagattctctgggtaacatcttagtcgtagcagtatgtaaggcattttgagagttctcatacaaaattcctctaatgccccaggggaaaaagtttaactgacaaagggctggtcatcacatgtttactgctgcttttttgtagaggatgagaaaaaaataaacatgaaatacttaacaataaaaatagactcagggctcaaaggctaaaaatcttgttccagagtgacttcttatatgggtttttgtgtaattattgatattaacttctgtgtccagaatttattccttctggtgggttcttggtcttgctgacttcaagaatgaagctgtggaccctcacagtgagtgttacagttcttaaagatggtgtgtccagagtttgttacttcagatgttcagatgtgtctggagtttcttccttccggtgagttcatggtcttgctgacttcaggagtgaagccacagacctttgcaagtgagtgttacagctcttaaaggtggcgtgtgcagagttgtttgttccaaccggtgggttcatggtttcgctgacttcagaagtaaagtcgcagaccttcgcagtgagtgttacagctcataatggtggtgtggatccaaagagtgagtagcagcaagatttattatgaagagcaaaaaaagaaagcttccacagcctggaaggggacccacaggttgctgctgctggctcgggtggccagcttttattcccttatttggccccacccacgtcctgctgattggtccattttacagagtgctgattagtccatttttacagagtgctgattgctgcgtttacaaatctttagctagacacagagcactgattggtgcatttttacagagtgctgattggtgcgtttacaaacctttagctagacacagagcactgattggtgtgtttacaatcctttagctagacagaaaagttctccaagtctccaccaacccagaagcccagtggcttcacctctcacttccatgtttgaaacttgacctcctgaacttgaaagtagcagtaacatattttgattttctgatgagaaataccatgatttgaccacagtcatagaagacctaaataatgtgaagagagtggtagaacaaataagaataatatatagtgaaaatgagaaaaacgtaatccacctggatgtaatataaattagttcagttgatacactctcatgaaaaatagtttaaaggtcacctgttgcacttaaaaccccacttactcgaaactactatgttttaggggatatttttctcaaagaaaagttaatttttttccttttccttctataacatcacatgtcattcctttgacttctcattttctttagttttttaagaaaatttttaaaactcttgatttattaagattttagaactcttggtaggctctcaaaccataatttcatttttaccaatacctactccagcttgtatcytgccccacaaaacaaagtactattaatgtaatttacattaatgtctgttaatttgtctctagaatatacttaaccatttacagatagattttatttaatacagaaatctgcagaaagtacaacagctatagactgtaggttgcttttctgaatctgaaggaggatttcgaatttagaactttgtgaactggaaagaatcttgcttattggaagaggaatgtagaatctacagaggttaattttttaaagccacatgactagcaagtgatggggactggcttgaaactagatcttaatctaaacttgttttatttttgcttttgctttttgtcatgctttcttgtgtactttgcctcctttaatgtagaaacataattatttgccccttcatactgtatgtggttaaaaattattgtgttgtcctgactaaggaaaagaagatatacatcatttactattctttgctgtaaatttctttctgactgacagctgtttaaaactgatagttttaatacaaaataatattcttcatacagagatctttttttgtaataagaagttggtagactctcaaaccataatttgatttttaccactgcccaacctgataatattgcttgtaaatgtgactatgaattaaagatcaaatgtaaattcaggaatactgtgtgacttaacattttaaattttaaaatattacttgtgattgactcacagcaacttttttgggcaaaattatgtttaattattatgtatgagtccaacagtaagctctttttgctcatccttggaatgtttccaatctgtggctcctagtatcctatgctgggaacaggaaagagatgaatgcaaatctgtggctgtctttcccttaacacttatgttggacaataaaagtgtgtgtcaatctaagtttttcagtgttgaatgttaatgatgtgttagtactttgaacaaatgggaggaacataaaccaaccattctattaaaaacactgtctttatattagcatctgtttgtgtagatattttcccatggtataaaacaaaaagtgcaacaaattaggtttgccactccttagtgcctctttctaatgtgcattgaaagaatgatttaaaacagagacagaattccaaagataacaggtggtgtgggagctggaattgatgttggccaaatactctgtggcacagattagattcatcctctctaaccaattgtccatcccatgaaagctttttgcaatttattacaaggaatatattttgtgaggagtgttaagagttggtctcagggttggatacttggggtgactgagacaaagaattatttagtgaaacctgcatgcatactaaaaggtatctggcgttaaagtgcagtttcaagttagatttcttattttttggagaaataaagaacgttttacatgcagatgctatttggcttctgacccttttttctcccctaaaaaggatyatctaactggccagtattacacttgatggtttatgggggtgcacagatatatatggcttaaggtggtgcttcttggagaaaaaagggagaaacagtaaatatttgtttattttctccacaaacaaatttggctattgctttatatagaatacaaacctttgaggcaggatcagtgtaaaaattctgttcccaaraaaataattcacaaaaacaattgtctttctgtaatctgtgaaaataggagtacaacactttacatctaaggaaataggtagtgggtgcccctttgctctttgttatcacagagaatatggtcactaaagccaaagttgtcatcacatcataaaaaggagttggtaatttattcactacaactgataactaatagattatttggcagcctgaattgtatgcactttgggattaattttggaatcatttcagattataaagatatttttccctactgttctcattagttttctaaactaatatgctatatttttaagttttgaaatataaatttttagtgtgtgtttagtatttagtaagaagaatattacatgaagaaattgacggtagaaagaatgttagttgagggaccttggattggcaagaagtcacattgaaaggctcacataattatgttggaagtgtacttgctgcagcttctcaaatgttggagtgttaacagaaaaggagccacatgtttgcatttgcctctttccctgttcctagcataggatactggaagtcatcaactggaaacactctaaggatggacaaaaatagcttattgtgtgactcaaataaaagttaaacagttgtaaaaataatttttcccaaaaagtcaaatatatgattacatcagtttaatagaggaaaggttgatgttttgaattttgttatattattaatctgtttctgagtaaaaatccataaaacctagtggcctaagacaacaaacattattatctcacaatttctgtgggtcaaggaatccaggaagggcctaacaggttttcatatttccagggtcatctcaagtcttgactggggaaggatttgcttccaagcttacattggtggataggaagatttggcttcttgctcatccccttactatatgtgcctctttaacatagcagcttgcttcatcaaagtgtacaagccaacaatgaaatagagtctcctagcaagacagcagtcaccatcttttgtaaccactcttggaagtgacatctgtcaactttgctgtatcctattgtgtagaagcaagccatgaggtttagcctacacttgagagaagggattaaacaaaggagtgaagatcaggaggagagggtcattgggcaccattttaaagtccccctactataactactaactataagcaatagaaattcaacataggccagcaaatgtttatatgtgagaagagatctacactgccatgttccaagggaaaatgtgccctggtgaaggatttgcaaggttcgccagacttgaaaattgatgcacattatgggaaggtctttcctaggaatagtcttaacagtgagatgcatctagtcaaagaaaatatgatatattcaacacataggccaacaataagtggttatatccatctaaagcattttatgctttggaatttttgcaggtgtccattgagtcatgaaaaatatagaagatarcagaggaatgaatgatttaaagggaaatagaacaagctaatacatttcactactttaaaaaaacaaacaaacaaacaaaaactggcagggcatcgtgactcatgcctgtaatcccaacacttttggaagccgaggcaggaggattgcttgagcccaggagtttaagaccagcctaggcaatgtggtgaaaccctgtctctataaaaaaaaatacaaaaattagctgggagtggtggcatgtgcctgtagtcccagctaatcgagaggctgaggtgggagaatcacctgaacccaggaaatcaaggctgcagtgaaccatgatcacactactgcactccagcctgggtgatgggtgtgagacctgtttcaaaaaaaaaaaaaatgaacacattgttttaaaaattaacatataatgtcaaggaacatagcactgcaactcctgaaaaagtctggactactcacacttgactctagctttccagctgtaggggaatggcagtgccagggctgtttgtgtgggtgtacaagctgattggggagggatttgtagggtacgagatatcagaaatattatgtaacaaaaatgttagagaagcgataagacagtatcgcatgattgttaaaatctttggcttaggccgggcactgtggctcacacctgtaatcccggcactttgggaggctgaggccggcagatcacctgaggtcaggagtttgagaccagcctggccaaatggtgaaagtctgtctctattaaaaatacagaataaaaaatagccgggtgtggtggcacatgcctgtagtcccagctactcgggaggctgaggcagaagatcacctgaacccaggaggcggaggttgcagtgagccaagaccaagccactgcactccagtctgggcaacagagtgagacttggtctcaaaaaaacaaaacaaaacaaaacaaaagctttggctcagagtttgaacagacttaaatttatttctaagtcccattgctttgtagttgtatgatcttgagcaagctaacttttttagtttcttaatctgtaaaaatggctttaccaatagaatctatctcaggggtttgtttgagaattaaaggagataatacatgtaccatttagtggtatacagtaaatatccactaaatattaatcagtactattttacaaattgatgactgcactcagaagagaaagagatgaggcaggatgattcaaggtttgggccaaggatggtgagagaatgataatactattcattcacaaatagtaaaggtggcctatagtttgggtgggaaattatgagatcagtttcaggcttgttaagttggagatggcagcatgtgataatatctagcaaattctttatgtgctcagatgggaggttaagtctggaggtgacattagggacaccatgttcttatgaccacctagccatggttgattgatccaaggtgatcacttaaccttttcccttgactgtaccccctgctgaaattgatttattcgagacctaagcctaaactgagccaatcaaaagccttacttagaaatctggaattgagaccaagacattacaacccagtcttcctgctctctggaacaaaagagatataaattcaaaatggtctgcacacaggaaaatgaaacagtcacacagaaaaagaaaacaaaattggtagaaaactcacatgtttgagtctctgatcccaagtattccttatttaggcagcttcattcttgcctaagatccttaaatatgtttgtaaaatttatgctagttcaagttaggtttctattacttgcaactcccaactaataccaagaaaccacatgcaggtgataactgcagacactcgtcatgaataaactacctgagggagcaggaaaggaatgagagcaaaactaacttggcattgtgggtgtcagagaagccaggataggaacggaaggttagagggacaattgtatcaaatgctagtctctctctctctttcctctcctctctctcctggagctggacacacttcatctccttcttttggacatcagaacttcggcccctccagcctttggactctaaggcctagtggtcaaggaagatgaggtcagaggaaagcctgccgaattgagttttgggagttcactagtagctttaaaattgtctaccattctcaacagactaactgtaatgaaatttcaaagttaaaacttttttgaatcttggcaaacaatgttccatcttttataagtctcttttactcagaacacatgtttagtatgcccgtatttaatttatacctgtctgttaaacgggttgactgcattaagtctatggtggtggtggtggttcaaaatagtctgaccttttaaagacaaggttactgattccagctgagtcattcccttagtcttgaggttaggaaccagcttagaaacagctgagagtgacatcactgtggccatttgaaaaggcagagaaagaagggtacatygggctgcttcaggaagactggaatagagaccttcacagaagagagaggccccatatcagaaggaagtgtgacccagaaggatggagctcttcagagacaggcttctttgagaatcaagaaagattcagaacaggtgaattgagtagattgtggcttttggaaactgagtaacacagtagcaaattgcatagcgttttaaacactgcaacctgacttaagagagaatccccctgtaaaggtaaggctgagggatggtcagtataaataccttaggaaatgtaggttacctcttatctacccccggtctctttgcttttcttgttactgtgttgttccatgtatttgtgtttgataagaaaatgaaccgatatgtgtaaaagtgtgtgtatatgtgtttgaaggatagacgggaggttgttggttgcccagatttacatttctccaggcttaaatcaccgtgccttttacagtagccaaaagaggcacacagttctagaagcactgactgagggtccagaggagaaaaattcaaagatgttcactaatagtaccagaaagacctcaagtccctctgagtctcagctgtggtcaaaggaggaaaatgccatcctagatttttctgtaacatatttgggacstatttggagagaagatagaggcatacaactttgagtgcttatagaaaacactagtttcaatttgtactrcatgtcacctactgacccgtattgccctcagtatgaaatgtgttgttgcagtgatctctagctgcttttttgttgtcgttgcttttgaaccccaagttaagtatgatgaaaaccttccaaatctgcctagattactgccaagaaagagatgggtgcatactgatcccatgccaggcaaatgaaaaactggcaacatcctgggatgagctctcctgctgccagtttagtttttgcttacatgtggccaatggttgtcaacactcatgatgagggggtataagcatgagcttgtcacctcaaaggctaggttaccagatttagcattgtttaaagaagtaacaagaaacactaaaagtttaacatctgacatggttgaatgtggctactcaaacaataatttaaaagaattagcagttcaaaaaagtgattcctgacaaattatatgaaggaaagctaactaaaagtgccatctgttatgattaaaactaggtaaaatgtatacatgtatacaaacagaacacaaaataatacaggaaaactaatgaaggtgatttcttggagtgatggacatctggatgatttttactaattcctgttgatgttataatgttatgggtataacaaatttaaagtaaccaaaattggtggatttacagcaagtgatggttttttgcttgaaatacaataaaaacgtcttaacctaaaccattctcataatcattgaatcagagtggcccaagtccagattcttgtaagctaagcagttatgtaggatgatagagtggtgaggccccacatcccaggacaaaaaccaaaacagctcagatatggtaataggattgcttaagtggggtttttttctccataaagaaaggctaatagctaaactccagagctgagctgttgaagagttacatgagtaactctagccttgtggctagttagaaagagaaaaaaatatatgtcaatttcatctgggaaaccatccataaagataaacaataggaatggtctagtgatgacaaattgtgcatagcaaattgaccagaaaaaagtcaaatttttccttgggagcagatgagtctaacgtattggaaatatacatgttctgcaaaagcaattagatctggagtccttgaaaggaggccaactcagctagaaagcaggaagtttcacttccctagacttaatgatgtagatgaaaatatggatactctatgtctgtctgtttacaatgagcagttgttttgagtattaaactctaagaagacatggcaataacttctgtaaatcataaagcctctagcttagatttagacagctttaacaaacagcaaggtacattaaaatttttggatctaaattaatctagtggtgaaaggcacaaattttggagtcatgtagatttgggcttgaattccactttttcctatctgcatgatctcgggtaacttgcttaaactctctgagtatgtttcctcatctataaaacaaagataaggatagtctcttagagaccattgggttgtactgaatgtattcagtagatgaccttatctattcaaggtaatttaagaagaaaggagaaataattgtaaagatacagggtgccttatgaacccccaaggacatgaaatgcggtaggcctcagaaacaagtcaatctaggaattgaaacataggcatcagtgagtactgagtgagtttgtcttagagccaaatggtcttttgtctctacatcgttttttattcgctctaaagacttacaaatggatcaaatatagcctattacagcatttattggttttaatattttatatatccagctgcaaattcctacagatatraatttgattagcacagtttacttgatatcaggtgtcaacctctggtctagtcaactgtgacctggtggatcagggtcttgtcatatgaaggtctaccccttcctggaatgtgatgataaggtgggaataaagaaaaagtgatacccatctctaaattgaaacttgacttgctaggaacagtatgaggatcaaatgagataatgtatgtgaagcatctagaatagtgtctacctgatacatagctctaaaatagtctgtgaaataacggggctgatggacaaaggccaaaaaatctcattggcttaatctttgaaaccatattttgctgcacctgtcatcagagaaagaagctcatagaaacattagtcatgtcatacctatgaacaattattttcttgtccaaagtggtcactctgagaaggaggcgtaccagcagctgatgtgctcaggttctccaacctggagaatgcttacatctgcatcagaggcaagacagggcacaaatgaaagctccttgctttaacattgaaattttatttactctttttcttttttttttttttttttttgatatggagtctttcactgttgcccaggctggagtgcagtggcatgatcttggctcactgcaacctcygcctcccgggttcaagcaatcctcctgcctcaractcccgagtagctgarattacaagtgtgtgccaccactcctggctaatttttgtatttttagttgagactgggtctcaccatgttggccaggctgatcctgaactcttgacctcaaatgatccaccctcctcagccttccaaactgttgggattacaggcgtgagccaccacgcccagcctgaaatattactcttaacaagcacctctgctctggctatgaraaagtatctctcccaggcaraaagaagcaggcagtctcccaatggacaagcttagctaaaacgcatgctactaccgaagataggcagtttcaatcctgcttgaattggactgtcagtttttagattttaaatatcctctttaagtaatgaaattttataaaatgggtataatgcagcttttctgctgcatctgcagcagttgtggtgtttagaggtggtgctgtctataaaagcaaaattatctcaataaacctaagttctataattgatattgtaggtaactttttgaaaaaattaaaaaattcactcacactgagtagtttctcttttgttgatytgaatttattaatgtaccaaattttaaaaatgtcttctcttgcttaactgtcaagttttaagaacaaaaatataaaagcaaaaaagttagcttctctctgaaatgtttttaagtgatatacttgtgggagacattacctaatatatttccttcttttctcacttgcagctttccagtctttaccctttgggtctaagttctactttagtctaaaatcaatatttattttagaagcaagggcaccaatgcagttgtcaggaaatgtctcatagaaaaccatgatgcacaggttctgaggggaaatgtaccttcttgcatatgttagtgaattggctatggcaacttatggttataggctggagaatttggggaagaaacccagtcttccgcctggtttagaataatatcaggcatctgtattcttccttctgggatccagtccgctttggtacagacttcctgaaattgccccagatgagcttgataagactgtacctagagggccctccctgcgggggagtaaagataactatggtttcatggtggatgcatcaagtctcactgaggtctcagaattgcatgggcattgtggatatggacatcagaagtgctcctgttaaacggttagggttgggtcaagagagagtgaaggtaatggctttactgcagatactggaggagcctgctctgggccttgcataagaggcccactgttttatcaatgcaaccatctttcctgagcctcacccatgtatccagctacctttcagacttttccatctggaaaatccacaggcatcagcatgtccaaaaattggacttatggtttttcctaccaaaaccacgcgtcttccattggtgaatggggcttcagccttcatccacttaccaagaccggaaagcccagagttattcttagcaattcctctcacagttgtcttgtctccacatgcagtttctttctctctctctttcttttttctttctctctctctctctccgtcccttccccttccttctttcttctttctttttttttgagacagattctcactctgtcacccaggctggagtgcaatggcaccaccttggctcaccgcaacctccacctcccgggttcaagcgattctcccgcctcagcctcccgagtagctgggattacagctgcccaccacaatgccaggctaatttttgtatttttagtataaacggggtttcaccatgttggccaggctggtcatgaactcctgatcttaagtgatccaccagcgttggcctcccaaagtgcagggattagaggcatgagccactgcatccagcctgcagtttcattaggacatgtcaattctacctcctagtaaatttttgactttgtaatttgcagtattcttgggctacctttaaagtccacctattacagtattttttttctgtctcaatttaagtcatggttagtttcctgaaagtgggtcatttaaaaaatagacacattagttttccataggaaaacacagcattttgaagtatatgttcaagtagttaaaataaaatagccatatagtacttagtaatgtaaataataaaaacaatttatagaaaaataaatatatgaagttgtttaatgagaaacaatgttaatgatagtgcccawaccagccactgatttaagctgagatctcctcaaaccttaatgtgcytccaaatcactgtcaatcttgttaaaatgcagattctgattcacttggcctggggtagggcctgagattctgtatttctgacaggggtcaatgatgctgatgatgctgctgatggttagaagaccatattttcaatcgcaaggccctagccttacaactcgcacttatgctaaatgtatctcaaggaagtcttgcccccagactatctttgtcttactggggaaagtttcaaatctgtctctttttctttagtatagggaacactgctctgatgccttgggtctggtgaagcagcacctcagagagatgacacattcacatttttcattgtaggtgacaacctttatttttatagcagaggtaaaagcttcaatttgcatgaatcccagtgacattaagtgacattttacagacatgtaaactcttgagaggtttaaaaaaaacaacactctagaaattcgtgtgtttacagggaatgaaccttaaaacacctcaatagcaactgagaaatcactttgcagcgtgcttagccactctcagcatgtgaacttttattgccagcaaaagacccccaaaatgtcagatgatatgaatcatgttatcctgaaaacagcacatgaatatttttcccagaataattgtgaaatttttcattactttattctgaaaatacagagatattctaaaagttgtaaaaatttgttattttcctaagagaaaatctttttaattgacacatactaattgtatatatttatggggtacatagtgatgtgatatatataatgtaaagtgattagataagtgtaattagcatattcatcatttcaaacatttaccatttctttgtgttgggaacattcartatcctttattagctattttgaacctatgtaacatagtattgttagccatagtcatcatacagtggtatagaacactagaacttattcctcctgtctagctctagatttataaaaatttttacacaagataatgcaatttatgtgttttcactttgctcttttttaacttaatggtctttggttttctcatgtactagcgtgtatatatgtgtgtgtgtgtgtkcatatgtgtgttagtttttagcatatgcagtaatacctacataatgcttattttcatacctttgtatgtattctgaaattgtatgtaaaattttttggcctgaggtagagagttcatatccattaaattaaaaaaaaacaattcgatacctgcattaaatttcactatattactaacattttttgaatgcttccggtatactagatataatattaactaccttatatgcattacttcattacatcctgaggcagtatttaatgtaggwtgatgtatagctaaggtacagaagtgagtcactgcttctagctgtcatagaaacccatcctgcctccatattcaactctgtggttccttacttgtcctagcatatacagtgacaaaaacaaaactttatttcttatgaaacacaattctataaagaacttattacttgttgcttatggcagaggtgaaaagaaagagaatgcagactaagaaaatcatttggataaattgaagtgaaatgtcatatttggcagtggtttagatgagcatcataataaccaacttcgtcattgcaaaagcacttcaatggtcattccagtttgagtgcaaaaactgctcaagtgaaacagaaagatacgatgaaaaattaatagtcatttaactgatggtatcaagacaggtacaggaaaggaatctctaagtggcaatggaaagttgtttgagagaaagccaggcccttctataaacacttccatggtcatcagatagggggtttgcaaggacaaatctcttgtgaagatcaaaggccagctgtaccagattgtttgaattgcttctcttctctctgtactctctggcactcacctagttcaagcttttttggcttctcgtctggactagaccagtagactctcatttggtctcactgacactaatctcactgctcacatccaccctaacccaactcatgttatgctggtaacagaatcatctttcaaaatgcagatctgactgtcattcctctacaaatccttcagtgaagctacatcaaacatagggtaaagtctaaacacctttttgtgcgttcaagttccccacagcctggctttgcttcccttttcactccctctaaccctaacccttaactctatgctccagaaataccttattacatccagttcctcaaatatactargctatttcatctcttatgggcatgtgctacccttttcatctggagtcactagaccaccatgggcatcatgagcacaggggcaatctgccttgcttcttagtctcagagcctagcacagcccttaggaggtgctctacaatgtatgttgaataaatgtccctttagttcttctcccacctcctgtgttactgctgaacctagcatatatctcagatgatgtgcttattacatcacatcgtgattatttatgctcctattttctcccactaggtagtttgtaatttgtaaatttgtaatttagcaaagagacaaataagaaattgtcttcaattccttatttgtctctttgctaaataagtattttgcatagggccaatatagagcccaatacttttttttttttttacataaattaagtatgtgactttttcttctattcatttatttattttgggataaatcctcaagctggcattcctcagtcaaaaggtataaacatatttttggtttataacacatattttcgggttgctcttagggttttatcttttaggggtgttattactttaggatgtcagcagccacacatgaatgcattttattttactaccatgtcactcatattggttatatcaacattcattttttaaaaattaatctaggaggattatgtgtgtggcaaatggtgtggcagattgtttcaagatatatctctgcagttcttgtaaactgcttacttctaaaagagaaaaaagtaatgtgtctgtttgttcagagtagcaggaagctctggggtctgctggattgtatccagaaattgtcttctccacttccactgtattggacttattttaaccattaaaagtcagttcctatgcatgtgtagaacaggtccctattccaaaataatctgaatattttttacataggaggtcaatctaggggataagttattcttcatttcaatgagtaawggaagcaaaaactcctctccacttttcctgatcttattaagcagttttccaaagatttctcatgctcattgatggcttctgactttggaacattttagcatgattaactgatgtttatctagtattaaagtcttctgggtctcatttcttcattgtcatcttctactttgtgagctctttggggcaaaaacatttctagttgaattaatctaacacacatgctgagaacatactttcgagtaactgaatgaggtcggagttcttacgaacagtctctgcagtgaagcctctcactgtttctttctgtaggaattttgtgcttgtaataaagtgcatagggggcggggtgggatgagagaagcgcagagaaggggtaaaggaagcgcatgtgttagctattccagctctcatcatactttctgtttggatagcatatcacgtttggctggggctgaaaaacaaaatcctatatttaatgagccaataaaatgcctggagcagcagggtcctggggatgcttgacttttcaccaagctaaaagccgataattgagcctgtgtgccagctgagacctggagatttctactgaaagagccctggcttttacatttttttccatctcctgtgcagccagcttctgatgaggcctcaggtctcagattctccrgagagttaactgctatcacctaaattattttgattaacccttaactctgagagtctcaatttactgacatgccacattaatactcttgtgtraatgtctgcaggggaaagtgataaaccaggtctaatgccaaggggctgagggtgagcctttgtaagacattttttttttaagcttgaaatagaattgtaacagtttccgctcagaaatacacaagggagaagaaaaggttagcaagaaagaccattttgtcttattctaaactaatctccccctcaagtgacaagtttaacagtgaggttgcttaagtggagatatattttaaaacacattgaagggagccctctcctttatcatatttttaaacagttttcgtagtctaatccttctaagaaaatgtttaaaaactaacaaaacataggctagttcaattaaatttgtggacttagaaggctagcattgtgatggcttttgagcttgatctagaatctggatcccaaggagggagatatgataaaagaatcaatcatatgcccatagccctctgaggttttgatagatttttcaaggagtataaaatgaacttaaaaaattatcagattcatatgtcaggtttactgtgtagctgtgattgcacatcccccaattttaaaaacaataggcaatgtatttgaagatggttcattacaagttgggtaggtatatgacattatgggctagagcagctatgtcaatcttttgccatttcatttgcaaagaggtcttatgccactttattcttctttcattttaaaacatctctaaagcatgtagtatagttacgtagcattaaaagttgtgtttaaaataatttagtcaggaaattattcctcgctagccttcatttgcaaactatgtgtacacaagctggccagtttagcaactaactctaaagacttgttttctagagccagttttgtcttctgtcctctttggtcccttgtagtccctttcttctgtatcagtcgactctcatgtgagtgttgaaagtcaaaaaacgcgacgcaaaaaagctacgcaaggaggtgaatgataagagatgagtggcacctggaaaatccttctcggctacctctaactaaccaggattgaaggagtgtctaggctgttttatggattttctcaggtgctcttaattacatgttctcctccatgattgcaaaactttccccttaaattagcctctttttcmagaaggtagatataaaaaacgttttttctttgaggaagcaaaattttcattggcatcagttaaaaattaaactgaaatctatcaccactgaataaaacaaatcagtaatggttaatataatgtaattaatatagtcatgtattataaaataatttattaaagtgagttcctctcagagatttcctttaaaattaagaacagatatccttggcttagctttaagttttgaaatcaaacggcatgccccaacccgtccactatttcaatggttctcaaactgtggtgtgcacgaatcagactcagctgaattacattaaaacacaggtttttgggccttcctctggagttcctgattcagcaagtctgggatggggcaagagaatttgaatttccaaaaattctcaggtgtgaaaggaacaattctaaagatgcctcaccaaggaatcccatcccctggttatttaagcagcaatctagatgctgctgtggagggactttgcagagggaatcaatgttactaatcaactgaccataaaatagggagattagcccagattgccartgtaatccaatgagcccttgaaagcagacgaggcaaacaggagaggcgaggyggaaggagaggtcggagccatttggggcatgagaaacattcagtctgtccttgctagctttgaagagggaggaaggagctgtgagccaaggaatgtggttggcccctagaaactgagaatgacccccaatggctcaaagaaacagggaccttggtcctatatggaactggcttctgataccctgaatgatccaaagtggattcatccccagagcttctggaaagcagtgcagctctgctgaaaccttgattttggccttgtaaaaacactaagcagaaaaccaagctgggttcagacttctgatctacaaaaactgtgaggtaacaaatttgtgttatgttaagtcttacttaatttgtggtcatttgttacagcagcaatagaaaatcaatgtctggtaatgctgaggccgctggtcccagggttacaatttaagcatcactggcttattttttgagagttttgtattaccaatttaaacacttctgaaaaagttcagctattttcttagtgtcattctctgaaacagggcaaacaaaagtgaagagtgatattattttgaatgagatagtataagtaaaatatgtagaacagtacttagtccttgctgaatgttcaatagtagatataatttctaatagatatcacttatgaaaatgctccatgccgggtactgtgctgattatttaccatgaattttcccagttaattcttataataaccctatgaggtagatactgtcattcttcttgtttcacagatgtgcaaactaggactcaggaaacttgcccacaatcaggcaagtcagtaaaatggaggtaagatgtgaacctaggcagtatggctctgaatctaaactcttagttgctattaacttcttatacggttatttcatatctgcttatgcattcttatcttacttgccacttgagctacacatttctatatagtttcacaaaacaatacaatgtaagctatacaatttatttttttttttttagatggaggcttgctctgtcgcccaggctggagtgcaattccaggtggcagaggtgagcagaataacctgaaaagaatatcctccataaaagaattcaaactgacagaactctaccacattttcaatgggtctgcagatcatggaaaggttttgtgtcagaggcatgggcatttagaaggtggcagagtctaaaggtgcaggcaaatgttggaagactgtgatgtcatctcttcctacaacccttcacattttcaataacattaccaaattcacaaaatcattgactggactttcatggaaaatgacatagtgaacgtcttcacgttggctggtgtaggctggattgtaatggtatcaacatgctaagattgacgatgattagaggtgaccataagaaaatggaattgggaagtcatagaagttatgtggtgaattcacatacacaaaaagtggcatattcagcactattcacaataacaaagataggggatcaacccaagtgtccatcaatagatgaatgratgaaggaaatgtgttatacacacaatgyaacactactcagccataaaaaatgaatgaggtgtcatttgcagcaacatggatggaactggagtggtgccatctcagctcactgcaacctctgcctcccaggttcaagcgattctgctgccccagccttccgagtagctgggactacaggtgcgcaccaccatgcccagctaatttctgtatttttagtagagacggggtttcaccatattggtcaggctggtatcaaattcctgacctcgtggtccacccacctcggcctcccaaagtgctgggattayaggcgtgagccaccrtgcccagccaactatacaatttctttcttaaactttgctaacatggtaaagcatatttatcacttatccagtcaatatcttttaaacatatactgtatatcgggcatggtgctgggactgtgcttacaaacttgtgagtggtctctggtcctgttgaacttataactaaaattaggagctattaacatacttgacagagaaacactgtagagtcatttctagtaaaacagaaatagtacggcaatgctatcatcattatttggcacaattcttgtagtgctagcaccacaaccaaacttgccagatttaccaaataaaaatacaaggcacttagttaaacttgagtttcagatgaamaacaattttttagtaatagtactctaaagtattgcatagaaaaaactcatactaaaaacttatcagtttacctgagcaaacaatttttggtcctatttcatctggctaccctaaatgccactacagaaatggactacagctatctattatttgcaaataatcacctggaaaactattagtgccaataaaattaagttaaatggctggctataagatattaaagtcaatggtttttacatatactaactggttatacagtaggaaaaaataaataacaataaaaaatacagatgaaacttaccaataaacatgtaggataatatgaaaaagacatatgagggctatgaaaagattcttgcaagaatgtatgggaatatgctgtggattcaggcatcaatgcttttcaaattaaatggcatatttaatgcaatcccattgaagattctactggtattgagcttgggagtgagatgagggaatatttgcgaaatgactctaaaattttttggacaagtaaagtatgataatagcttgaagtctgcaaaagaggagtaaaaggggtgaagacatgggcagactgaatttggttcaggagagccaggtcttgataaacagaagtgggattttaagttcagcaactgtttgtataagccttttggaattgggatgtaagttccaagtataaagggttgtggtgtagcacagggaagccccagagtggacaggatagtgttgctgggccacaagcccctgccactggcatattgaggtgtaggcaaagaaagctacactgaggtatgaaacgtttgctcagctaccttacgtcaaccaaattggataactcaattaggaagaggggggtgcaggtgtactcttcctgccaattgatggcccacctgaatatctgcaaagatatgtcactatgcactcattttaaaggggagaagacatgacatcgagacaaaaatctcacaaagcaaaatatttttatatttgactttagaaaaataaaacacatacttaggttgaaaaaaagtcaatatctagcagacaaaatgccartatttctaatatagaaaaaaatgttaaattttgtacagaaaatacacaatagaaaaatcgatgtttacaaaaaaagctataggaatggccaaaaaacaaaaagttgtaaatacaacaagattctattgatttttttttcctaagcaatcagcctaataagggaggaggtagataatcccttatctgcaaaggataaaggacactgtaataaattgttggattttaaaatgtatgtcaagagctggaaagcacctgagatttttacattcctggcacagccaacaggttaggccataacagtttcatggatgcctgggccagagacaaaaactttattactcacaacaacagcaatagccagaatagcaacatcttcttaggccaatttcctaagcccaaagggacaaggtgactctttacctggaatatgctacaaggaaattattagaatagggtacaaacgtaagtgcacataggcataaatatatttgcattgcagcattatttagaatattaaaatttagaaatacatgtgtctttttaaatgatggtatatccatacaagagaatattaggaaaccattaaaatgatcatgtaggtctatattgacatgaatttaaatatctgaaatgtttatgggaaggtgttgtgaactgaatcatgtccatccaaaatttggtctagcccccaatgtgacataaacatttataaaaacaagattctattgttttaaaaactatcaggctgggcacgatggctcacacctataatcccagcactttgggaggccgaagcagtggatcaggagtttcagaccagcctggccaacatggtgacaccctrtctcgactaaaaatacaaaaaattagccaggtgtggtggcaggtgtctgtaatccctgctactcggaggctgaggcaggagaatcacttgaacctgggaggcggaggttgcagtaagccaagattgtgccattgcactccagcctgggcaacaagagcgaaactccatctcaacatttaaaaaaaaaactaaaactatcagtctgatgtgggaggaggtagagaatacttgatttgcaagggataatgggcacaatcataaattgttcgtgaaaatgtgcatcaagagctggaaagcacctgagatttttactgtatttggagacaaggcctttaagtaggtaattaaggttacatgaggtcaaaagcttggggccctgatctgataggatttgtatccttataagaggaagagagagacaccagaatattgactttctacagtaaacatatgtgtcttttatggtcaagcaaaaaaaaaataaagttttcattttagggaaaaaaggaagtgcctcttgaagctaacctcagtataactccatttttctttacctttctggtttgtcacatttcagctactgttakgattgttatgagatccagagataatttcttttttaatcatagttagtactttggagtaggtataaaagcaaaggcagtcttgcacatcctgttaaggcaaatttttttttttagttagtacacagagaaggcttgtgggttttgtttgttttttgtttgtttgcttgaaatggagtttcactcttgttgcccaggctggagtgcaatctcagctcactgcaacctctgcctcccaggttcaagctattctcctgcctcagcctcccaagtagctgggattacaggcatgccccaccacgcctggctaattttttgtatttattagagatggggtttcaccatgttggtctggctggtcttgaactcctgacctcaggtaatccacccgccttggccttctaaagttctgggattgcagacgcgagccactgtgcccagcccaaaggcttgtttttttatgagctgtatcactaaacatcctgccttattcaaaggaagtatttccattataattggtgttggcctaattatagcatcctaccatttccatgtaactttgatatattaatttcttttattttatcacatttataatagtccagttatgcatttgtggccctagttgttggcaaggaatgagacatgtaacctagatgtcacttgggatttcagtttcttgaaggtttaggtgacttgggctcaaattctcaatatgctaggttttcttgtggcatgtatagaatgcgcaatgattacgtcagggtatttgggatatctatcacttatttgtgttgtaaacatttcaagttctctcttctagagactgaaatatacagtatgttgttgctaactttagtcaccctgctctgcgatggaatgtcagaacttgcaccttctatctcattgtatgttgtactcattgaccaaactctcttcatcacccctcccacccatatatcctccccagaccctgatatctattaccctactttctacatccatgggatcaagtttgtaagctcccatatgagtaagaaaatgagaaatctgtctttctgtgcctggcttattacacttaataacccccagttccatccatgttgctgcaaatgacaactcattcgttttttatgkctgagtagtgttgcattgtgtgtatatataacacatttccttcattcattcattgatggacacttgggttgatcccctatctttgttattgtgaatagtgctgaatatgccactttttgtgtatgtgaattcaccacataacttctatgacttcccaattccattttcttatggtcacctctaatcatcgtcaatcttagcatgttgataccattacaatccagcctacaccagccaacgtgaagacgttcactatgtcattttccatgaaagtccagtcaatgattttgtgaatttggtaatgttattgaaaatgtgaagggttgtaggaagagatgacatcacagtcttccaacatttgcctgcacctttagactctgccaccttctaaatgcccatgcctctgacacaaaacccttccatgatctgcagacctgttgaaaatatggtagagttcatcagtttgacttattttacggaggataktcttttcaggttattctgctcacctctgccacctggaattatggagaatgtacatttttccattttgttgcactggtgataatgaaatgtaacattaccgaagctcatgccacaaatcagtgccaggggtgataggctcatttaacagatgtttattaggcatcctccgaatattcagtatgaagtactggagatacaaagataagacatagtcatgggagaaayattttaaaaagctttttccttttggaagaaatgttataaagttacagaaattaagaaggaaggcttttggagatcacctgtttcaacccttcatcattgtacagatgagaaaagtaagggataagatcatacaactggtggcagagctgggattgatacatgtgccttcagtctcagtctagttcattttcctggacatcatggaatatggaagatgtcgatcacattgaggatacaaataaggatacaaaagtgggctggagaaacaccaagggggaaaacgcaagatgtttacagagaagaaataaaacaagcagggcctcctactaagaaaaactaaaagaggacatgacaagtaacaagacagtggtgggttcatttgagtaggaatggttcaccagccaaatgaggcgtgatgcaaagacagcgaacataggtatgtgtgttagcaggtgggaaaagaagaaacatgaaatcagtgcttccccaagcttgataatgttccatcttgattgtacccaaaatttcttatgtcagtcttctcaatatgggccatgaaagtagaagttggtaatttttgagagattgagcatctttgtgagatttcttttactttttttctttctttttgagacagggtctcactcctgccacccagactgtagtgcagtggtgatcatggctcactgcagcctcggcttcctgarctcaggtgatcttctccctcagcctcacaagtagctggaactacaggtacatgccaccttgcctggctaatttttttgtatttttagtaaagatgaggtttcaccatgttgcccaggccggtcttgaactcctgggctcaagcaatctgcctgccttggcctcaaactcctgggctcaagcgatctgcctgccttggcctcaaactcctgggctcaagcgatctgcctgccttggcctcccaaagtgctgggactataggcatgagccaccatgcaggatttctaagggttgaaaaaatgaatggaatgatttaaaaaaaaaaaagacttcactttttctcaaaagatttgttggaatcacgggagtaggtgccagagcttcaactaataaagttaaatatgactgttaatccaggcactttagagacatgtatagtatatgatttatatggtccagaagtttcacaacactggaacgcttggaagtggtgatagggagaaattggaaatgtggttagacttttgtttactccctagtgcattaaaaatggggaacaccaattatgtgaaggatatttctacctctagttttgtagtagtttcattctcaattagtacacaagttgtccttatatgaattggtaacttgggccagttataatccaattttttaaaaaaagatttattgcttgtagggaataaaagcccacttaaagtagaatgcatacatttaggaatagaaaacaaagtagagcaaggtcatgcagaaactagaactggaaattcaaaaagttaagatgcttcctctgtcctttaagtctacgtgttttttttttcaactgctacataatatttgtacatgtttagagggcacatgtgatattttgatacatgcatagaaaacatcaagtgaggttatttattatattgaacacttttatgttggtaacatctcaaatcttctagatattttgaaatatacwatatattgttaactatagtcaccctactgtgctgtcgaacactagagcttacttttctatcttaacagtatgtttgtacccattaaccaacttctcttcatcccttcctcccaaccacacacccttccagcctctggtaactatcatcctactctctacttccataagatcaacttttggttcccacatatgagtgaatacatgcaatatttgttattctatgcctggctatttcacacaacataatgaccacmagttccatccatggtgctgcaaacgacaggatttcattttttattatggctaaataatattccattgtatatatgtgtgtgtgtgtgtgtgtgtgtgtgtgtatataacattttctttattcgtacatacattgatggacacttaggttgattccatattgttgctattgtgaatagtgctgcaaaaaacatgggagtgcaggtatccctttgagatactgatttttctttcctttcctttggttaaatccccagtagtgggatttctgggtcatatggtaggtggcttgtgtggtttgcagcagtggcagtagcaggccagcaaggccagtcccgaagttggtaggttgtgtgggtggtgatggtggcaccaggcagtggaatcctattctcaggcccccagatagtgtgcctgttcagaccgtggtggatggggaatcttgagtgcaggtggcaggtgttctggtcctgttgttaggtcctctgatggtccacatgtgagccagaagccacaggcagggcatgtcaactcctrggcccttgggacagtgttcttggatgccggtggcaggcaggctgggacttttgtccaatctgcatgttcatcagtgtttatcaatatctcctactaaacctaaatggtttcatcagcacatgcccattatggctgcatgacccaattccacatgctgctgcttccaattcttgtacccgtcatcatattttttatttagtctgccttacagctcaaattcttgagggagaatctggctcactgtgctcagtttacatcttcatttccttttataaagttgccactgttggtcaactcagtcgtgactacagaggaggagttataatcaaccctttgctggttttaagcccttttctccaagggaatatggtttgctgtttctaaggaaactccatgtgattggatctgtgatctaagttatctttttcaagcttgtagttttggataaaaaaactcatgatgctttctaattcattaagcatttctaagcagtcttttggtctgggattcagattcaggctctctttagtgagcacttaagaaatttagaatatgrgatctcacaagggaaggtgaaaaattgaaagcactggaaatgtgggactttttctccttaagctataaagagccacagtgctgcataatatacttaatgttgctgattctttaatgtggcaccaatttaaaagaaaatcagaatggattttttttattatactttaagttttagggtacatgtacacaacatgcaggtttgttacatgtatataaatgtgccatgttggtgtgctgcacccattaacttgtcatttaacattaggtacatctcctaatgctatccctcccccagacccccaccccacaacaggccccagtgtgtgatgttccccttcctgtgtccatgtgttctcattgttcaattcctatctatgagtgagaacatgcggtgtttggttttttgtccttgcgatagtttgctgagaatgatggtttccagcttcatccgtgtccctacgaaggrcatgaactcataattttttatggctgcatagtattccatggtgtatatgtgccacattttcttaatccagtctatctttgttggacatttgggttggttccaagtctttgctattgtgaatagtgccgcaataaacatacatgtgcatgtgtctttatagcagcatgatttataatcctttgggtatatacccagtaatgggatgactgggtcaaacggtatttctagttctagatccctgaggaatcgccacactgacttccacaatggttgaactagtttacagtcccaccaacagtgtgaaagtgttcctatttctccaaattctctccagcacctgttgtttcctgactttttaatgaccgccattctaactggtgtgagatggtatctcattgtggttttgatttgcatttctctgatggccagtgatggtgagcattttttcatgtgtctgttggctgcataaatgtcttcttttgagaagtgtctgttcatatcctttgcccactttttgatggggttgtttgtttttttcttgtaaatttgtttgagttcattgtagattctggatattagccctttgtcagatgagtaggttgcaaaaattttctctcattctgtaggttgcctgttcactctgatggtagtttcttttgctgtgcagaagctctttagtttaattagatcccatttgtcaattttggcttttgttgccattgcttttggtgttttagacatgaagtccttgcccatgcctatgtcctgaatggtattgcctaggttttcttctagggtttttatggttttaggtctaacatttaagtctttaatccatcttgaattaatttttttatgaggtgtaaggaagggatccagtttcagctttctccatatggctagccagttttcccagcaccatttattaaataaggaatcctttccccattgcttgtttttgtcasgttygtcaaagatcagatagttgtagatatgcggcattatttctgagcactctgttctgttccattggtctatatctccgttttggtaccagtaccatgctgttttggttactgtagccttgtagtatagtttgaggtcagctagtgtgatgcctccagctttgttcttttggcttaggattgacttggcratgcgggctcttttttgattccatatgaactttaaagtagttttttccaattctgtaaagaaagtcattggtagcttgatgggaatggcattgaatctrtaaattaccttgggcagtatggccattttcatgatattgatttttcctacctatgagcatggaatgttcttccatttgtttgtatcctctttttcttcattgagcagtggtttgtagttctccttgaagaggtccttcacatcccttgtaagttggattcctaggtattttattctctttgtagcaattgtgaatgggagttcactcatgatttagctctctgtttgtctgttattggtatataagaatgcttgtgatttttgcacattgattttgtatcctgagactttgctgaagttgcttatcagcttaaggagattttgggctaagacgatggggttttctagatatacaatcatgtcrtctgcaaacaggaacaatttgacttcctcttttcctaattgaatrccctttatttccttctcctgcctkattgccctggccagaacttccaacactatgttgaataggagtggtgagagagggcatccctgtcttgcccagcaccatttagtaaatagggaatcctttccctatttcttgtttttgtcaggtttgtcaaagatcagatagttgtagataagtggcattatttctgaggcctctgttctgttccattggtccatatctctattttggtaccagtaaatcatagatttttaaagaagtatgtatttgacatgacgcgcctcccaaataaaagctagtttgagaaggagatgaaatgaaataaaataggtctgtagtaggaggttgtgccaacttgggagtgggggtaggttttttccccttgtctataggtttagtaagtggtgaaatcagagaattccattttctcctttgtggagatgttagagtctaatgcaaggcatcatttgtgcctcttagtaatgtctgcaggatttgatgggtcatgatgaagcattttattgattacattatgagaaatggattcagaagtcatcaagacttttagttccaggatggttcctgtacatgcaatgacaggctggctgttcactgcagctaacactgagtactgtggcatgcccaattacagtcctggtgagagatcttcagggaggtaattgtggtttccttcattgccttcatgtggcctctgagtgaggagcctcacaattcctttcacagtctggagcagtaagtgcactaatgtagctaatggtaattttgacttctcttgtctactgaattgaatcaatgctccccaatctcttgaataaaacaatttcccacagatgccgagcagctgttgttgtccaaagatgctctgagaaggacaatcaggggctagaaactctgtttttcttcattaattgaaaacaaaactccctcctaggaaggggagagcaagaagaagtaaatgaaagagagagccagaaaggatggaggaatgtaaggaaggaggagtattgtaagcagcctgcctacagaggctgtattcgaagaccatccagctctcttgtgcatgctacaattgaaaatggttaatggagtactttgcatcaaatagatttcttaaagaggacataggagataagcattatggctattggaatttaatccatttgccaaaaagaacaaaagtgatcagagctgtctgggtggtttctgatatcttaactactgcttattatttgctctgctaataattttctgctttcacatgtagagcccctatgtgtagaggatgaggtagaagtagcatgagttgtataattttttaaaaaacatcttctatcaaaaaaagcttttgttttaccttatattctcctaattgtctcccttagtcattgcaagaggagggcaatgggcaacagtgccaaccagctgtgctggggaggtagctggtgggagactcagtgaaagatggtatgctcagacatccagtttagttacagtggactgataggtctgttattttgggaatttgatagtctaaaggtaatagtacatgatgtatttctactaaatttttccaactgtagctcatcttttacattttgaatcctcacagcaaaagagacatcttcaatgactaagtcctgagtgtttttatcccactcaaagagtagaataggctttcctgctgattctgccataatatatgggaaccactcctgtaatggaatcaacacctcttttgcattaaaataaaccacaatcccagttcctaacagtggaaatagaaaacagctggtgaaaacaaagtggtatgtgcaagccagctttgaggaattattcatattcattttcagaagcaaactttcctgcacttgtttttcttttattgcaatagagcaaaaatgtgtttaggagaaaggctgttatcttaaaagtatgaaaaacatttaagctacaccatcctagctgtgacaagttttggtgatgactgatgagcataatactgacaacttyatttcaagaacaaattgtcaacctagagtgtggaagacaaaattattggctctggatgagcaaaattattggttgtgtctctggaaggtgaaagtctttgagtgtaagagaaactggtcagatgcatatttttaagacaggattgttgtccatgttggttaaataacagggtactattgttttactgctgaactgtgaaatttaccatttttatcccctttgccatttgaattgactaagtgaactcctcccaaattgtcatctgcattggtacttagtaaggacatatttgccacatgtgtgtttgtgttatgggtaggaaggtagatacatatggccaaccaaccagatagtatatgataaaatgttgctagtgttaatggagaaagagcccttctggattccttaatgggtacttcaattcaaaatgaaagacagcaaggttagtgggaggtgggatgaagcctcaggaagtgggacagtcattactagagcggtgcatttaataacatggctggcaacagctttgtgccaagtcaattcacgtctgaatcacattggtgctgtgtgtatgtgtcagtctacacacactacatttctacactggatcccattcaactggtaagcagtttctgacaggcttcagaataaggggaaaaaagattagaacatcttgtgtacatctatataatgagttttcaaattcatatttgagaaattagcttgaatgccactgccaacatcaggtatatctaactccattactggaaggatttgaagacccttcccaattactgagctgttaacactgtgtgcatttttttaagactaagatgatactcttcagcctcctaggaatttctgggcatctrtagaaattcattgtctagtttttattctgggggtgtgattgcgattatggaaggcagacccagctgtgagtctaaattgaggaagtatttgttagaaatgtagagcttcaggatttccagtttgttctttatcaaactaaatctagttagctgtattgtaaaatgctgacccacaaatttttagtgacttccccatgcctacaagataaagtaaatgtcttagactggaatccaagaccttctacaatggggcctcactgatctttttcattatgttccaggccctttcacatactctgcaggcaagctgctccaatcgttacgtatgtcctgggccctaccctattgaaatctaagcctaaccttaactctgacactgacccttcctatttgagctccttaggatctagaccaaatatatctttagtgaaatctagtgggtctaaagtgtactcttactcctctgtrctcacagcagttattctctctctatactactaatttggcactgattatatgctgtcttttattgtcattcatgtatgtaaataatattttaagggctaactatgtggactatatagttgtataatggtaagtaagacatgtctgctttcttggacactagttaaaacagaaggatcagaaaagaacacaggttaaattccactagagagcagtgagtgttaagagcggggagcacagcaaggagagatgggaaagactccttactcattcttgcagtccagaaggtattccctgaagaagttacatttggcctgatacctgaaggaaggggaagagtcagccaggcccacaggcagatcttagatcttgcaaggaaataacggcaggatagcttattaaggaaatttagttagttccccctgtactactatgtttctccttattcagagaaggtgaactctactatgtgaggtggggatggcaagtgatgaggaagtacatttcatgaagaacgtcataggctatcccaaaggttttgaacattagcttagaaggagccattgaaggaatttaataaggacaagatcaaatttacatttcaaaaacatcacactggcttcagtgggaaaagataagttggataacaaaacggaataagttgcctgttctagtgtcttatctatttttagcatttgtcttagatttttcatttttaacaaattaataactctgtatttctggcttctaccaggatctctttttgtagcacttgagatgtttgtcagtgaacagaattctcacctgatcatgtggttaactctaaaaggcatcttcctttcaaggacaatatgcagggtgcttaccataaactagcccagtaggtaactatgtctgagccctttaagttttgggcagtggtgggagaagtatttgaaacttctctatctgatgtgccagccagttatgccagtctatgagacacaggaaaccatcatggtcagtaaaggttaaatgtacatgaaataatgagcaggaagtagcagttgggtggtctttctgtaaagcataaaaagagaaatctcaatatttactacagtgggtttgccatttattagagggtataagtctacaattatttacttagtttcattgtttgatggtgctcttttatttagcaaaaaatgctttcagcagccatgagtttaaatagtcaaaaacctatgttcaatgaagaattaagtagtgaattgtttcttgagaaagtagatggtgattggataacttgcataaaatgatatcactaaccaaatgaaaagtctgctgaaaaatctattacaaaatttaatatttataagaaaactgtgtaacaatttaatttgtacagatgcagaaagtgcatttccttattactccatgaaacatgactttgtattacagcaaataactactctgctcatcttcatttccaagttttctagtgaacttaccaagtgaagtgaaaattcttaatatattggctccattaatagaagaaaaattctgagtcaaatgataccagtttatgctggtattatcagatgctttaaataatagaaaccaattccaataatgttccctttttaaaaaatatataattcatggaaccaaagtaaactttttttggaagttcatttggttggcatcattgtgattgctattgcaaatttagtttaaaagttcaactttgtacaaggaattattttgtgataagagaaatacaaatttggtgaaggacaacaggcatggtataaaccattatttttatagtaaatttaagaaacttatggagctgaaatatatgtacttggattttcttgtggtgcatacatactttataaatgcaactgaacaagctgctattctaccaaataaatacatttttaatatattcagagtagctagaactctgaatatataaaaatcaatatgtaaacagtctatacgagttcacgatgctgataatgttaaatacacaaaactactttttcatggcacaattatttttttctcttctcatcaacaattggattttatttatttttattttattttattttattttattttattttattttattttttattattatactttaagttccagggtacatgtgcacaacatgcacagttgttacatatgtatacatgtgccatgttggtgtgctgcacccattaactcgtcatttacattaggtatatctcctaacgctatccctccctcctcccctaaccccacaacaggccctggtgtgtgatgttccccactctatgtccaagtgttctcattgttcaattcccacctatgagtgagaacatgtggtgtttggttttctgtccttgcaatactttgctgagaatgatggtttccagcttcatccatatccctacaaaggamatgaactcatccttttttatggctgtattccatggtgtatatgtgccacattttcttaatccatctatcattgatggacatttggattggttccaagtctttgctattgtgaatagtgccacaataaacatacatgtgcatgtgtctttatagcagcatgatttataatcctttgggtatatacccagtaatgggatggctgggtcaaatggtatttctagttctagatccttgaggaattgccacactgtcttccacaatggttgaactagtttacagtcccaccaacagtgtaaaagtgttcctatttctccacatcttctccggcacctgttgtttcctgactttttaatgatcgccattctaactggtgtgagatggtatctcattgtggttttgatttgcatttctctgatggccagtgatgatgaacattttttcatgtgtctgttggctgcataaatgtcttcttttgagaagtgtctgttcatgttcttcacccactttttgatggggttgtttgatttttttcttgtgaatttgtttaagttctttgtagattctggatattagccctttgtcagatgggtagattgtgaaaattttctcycattctgtaggttgcctgttcactctgatggtagtttcttttcctgtgcagaaactctttagtttgactagatcccatttgtctattttggtttttgtagaatttcctggtttttttatttttttttctttcttttcttttaattattattatactttaagttttagggtacatgtgtacaacgggcaggttagttacatatgtatagatgtgccatgctggtgtgctgcacccattaactcgtcatttagcattaggtatatctcctaatgctatccctcccccctacccccaccccacaacagtccccagagtgtgatgttccccttcctgtgtccatgtgttctcattgttcaattcccatctatgagtgagaacatgcagtgtttggttttttgtccttgtgatagtttactgagaatgatgatttccaatttcatccatgtccctacaaaggacatgaactcatcattttttatggctgcatagtattccatggtgtatatgtgccacattttcttaatccagtctatcattgttggacatttgggttggttccaagtctttgctattgtgaatagtgcctcaataaacatatgtgtgcatgtgtcttttagcagcatgatttatagtcctttgggtatatacccagtaatgggatggctgggtcaaatggtatttctagttctagatccctgaggaatcgccacactgacttccacaatggttgaactagttgacagtcccaccaacagtgtaaaagtgttcctatttctccacatcctctccagcacctgttgtttcctgacttttgaatgatcgccattctaactggtgtgagatggtatctcattgaggttttgatttgcatttctctgatggccagtgatgatgagcatttttttgtgtgtcttttggctgcataaatgtcttcttttgagaagtgtctgttcatatccttcacccactgtttgatggggttgtttgtttttttcttgtaaatttgtttgagttcattgtagattctggatattagccctttgtcagatgagtaggttgcaaaaattttcttccattttgttggttgcctgttcactctgatggtagtttcttttgctgtgcagaagctctttagtttaattagattccatttgtcaatcttggcttttgttgccattgcttttggtgttttagacatgaagtccttgcccatgcctatgtcctgaatggtattgcctaggttttcttctagggtttttatggttttaggtctaacatttaagtctttaatccatcttgaattaatttttgtataaggtgtraggaagggatccagtttcagctttmtacatatggctagccagttttcccagcaccatttattaaatagggaatcctttcccgattgcttgtttttctcaggtttgttaaagatcagatagttgtagatatacagcgttatttctgagrgctctgttctgttccattgatctatatctcygttttggtaccagtaccatgctgttttggttactgtagccttgtaatatagtttgaagtcaggtagcgtgatgcctccagctttgttcttttggcttaggattgacttggygatgtgggctcttttttggttccatatgaactttaaagtagttttttctaattctgtgaagaaagtcattggtagcttgatggggatggcattgaatctataaattaccttgggtagtatggccattttcacaatattgattcttcctatccatgagcatggaatgttcttccatttgtttgtatcatcttttatttcattgagcagtggtttgtagttctccttgaagaggtccttcacgtcccttgtgagttggattcctaggtattttattctctttgaagcaattgtgaatgggagttcactcatgatttggctctttgtctgttattggtgtataagaatgcgtgtgatttttgtacattgatttgtatcctgagactttgctgaagttgcttatcagcttaaggagattttgggctgagacaatggggttttctaratatacaatcatgtcatctgcaaacagggacaatttgacttcttcttttcctaattgaaaaccctttatttccttctgctgcctaattgccctggccagaacttccaacactatgttgaattttagacatgtccaagcctttggaggactctctgcaaatcagcctaagtggcctactgtggttttaaaattttgtggaaattccttggactgttttgtttaaaataagttgagaatttttaatgcaagtttttaataaatggaaacccaaaaaaattatttaacaaattatatttactgggggtgacaaaggaaagcttagaagtaggaagacattcaaatttatctctgcaatgtaagagaagaatggaaatacctaatgaggacttaagtcgtatgtaatatctaattctgaagttctaaattttgccttgcaatatttccattagtgggaataaccttttaatggagctcctgtttttacctggatgaatcagtattccatgctaagactgctaagacggaaggacgtgaaaagatttatgatatttagcatctaaatttgatgtagcattcagaaggatcataaatagaggcaaatttttgaacaaatttgttttgtaaaattatgtattgcagaaaagcactctaaagaatggcagaaagatagtatctgtgaaaatatttgacctgaaatacctataatttcaatatacaamattcaattttgatatgggcttaccagatactgtgaagagtgctttctcagctgggcatggtggttcacgcctgtaatcccagcactgggaggccgaggtgggcggattgcaaggtcaggggtttgaaaccagcctgggcaatatggtgaaaccccatctctactaaaaatacaaaagttatctaggcatggaggcgcacacctgtagtcccagctacttgggaggctgaggcaagagaatcgcttgaaccagggaggcggaggttgcagtgagccgagatcgtgccactgcactcccatctgggtgacagagcaagattctgtctctragtaaataaataataaataagagtgctctctcagtgaaacataatgcggacttcagggaagagtccattaaaggtgtaacaacttcaaattttttaaccgtaaaattcagctataaaaaaattcagataatttaatgaaaattttaattttttggggaaaataacattcacatagtgtaatttacagcaaagaaagtaaatattacacataaatatgtaccaagaataattattctaatataattttaaatttcagataatccatataaataaggatttttttttgctttcatgtacatgaacgttatttctggaaagaattttatttattgtggtaaaatatagcacaaaattgggcattttaaccattttaaagtgtrtatttcagcagtattaattacattcactatgttgtataaccatctccactatctacttccaatattcttttatcacccaaacagaaactctgtacccactaagcaataactctttacttccctctcaccccagcccctggaaatctctaatctgttttctgtgtctatgatcttgcctgtttttcttatttcatgtaagtggaattgtataggatttgtccttttgtgcctggctactttcatatagcataatgtttttgaggttcatccatgttgtagcaggtatcagaactttccttcttttttatgactgagtgatatttcattgtatacctagatacactggattttctttatctatgtatctgttgatgggtactggaactgtttccatcttttggctattgtaagtaatgctgcaaacaaacattggcatacaagtatctggttgagtccattttcattcctttgggtatgtacctaagagtaaaactgctagcccacataattttatagttaccttttttgaggagctgtgaaactgttttacacactagctgtgccattttactttctcaccagcaatgcacaggggtttcagtcttcaaatccttaccaacacttttttctttttctttttttctttttcttctttttttccttctctttctcttttctttttttctttccctttttctttttttatttccctttccctttcccttctttttcttcacaatcatggctcactgcagcctcaacctcccaagctcaagtgatcctcccacctcagcctcctgagtagcaaggactacaggcatgcaccaccacaccaagctaatttttctattttttgtagagacaggattttaccatgttttccaggatggtctcaaactcctgrgctcaagtgatccacctgcctcagccttccaaagtgccaggtttacaagtgtgagccaccatgcctggcctgttttttttttttaattaaaaaaactttgaaattatagccaccttggtaggtataaagtgagatctcattgtggttttgaggaattataaaagcagtttttgaatataactattttatcaatttaccaatataaaacagaatgaaaacttttcagtcaaatatttcaagatatccygtatcaattaaatgtaggtggaaggataaggagggaaaataataaaagtagagagactgaatgacaagtatagtccaggcaatagatggggatgtcctgaactgggggttggagaggtggttggcaatatgaggaaatgaatagattttaaaagtaaatatcaagagagacagctggtaagatgaatagactcaaagattgatatgggagataggaagaagaaagattgaggcacagtggtcacatttctggcttgagtaacaagggaaatggtgcagccatttactacaaaccccaaaaggagggaaggaagtgatgaggtgaaggtagataaagataagctgggcatgttgaatttgagatgtccatggggcattcagatgaagatgtttatccagcaagcagttggaactatcgcctgaagctcaggaaagaaacaggcatgaacatggaaagtttggatttatctcttttctgggttcttatttctataatgacaacaagctacttggaggcatttttcttaatccattttgcactgcaataaaggaatacctgagactgggtaattcataaaagaggtttatttggctcacagttgtgtaggctatacaagcattatatcctcatctactcagctgctggtgagtcctcaggaagcttttactcatggcagaaagtaaagggggagaaggtatgtcacatggcaagagaagggggagagagggggcagaggtgccaggctcctttaaacaaccagccaccactaagtgaactaaaagagcaagaactaacacattagcatggggktgtcaccaagccattcatgaaggatctgccctttgacccaaatgcctcccaccaggcccacctccaatactggggatcacatttcaacatgatatctggaggggacaaacatccaaaccatatgggcattttacatatttccttatttgtgattttcaggcatgcagcaattttaattgagaatcttccatatttggaccattgtactagatttaagaggaattagataaaagataaataaggtacagttgttgtctacagaatttataatttagtaaggacagaatttaaaaacacatacagaaatatagagataagtgaagtattataaggcatggagaaaagtataatctacacattctaaggagatcttagaaggatatctacacttaaaaggtactcctttgctgattgaaaatcagtcaaatcatggaggctgcataatttgagggacccagtgtaccatgaaaatttgaggcgtcttgttcaaaaagcaggaatatattrtccaataaggattcacataaacttcctttcttctgtggtctctcttgacttggcctggtgtgttctatttgctatttaatgttttaagttaaaaaaattaaaaatttattaacatgagttttaccattcatttatactgtgcagtgctagtttaaaattcaaatatcagagcatctaactcatatacagaaacactgaaattacacaatttgaatttggtggctcatccccttcaaagagtgcctaagataaacaccagattcagggaaactataaagaagaagataggatccttttctcttcacaggcgcttgggcatgacgatatttgaggaacaagtatagacactgggcatgaggatattctgtggacaagtacggaccttcatatttatctggggccatgacctgccatgcaggtcaggtaccaattcccaccagcagccaaactgcgagctgtgccttggttgggggtggggtttgggatggtcaagccaggcatatccccttcctatgggcacattccgcaacccatgaaagacaggagaaacccaaggatctttcagcttccatgtcactagaagattggttcttggatcagggatgagcgggtgagagacttcctcttctgagatacagactggtcagctgctcaccagatgcaccacagtgttgctagtgtggctgccatccagtgtacttgcctgaccccatcccatctctactccctgcaggggatggagggcagctgtggtaacagggagggaggagcctgggcagaccaggctaggttttaagccccacgtgcattaggtgtttgtcataatgctctccctccctttgcccaccaccccaccccccgacaggccctggtgtgtgatgttcccctccctgtgtccatgtgttctcattgttcaactctcacttatgagtgagaacatgcagtgtttggttttctgttcctgtgctagtttgctgagaatgatggcttccagcttcatccatgtccctgcaaagggaactcattcttctttatggctgcatagtgtaccatggtatatatgtgccacattttctaaatccagtatatcattgatgggcatttgggttggttccaagtttttgctattgtaaatagtgctgcaataaacgtgagcatgtgtctttatagtaggatgacttataatcctttgtaaatacccagtaatgggaytgctggctcaaatagtatttctggttctagatccttgaggaatcgccacactgtcttccacaatggttggactaatttacactcccaccgacagtgtaaaagcattcttatttttccatggcctcaccagcatctgttgtttccttattttttaatcaccattctaactggtgtgagatggtatctcattgtggttttaatttgcatttctctaatgactagtgatggtgagctttttttcatatatatgttggccacatatgccatcttttgagaagtgtctcttcatatcctttgtccactttttgatggggttgttttttttcttcctgtaaatttaagttctttgtagattctggatattagccctttgtcagatgagtagattgcaaaaattttctcccattctgtaggttgcctgttcactctgatgagggtttcttttgctgtgcagaagctctttggtttgattagatcccatttgtagatctgggcatttgttgcaattgcttttggtgttttagacatgaagtccttgcccatgcctatgtcctgaatgatattgcctaggttttcttctagaaactggacctcttctagtgtttttaaggttttgggttttacatttaggtctttaacccatcttgagttaatttttgtatagcatgtaaggaagaggtccagttttagttttctgcgtatagctagccagttttcccaacaccatttattaaatagggaatcgtttccctattgcttgtttttgtcaggtttgtcaaagatcagatggttgtagatgtgtggcattatttctgaggcgtctgttctgttccattggtctatacatctgttttggtaccagtaccatgctgttttggttactgtagctttgttgtacagtttgaagtcaggtaacctgaggcctccagctttgttctttttacttaggattgtcttggctatatcagttcttttttggttccatatgaaatttaaagtagttttttctttctctgtgaagaaagtcattggtagcttgatgggaattgcattgaatctataaattactttggtcagtatggccattttcacgatactgattcttcccatcaatgagcatggaatgtttttccatttttgtcctcttatttcgttgagcagtggtttgtagttctccctgaagaggtccttcacatcccttgtaagttgtattcctaggtattttattttctttgtagcaattatgaatgggagttcactcatgatttggctctgtgcttgtctattgttgatgtataggaatgcttgtacttgtgatttttgcacattgattttgtatcctgagactgctgaattttcttatcagctgaaggagtttttgggctgagatgatggcattttctaaatgtacaatcatgtcatctacaagcagacaatttgacttgctctcctctcttcctatttgaataaactttatttctttctcttgcctgattgccctggccasaacttccaatagcatgttgaatatgagtggtgagagagggcatccttgtcttgtgctggttttcaaggtgaatgcttccagcttttgcctattcagtatgatattggctatggatttgtcataaatagctattattattttgagatttgttccatcaatacctagtttattgagagtttttagcatgaaagggtgttgaattttatcgaaggctttttctgcatctattgagataatcacgtggtttttatcattggttctgtttatgtgatggattatatttattgatttgtatatgttgaaccagcgttgcatcccagggatgaagctgacttgattgtggtggataagctttttgatgtggcgctggattyggtttgctagtattttattgaggatttttgcattgatgttcatcagggatattggcctgaaattttccttttttgttgtgtctctgcctggttttggtatcaggatgatgctggcctcgttaaatgagttagggaggagtccttatttttctattcattggaatagtttcagaaggaatgataccagctcctctttataactctggtagaatttgactgtgaatccatgtggtcctgggcttttttttggttggtaggctattagttactgcctcaatttcagaacttattattggtctattcagggacttgtaagtctagactaatctttttatctggttctgattatgctttgatgtggtggaatgccagacgggaaggtgtaggaggctttatttggcattggaaaagaaatatctaaaataagagccacttttactatgtgttggcattcaaatacatcatatcatttaattctattaatctgcaagatagctattacaatatttttcagactgaggacattaaggcttagaaaggttaaattgttcaagttcagacatggcagaaccagagtttgaacccaggcctgactgcagagtgactgctttgcctttgatattaggctcttgtccttatgcagcaggctatatagtctctcgcctgagtctcaagaagactgtaagtgacattttttttccaggggttctaatcaccaaaacagagtagcaagtatgagggtgggggatgcgaaggatgaggggagagaaagaggaataggaatagttcctttccctgctccaaagttttaaacgttctaacttactagtagagaaaggaaaatagttctgttcttccgtctctccttcccttgttccctcattaatcctggaaggcataactgatataatgagtccatgtgtatgagatagaggaggatttttcttgcctagcccagcttttccctactgattttcagatgtcaatgccgtacacactggattgtgagggcaagcttttttttttttttttccctaggctaagtctcttaaaactctgaggtagtgggggtggttccaagatggctgaataggaacagctccagtttacagctcccagcatgagcgatgccgaagacgggtgatttctgcatttccaactgaggtaccgggttcatctcacaggggcttgtcagacagtaggggcaggaaagtgggtgtagcccacccagcgagagctgaagcaggggtaggcatcgcctcacccaggaagtgcaaggggtcagggaattcccattcctagccaagggaagctgtgacggacagcacctggaaaatcgggtcactcctaccctaatactgcacttttccaaaggtattagccaatggcacaccaggcgattatatcctgcacctggctcagagggtcccacaccaacagagcctcactcattgctagcacagcagtctgagattgaactgcaaggtggcagtgaggctggggaaggggcgcccgtcattgctgaggcttgagtagggaaacaaagcagccaggaagctcgaactgggtggagcccaccacagctcaacgaggcctgcctgcctctatagactccacctttgggggcagggcatagtcaaacaaaaggcagcagaaacctctgcagacttaaatgtccctgtctgacagctgtgaagagagtagtggttctcccagcacggagtttgagatctgagaatggacagactgcctcctcaagtgtgtccgtgacccccgagtagcttaactgggaggcaccctccagtaagggcagactgacacctcacatggccgggtaccccactgagatgaagcttccagaggaacgatcagacagcaacatttgctgttcagcaatattcgctgttctgcagcctctgcagctgatacccaggcaaacaggatctggagtggacctccagcaaactccaacagacctgcagctgagggtcctgactgttagaaggaaaactaacaaacagaaaggacatccacaccaaaaccccatctgtacatcactatcatcaaagaccaaaggtagataaaaccacaaagatggggagaaaacagagcagaaaaactgaaaattctaaaaatctgagcacctctcccacttcaaaggagtgcagcagcccctcaccagcaacagaacaaagctggatggagaatgactttgacgagttgagagaagaaggcttcagatgatcaaatttctcygagctaaaggaggaagttcgaacccatcacaaagaagctaaaaatcttaaaaaagattagatgactggctaactagaataaccagtgtagagaagtccttaaatgacctgatggagctgaaaaccatggcacaagaactacgtgatgaatgcacaagcttcagtagctgattcgatcaactggaagraaaggtatcagtgattgaagatcaaatgaatgaaatgaagtgagaagagaagtttagagaaaaaagagtaaaaacaaaaaaacaaagcctccaagaaatatgggactatgtgaaaagaccaaatctacgtctgattggtgtacctgaaagtgacagggagaatggaaccaagttggaaaacactctgcaggatattatccagtagaacttccccaatctagcaaggcaggccaacattcaaattcaggaactacagagaatgccacaaacacacttctcgagaagagcaactccaagacacataattgtcagattcaccaaagttgaaatgaaggaaaaaatattaagggcagtcagagataaaggtcgagttacccacaaagggaagcccatcagactaacagcggatctctcgacagaaactctacaatccaggagagagtgggggctgatattcaacattcttaaaagaattttcaacccagaatttcatatccagcccaactaagcttcataagcgaaggagaaataaaatcctttacagacaagcaaatgctgagagattttgtcaccaccaggcctgccctaaaagaagtcttgaaggaagcactaaacatggaaaggaaaaaccggtaccaaccactgcaaaagcatgccaaattgtaaagaccatcgatgctatgaagaaactgcatcaactaatgggcaaaataatcagctaacatcataatgataggatcaaattcacacataacratattaacctgaaatgtaaatgggctaaatgatccaattaaaagacacagagtggaaaattggataaagagtcaagacccatcagtgtgctgtattcaggagacccatctcacttggagaaacacacataggctcaaaataaagggatggaggaagatctaacaagccaatggaaaacaaaaaaaggcagggcttgcaattctagtctctgatagaacagactttaagccaacaaagatcaaaggagacaaagaaggccattacataatggtaaagggatcaattcaacaaaaagagctaactatcctaaatatatatacacccaatacaggagcacccagattcataaagcaagtccttagagacctacaaagagacttagactcccacacattaataatgggagactttaacaccccactgtcaacattagacagatcaacgagacaggaagttaacaaggatatccaggaattgaactcagctctgcaccaagtgcacctaatagacatctacagaactctccaccctaaatcaacagaacatacattcttctcagcacatcacacttattctaaaattgaccacatagttggaagtaaagcagtccttagcaaatgtaaaagaacagaaattacaacaaactgtctctcagaccacagtgcaatyaaactagaactcagaattaagaaactcactcaaaactgctcaactacatggaaacagaacaacctgctcctgaatgactactgggtacataatgaaatgaaggcagaaacaaagatgttctttgaaaccaatgagaacaaagacacaacataccagaatctctgggacacatttaaagcagtgtgtagagagaaatttatagcactaaatgcccacaagagaaagcaggaaagatctaaaattgacaccctaacatcacaattgaaagaactagagaagcaagagcaaacacattcaaaagctagcagaagggaagagataactaagatcagagtagaactgaaggagacagagacacaaaaaccccttcaaaaaaatcaaatcaatgaatctaggagttggttttttgaaaagatcaacaaaattgatagaccactagtgagactaataaagaagaaaaaagagaagaatcaaatagatgcaataaaaaatgataaaggggatatcaccaccaatcccacagaaatacaaactaccatcagaggatattataaatacctctatgcaaataaactagaaaatctagaagaaatggataaattcctggacacatacaccctcccaagactaaaccaggaagaagctgaatccctgaatagacaaataacagactctgaaattgaggcaataattaatagcctacaaaccaaaaaaaagtccaggaccagatggattcacagccgaattctaccagaggtacaaggaagagctggtaccattccttctgaaactattccaattaacagaaaaagaggaatcctccctaactcattttatgaggccagcatcatcctgatasgaaagccttgcagagacacaacagcaaaagagaattttagaccaatatccctgatgaacattgatgcaaaaatcctcaataaaacactggcaaaccgaatccagcagcacatcaaaaagcttatccactatgatcaagtgggcttcatccctgggatgcaaggctggttcaacatacacgaattaataagtgtaatccagcatataaacagaaccaaagacaaaaaccacatgattatctcaatagatgcagaaaaggcctttgacaaaattcaacagcccttcatgctaaaaactctcaataaattaggtattgatgggatgtacstcaaaataataagagctatttatgacaaacccacagccaatatcatactgaatgggcaaaaactggaagcatcccctttgaaaactggcacaagacagggatgccctctctcaccattcctattcaacgtagtgttggaagttctggccagggcaatcaggcaggagaaggaaataaagggttttcaattaggaaaagaggaagtcaaattgtccctgtttgcagatgacatgattgtatatttaggaaaccccatcatctcagcccaaaatctccttaagctgataagcaacttcmgcaaagtctcaggatacaaaattaatgtgcaaaaatcatgagcattcctgtacaccaataacagacaaacacagagccaaatcatgagtgaactcccattcacaattgctacaaagagaataaaatacctaggaatccaacttamaagggatgtgaaggacctcttcaaggagaactacaaaccactgctcaactaaataaaagaggacacaaacaaatggaagaacattccatgctcatggataggaagaatcaatatcatgaaaatggccatactacccaaggtaatttatagattcaatgccatccccatcaagctaccaatgactttcttcacagaattrgaaaaaactactttaaagttcatatggaaccaaaaaagagcccgcatcgccaagtcaatcctaagccaaaagaacaaagctggaggcatcacactacctgacttcaaactatactgcaaggctacagtaaccaaaacaacatggtactggtaccaaaacagagatatagatcaatggaacagaacagagccctcagaaataatgccgcatatctacaactatctgatctttgacaaacctgagaaaaacaagcaatggggaaaggattccctatttaataaatggtgctgggaaaactggctagccatatgtagaaagctgaaactggatcccttccttacaccttatacaaaaatcaattcaagatggattaaagatttaaacgttagacctaaaaccataaaaaccctagaagaaaacctaggcattaccattcaggacataggcgtgggcaaggacttcatgtccaaaacaccaaaagcaatggcaacaaaagccaaaattgacaaatgggatctaattaaactaaagagcttctgcacagcaaaagaaactaccatcagagtgaacaggcaacctacaacatgggagaaaattttcgcaacctactcatctgacaaagggctaatatccagaatctacaatgaactcaaacaaatttacaagaaaaaaacaaacaaccccatcaaaaagtgggcaaaggacatgaacagacacttctcaaaagaagacatttatgcagccaaaaaacacatgaaaaaatgctcatcatcactggccatcagagaaatgcaaatcgaaaccactatgagatatcatctcacaccagttagaatggcaatcattaaaaagtcaggaaacaacaggtgctggagaggatgtggagaaataggaacacttttacactgttggtgggactgtcaactagttcaaccattgtggaagtcagtgtggcgattcctcagggatctagaactagaaataccatttgacccagccatcccattactgggtatatacccaaaggactataaatcatgctgctataaagacacatgcacacgtatgtttattgcggcattattcacaatagcaaagacttggaaccaacccaaatgtccaacaatgatagactggattaagaaaatgtggcacatatacaccatggaatactatgcagccataaaaaatgatgagttcatgtcctttgtagggacatggatgaaattggaaaccatcattctaagtaaactatcgcaagaacaaaaaaccaaacaccgcatattctcacgcataggtaggaattgaacaatgagatcacatggacacaggaaggggaatatcacactctggggactgtggtggggtcgggggaggggggagggatagcactgggagatatacctaatgctagatgacacgttagtgggtgcagcgcaccagcatggcacatgtatacatatgtaactaacctgcacaatgtgcacatgtaccctaaaacttaaagtataataaaaaaaaaaaaattaaaaaaaaatgcagtaaaaacaaagaggcattaggctcaaagcagcatgaaatttgccctctgttagtcatccaaatcctgctgatggtcccacaagggtctttgctcaagacagggtagtactatgagaaggtagtgctatgagaaggacctctgggctgcccttggctgtcccagcccagcttgaccttgatgcctgcaaacacctgctttgattggagttgtcttgttactgagtgggtccagctttccagcgctttccaatttacaaactggaaattcctgcggtgaaagatgtaaaaattgtttttaaatattaaatataaaagattaaatatgcaaaaaaaacctgaggtaggtggaaccctgccacttttgagaccttccgagaatactgatgacacccttgagaagagtaaataactgagaggagcatcaactttgaggaaacacacatctcatctttcttcctccttcagtctcgcccacaaccagttcccccaccatacctgctttgaccccatttccaggataggtagtactctcttgagtcattctttctgtttccagctggctcacattaatagtgacgcagaaaagctgaacggccctcttttctctgaaagagctcatggttagatttagcaagaggcttctgctctttctgtccttccattggagagtgtcacgtgtcattctgtacagccctggggttttcccctcttctaaaattctagttatgaatggttatcataagtgtgagtgactcaccactctttaatataccaaggcataggcaaggctgtgtgacagcagtggctggcatgtgcttgcagccagacacacacccacctacacccacactgttttgcttttgtccttcaaggttggaagtgctgaacagagcagaatcccaggtattgtagcatcatggcataatgttttccactgaggcttttccgagtcagaagtggacaacctaattaggggggttttaatgtgtatgtgacatatactcaccatcctaagctgtgtcattggaactgaggatgtttttgacttttccttcccactctctttctcactgacccagacccctttctgtggaacagagaaatggtaggcagtgtatcttagccatttattaacggggcccagacatgatccccaggactttgctgacaggtctaaataaggctaatctacatgttgccaccaggagctctattaaaaaattggacagctgrgggaaaggctggcctactgggcttttcactgttctgactgggcagcccaacatcctattgccctgatagaatagaactcctcatatctgccttgctttctaccaggctctggagccacttattagctctgttttaagaaaattattgatattctgtgtctcagttttctcaagcatgaaatggagataaaaattgtacttcccttaaattgtggttataaggattaaaagaataaatacatgtaaaatgctgaaatcaatatttagcccacagtactcttaaatgttagtgattagtaatatccatagcaagcctcttgcttcaagccctcttgggaacttcctaagctgcaaatatgtgagtaatatcacagcctgtatggcagatgaaagcataatctttggaaagttgtgtgccttgacctgaaaatacttggactgaccatcactgycatcgcaaaccataagcaactgagcacttattgaatatgattttctcaacctgcagctatacttgaagtctgtaggggctgaaacttaccgttatttccaacgctgtttgtagttctaccacaaagcctggcctgttgtagatgcttaattgagttagcattgaggggcatcattttgaatctttatcatgaaaaggacacttttgcttggctgaacctacattgacacataattatgcagagcccacagtttacacatgggtttgctcgatttgtacattctatggatttaaacaaatatatacctgtatccaccattacagtgtcataccaagtagtttcactgccctaaaaatcttctgtgccctatttgtttcctcacctctaactctgacaatcactgatgtaatcgttttctatttctgtaaaattggtagtaatatcctctttcatttctgattttagttacttgagctttttttyttagtcattctagctaaacattttgttgatcttttctaagagcttacttttggtttaatttttttgtttttttttttttgtatcctgtattgtatctttgttgtaatctttccttccttcttctggctgtgggtttagttttttctttttttagttcctaaaagtgtaaagtacattgttaatttgacatccttctttttaatgtaagcatttacagctatacatttttctcttgggtctgatttctgtacatgccataagtgtcggggggttgtgttttcatttctctcaaaatattttccagtttctctatagtttcttctttaacccattggctgtttgagtatattgtttaatttcaatgtgtgtgaattttccagttttccttctgctactcatttctagtttcattccattataattgtaagggatactttgtatgatatcaaccttttaacatttgttaagacttttttgttaataaatgtttaacatttattaagacttttttgttaagcttcagttgcttaacatttctattctgaagaatgttctatgtacaccagaaaaaagttgactttgtctaatataaatatggtcatccttgctctcttttggttgctgtttgcatggattaccttttctcattatttcacactcaatctgtgtgtattcttagctctaaaatgaatctcataaaattgtatcctgctttccttaatcagttttgccaatctatgtcctttgattggaaaatttaatccatttacacttaatgtagttattcattggtgaggacttacttttgctattttatttggttgctgtatacattctagctttttcttcctctttttctccattactgccttagttgatttcttatcatgacaagttttgattcccttctcatttccttttgtgtacattttgtatattctttatggtcaccatagggactacatataatattctaaagttttaacaatcttttttgaatttataccacttcagcttcaattgcttacaaaaaatcctgttctttcttctccttcactttattgatgtcaccgattacatctttatacattatatgcctataaccacagatttataactatttttatgcatttgtcttttaaatcatgtagaaaattaaaagtagaatgagaaaccaagtttataaaamtattgatttttatatttgcccatgtgtttactttctccagagatatttatatattcataaaactttgagttactgtctaattttttttacttcattgcaaaggactccctctagtatttcttgctgggcagatctagtggttataaactccctcagttttttgtttttctgggaatgtctttactcctccctcattttaaaggcatggttttgccaaatatagaattcttatctgagttttatctttcagcactttaaatatatcattccagtgccttctagccttcaaagtttctgctgagaaattggctaataatcatattgggactcccttgtacataataaatattttmttgggtttatcataattgatttttcaagcttattggatgtatatttgtgtctttcatcaagtttagaaagtttctggccattatttcttcaaagaaagtctctgaccacccacatttcagagactccatacagcttatattgttcagcttgatggtatcccataaattccttaggctctgtatacttttcttgtcttttgttctgtttttagacttgataattttaaatgttgtatcttcaagttcactgtttctttcttctgctggctcaaatctgatgttgaacctgaatagtgactttttaaaaaaaatattatactttaagttctgggatacattgcagaacctgcaggtatgttacataggtatacatgtgccacggtagtttgctgcacccatcaaccatcatcatctgtatttctcctaatgctatccatcccctagccccccaccccccaacaggccctggtgtgtgatgttcccctccatgtatcatgtgttctcgttgttcaactcccacttatgagtgagaatatgcggtgtttggttttctgttcttgttagtttgctgagaatgatggtttccagcttcatccatgtcctgcaaaggacatgaactcattcttttttatggctgcatagtattccatggtgtatatatgccacattttctttatccagtctatccttgatgggcatttgggtttgttccaagtctttgctattgtgaatagggctgcaataaacatgtgtgtatgtgtctttatagtagaatgatttataatcttttggtgtatatacccagtaatgggaatgccaggacaaatggtatatctggttctagatccttgaggaatcaccacactgtcttccacaatggttgaactaatttacactcccaccaacagtgtaaaaacatttctatttctccacatcctctccagcatatattgtttcctgactttttaatgattgccattctaactggcatgagatggtatctcattatggttttgatttgcatttctctaatgaccagtgatgatgaactttttttcatatgtttgttggccgcataaatgttgtcttttgagaagtgtctgttcatatccttcgcccactttttgatgtggttgtttgtctttttcttgtaaaattaagttccttgtagattctggatattagccctttatcagatggatagattgcaaaaattttctcccattctgtrggttgcctgttcaccctgatgagagtttcttttgctgtgcagaagcttttcagtttaattagatctcatttgtcaattttggcttttgttgccattgcttttgctgttttagtcatgaagtctttacccgtgcctatgtcctgaatggtattgcctaggttgtcttctagggtttttatggttttaggtttacgtttaagtctttaatccatcttgagctaatttttatataaggtgtaaggaaggggtccagtttcagttttcttcatatggctagccagttttctcaacaccatttattaaatagggaatcctttccccattgcttctttttgtcaggctgtcaaacatcagatggttgtagatgtgtggcattatttckgaggcctctgttctgttccattggtctatatatctgttttggtaccagtaccatgctgtttttgttacagtagcctcgtagtatagttacatcaggtagtgtgatgccttcagctttgttcttttggcttaggattgtcttggctatacaggctcttttttggttccatatgaaatttaaagtaatttttttctaattctgtgaagaaagtcaatggtagcttgatgggaattgcgttgaatctataaattaccttgggcagtatggtcattttcacgatactgattctttctattcatgagcatggaatgtttttccatttgtttgtgtcctctcatttccttgagcagtggtttgtagctcttcttgaagagatacttcacatcccttgtaagttgtattcctagatattttattctctttgtagcaactgtgaatgggagttcactcatgatttggctctctgtttgtctattattggtgtatagcaatgtttgtgaattttgcaccttgattttgtatcctgagactttgctgaaattgcttatcagcctaaggagattttgagctgacrttatggggttttctaaatatacaatcatgttatctgcaatcagagacaatttgactccctctcttctcttcctatttaaattccctttatttccttttcttatctgattgccctggccagaacttccaataatatgttgagtaggaatggtgagagagggtatccttgtcttgtgctggttttcaaagtgaatgcttccagcttttgcccagttagtatgatattggttgtgagtttgtcataaatagctcttattattttgagataagttctactgatacctagtttattgagagtttttttagcatgaagggatgttgaattttatcgaagtccttttgtgcatctattgagataatcacatggtttttatcttggttctgtttatgtgatggattatgtttatgatttgtgtatgttgaacagccttgcatcccagggatgaagccgacttgatcgtggtggataagctttttgatgggctgctggattcaaattgccagtattttcttgaggattttcacatcgatgttcattagggatattggctagaaattttctttttttgtkgtgtctctgccaggttttcgtatcaggctgatgctggcctcattaaattagttagggagaagtctctctttttctcttgtttaaaagagtttcagaaagaatggtaccagctcctttttgtacccctggtagaattcagctgtgaatacgtctggtcctgggctttttttygttggtaggttattaattactgcctcaattttaaaacttgttattggtctattcagggatttgacttcttcctggtttagtcttgggagggtgtatgtgtccaggaatttatccatttcctctagattttctagtttatttgcatagaggtgtttataatattctctgatgctagtttttatttctgtgggatcagtgttgatatcccctttatcattttttmttgtgtctatttgattcttctctcttttcttctttattagtctggctagcagtctatctatattgttgatgttttcaaaaaaaccagctcctggattcactgatgattttttttttttgaagggtttttggtgtctctgtctccttsagttctactctgatcttagttatttcttgttttctgctagcttttgaatttgtttgctcttgcttccctagttcttttaattgtgatgttatggtgttgattttagatctttcctgctttctcctgtgggcatttagttctataaattttcctctaaacactgctttacctgttttccagagattctggtattttgtgtctttattctccttggtttcaaagaacatctttatttctgccttaatttcattatttacccagtagtcattcaggagcaggttgttcagtatccatgtagatgagtgagtttcttaatcccgagttctaatttgattgcactgtgttctgagagactgtttgttatgatttctgggtttttttgcatttgctaaggagtgctttacttccaattatgtggtcagttttagaataagtgygatgtgatgctaagaggggtgcgtatactcttttgatttggggtggagagttctgtagatgtctactaggtccacttggtctagagctgagttcaagtcctgaatatccttgttaattttctgtattgttgatctcatattgacagtagagtattaaagtctcccagtattattgtgtgggagtctaagtctctttgtgggtctctaagaacttgccttatgaatctgggtgctcctgtattgggtgcatatatatttagtatagttagctcttcttgttgcactgatccctttaccattatgtgatgcccttgtttgtgttttttggtatttgttgggttaaagtctgttttatcagagaccagaattgcaaccmctgcctttttttttcttctttgctttccatttgcttggtaaatattcctccatccctttattttgagcccatgtgtgtctttgcacttgagattggcctcctgagtacagctcaccaatgggtcttgactctttattcartgtggcagtctgtgccttttaatttgggcatttagcccatttacatttaaggttaatattgttatgtgtgaatttgatcctgtcattatgatgctagctggttattttgcccattagttgatgcagtttcttcatattgtcaatggtctttacaatttggcatgtttttgcagtggctagtaccggttgttcctttccatgtttagtgcttccttcagaagctcttgtagggcaggcctggtgatgacaaaatctctcaccatttgcttgtctgtaaaggattttatttctccttcacttatgaaacttagtttggcttgatatgaaattctgggttgaaaattcttttctttaagaattttgaatattggcccccactttcttctggtttgtagggtttctgccaagagatctgctgttagtctgatggacttccctttgggggtaacccaacctttttctctggctgcccttaacattttttccttcacttcaatcttggtgaatctgacgattctgtgtcttggggttgctcttctcgaggcatatctttgtggtgttctctgtatttcctaaatttgaatgttggcctctctctctaggttgggggagttctcctggataatatcctgcagagtgttttccaacttagtttccttctccctgacactttcaggtacaccagtcaaacataggtttggtcttttcatatagtgccatatttcttggaggcattgttcatttctcttcattcttttttctctaatcttctcttcacattttacttcattaagttgattttcagtctctgatatcctttcttctgcttgattgattcagctattgttacttgtgagtgattcatgaagttctcgtgctgtgtttcagctccatcagctcatttatattcttctctatactggttattctagttagcaatttgtctaaccttttttcaaggttcttggcttccttgcattgggttagaacatgctcctttagctcagagaagtttgttattacccaccttctgaagcctacttctgtcaattcgttacattcattstccgtccagtgttgttcccttgctggcgaggagttgtgatcctttggaagagaagaggcgttccagtttttggaattttcaacctttttgtgctgtttttttttttttttctcatctttgtggatttatctacctttggtttttgatgttggtgacctttggatgagggttctgtgtggatgtactttttgttgatgcttttccttcctcttygttagttttccttctaacaggcccttctgccacaggtctgctggagttcactggtggtccactttttgttgattttgatgctattcctttgttagttttccttctaacaggcccctttgctgcaggtctgctggagtttgctggtggtctacttcataccctgttgccagggtatcaccagtggaggctgcagaacagcaaagattgctgccacttccttcctctggaagctttgtcccagaggggcacccgccagatgccagctggacttctcctgtatgaggtgtctgttgaccattgctgaggaggtgtgtcccagtcaggaggcatgggggtcagggacccacttgaggagacagtctgtcccttagcagagcttgagcgctgtgctgggagatccactgctctcttcagaggcagcaggcaggaatatttaagtctgctgaagctgtgccaacagccaccccttcctccaggtgctctgtcccagggagatgggaactttatctataagcccctttatctataagcccctgactggtgctgctgcctttctttcagagatgccctgcccagagagaaggaatctagagagtcagtctggctacagtggctttgttgagctgcagtatgctctgcccagttckaacttctggaagctttgtttacactgtgaggggaaaaccacctactcaagcctcagtaatggcrgatttccctccccccaccaagcttgagcatcccaggtcaacttcagactactgtgctggcagcgagaatttcaaaccagtgactcttatcttgctgggctctgtgggggtgagatcctctgagctagaccacttggctccctggtttcagctccctttccgcgggagtgaatggttctgtcccactggaggtccaggtgccactggggtatgaaaaaatacatctgcagctagcttggtgtttgcccaaatggccattcagttttgtgcttgaaatccagggccctggtggtgtaggcacctgagggaatatcctggtctgcaggtcgcgaagaccatggaaaacgtgtactatctgggccgtagtgcactgttccttgtggtacagtccctcagggcttcccttggctaggggagggagttcctcaacccattgcacttcctgggtgaggcaacaccccaccctgcttcagctcaccctctgtgggctgcatccatggtctaagcagtctcaatgagatgagccaggtatctcagttggaaatgcagatatcatctgctttctgcattgatctcgctgggagctgcacaccggaattgttcctattcagccatcttgccagccacctctgaatagtgactttttcaattcagttattgtttacagctcgagaattttagttataatttctttttcatattcttgtttttttctgattttgtttagttctttgtccatgttttgctttagctcttttagcaaatttaaggtttttttaattgtagtaaaatatacacaataatttaccattttcaccaaaaaccaaggtttttttttttattattattgtggtaaagtatacaccacaatttaccattttaaccatggaccatcaccatcatccatttctagtattttaaaaaaaattttccaaactaaaacaccataccaattaatcagtatctccccctttcttcctactcccagcccctggcaaccaccatacgactttctgtctctctgaattcaactactccaattatcaactactccaattaccttgcataggtgmaattatacygtatcagtcattttgtgtctgacttatttaacacaatgtgttcaaggttcatccatgttgtagcatgtgcatgtatttccttccttttagaataattttcttcctctttgaagaatttgaataatattctagtgtgtgtatatatatgtgtgtgtgtatatatatgtgtgtgtatatatgtgtgtgtgtgtgtatatatgtgtgtgtatacacacacatatatacacacacactattttttgtttattcattcatctgtcaatggacatttgggattcttccacctattgtgaacaatactactatgaacatgggtgtatatatcaagcatgactgtttgagtcactgctttttaataattttggatatatacctagaagtagaattgctgggtcatatggtaattctttgtttcattttttgaggaacagtcttactgctttccacagtggctgcaccatttaacattcccaccattaatgcacaagggttccaattcccccatatcatcactaatacctgttgttttcttctttcttttttttttttataattgccattttaacagggatagaatgacatctcattgtgaatttcttttgtttttttgagacagagtctcactctgtcaccaggctggagtgcagtggcacagttacagcccactgccatctctgccttcyaggtggaagtgattctcctgcctcaacctccctagtagctgggattacaggcatgcactaccacgcccagcaaatctttgtatttttagtagagacggggtttcaccacattggccaagctggtctcaaactcgtgacctcagatgatccacctgccttggcctcccaaagtgctggggttacaggcatgaaccaccatgcctggccatcattatggattttatttgcatttcccaagtgactagtcaggttgagcatcttctcatatacttattgggcatttgtatttcttttttggargaatgtctattcaagttctttgttcatttttaattggtatgattgtttcattgaataacacagttattttaaagtctttacctagtaaatctgtgttttggggaggatgggaaaggaatttatttctggaaatttattttcttgtttggaatgggttttacgtgttttcctgtttccttgtatgccttgtgaatttgttaaaaactgtttaaaaattgggcatttggaaaaatagccatgtctcccagtctttatggactgtctctgagcaggggtagtccttcttttattagctgggtgttctctaggccttgggaccagcctgaatggaaaacaaattcttctccagtcttttctgcatatgggtctattctgagcctttgtgtgactttctcaattttccccatatacaaggtggttcttgaatattttacatttccaaagtctcacctttagcttcttaggaccttacatggcctattgtaggtctctacccataaccttttgctccaggcatctgctggtcttagtctctctgtagctttcataagcggcacccactgcttctgtttatttgagatgtaagttaggcaaaacagactagaccttcaggtagcccccagacaggttagaactttgcaaataaggtcttctctgcccctctagtttatgggaaggaactggaaactgggaagcttcctcttccagaccaagactgccttgccagagaggtggtagggcaaaggtaaataaaaacagcgcatgattttttttttatcattttgaatacagctttttcttgatttttgcatttgcttgattgctatagacctgtgattatttttccagagcttctgtagggttaatttagccagcagtttcttctttttttttctgtttttttttttttttctttttttaaaagtgtttccatggggaagtgaaracttggagcttcctagtctgcaattttgttgacagtactcctaaactcagwttttatgactttctttttctgctcctggatgccatgctggaggttttatgacattttgggggagtttatgagtagtttgggggatactgatggaaattgatatttctgaatgatctctccactgaaattgctcttaggtactattccaaatttctggattttgaaactaacagtaactagaaactcccactagaaggcaaagtaaagaaggcttggagggctatatttagagttgagaaaaatatcttaaaaaaaaaaaaaaaagacagggtagggtctttctctgttgccccagctggagtacagtgattacccatggactccatccccctgctaatcagcacaggagttttgaactgctacagttctggcctgggctagtttaccactccttaggcaacctgattgtcccctgctcatgagaggtcaccatattgatgccaaattagtgcaaatacctgatcagcctagtgcactacagcccacaactggactcaagcaatcctccttcctcagcctccccagtagctgaggctacaggcctgagcctcagtgagaaaaatacttttctctcaatctcatttcctcattctctcaatgaggaaatcattgagggtactactcacaagatcaatgtgtgttgtttatgagatcttgggggagaagatttttctttttctgataggttttagaatacataagtatactctgaaaagtagacaggatatttatcatcttcatttgcctcatgaggaaattgaaacttaattaacaggagttttagccaggttttttcttcctcttttttcccttcctgaaaatggaggattcttttttttttttttttttttttttggaggggggaggctgtatttttttttctagtttttttaaaaattattattatactttaagttttagggtatatgtgcacaatgtgcaggttagttatatatgtatacatgtgccatgctggtgtgctgcacccattaacttgtcatttagcattaggtatatctcctaatgctaaccctcccccctccccccaccccacaacagtccaaatggaggattcttatttgctgatgtgcctcatgcatctagaattgtgcctggaacatacagagtaggcagttaataagtatttgtaacatgaatgaatgggaggagctagttgtccatagtaggaaaagtgatgactttgttatctttttaaaactttatttagtgaactttataatgaagtctaacctatatcagaaaagagtaccaatcataagtataaaggtcagtgagccttcatcaagtgcatacactcatgtaaccagcttccagatacagaaaaagaatattatcagcactttaaaatcagaaattcctcygtctcaagccctctgccggtcactacccactaccaacccccatcttctctaaagtgtagctaccctgattttcaaaatacatggatttgctttgtctattttgaacttcatacgcactaaataatacactatgtactcttgtgtatggcttcttttgctaaatatttattagattcatccatattattgaatgggtatagttgaactttgttacattttcaaactttataaaaacattttactttgaaattaatcaatgccaagtgaaactcagatttatagaaaattaaactccaataactatcatttttggaacacataatgacagaaactataccaaggactgacatacacgagtgatctcacttaattctctcaagtttcctgaggtgtaggtgttataatcctcattttactgacaaactcatagagaagtttactaatttgctaataaataacaagtttgtagttgatgaaaccctgtctggacccaggtccctcagtcaaccatgcttatgctttattaatcaccactctatttgtctctgtcacgtgagactcttttaagaaatttttaattgaatatgcatttaggtgaagaatggggaaaagtgaggctggtattaacttagagacagctgtcttctatccatgtgcaccacgtgatagaacagtttgccagggcctctttgctgtcataaactgtgtgtttgcagactcctttaggtcttgttctttcatcacaacaggctaactcaggaactcggagcctaggaggaaagaggcatggacctggcctcctagcctctgtattatagatgtgggtctcaggagaaagtcaggaaggactgtgtttatttgcctcatgaggaaattgaaacttaattgacaggagttttagccaggtctcttctgccaaattcagccaaattctccttttacctttatttttttttttaatttaaaaatgctttatttgccgatttaatagatttgaccaacatttaactcttggtttagatctttcactttcccagttcagtaggggaaaaaagcatatcctgtcttctagtcctgtcccttttaacatactctgccttaaaaatactttattctgtttatataaataaacaatataaataaataatatatctgtttcaggcacagatattataaacattaaatttatgaaatgaaaatacaaatattgtcatttcctcacttttttctctttgattttttttttctgctgctagctcttaaattgtttgggctttttattagtgtttgatatgtatttggtaagttagaaacttgtgatgtctctccaactactagagtttccacagtcactgggggacagtaacctcatctaagagcaatttaaggcattatgagattatagacagggaattatttccttgytttgtgactatcttctctctaatttgggagtcctagttatgcttcatgatcaagtgttcttttgctgctatgtaaacctgttttgtcagaggaggaatcggagatcttgcttatgggaagaagggagaaagggctatagggctcagccagcagagctctatgatgtgctcagtagaagaaacctcctaatgtgaagaaaggggaggaagagagatgaaaaaaaattttgtattaatagaaaaaaacatttattgctacttcacacttaaagctttacattcgtatttaatcttcaccataaccctatgatgggtgcatattatacagatttttttttcaaatgaggctcaatgtacacaactgaaaaaacttcaagtctgaatccaaagccaggtaacttctgctacagttgtcccttgtgtatccgtgaggttccttgatcccccaaagataccaaaaatacagggatgttcaagtccttcatataaaatggcttagtatttgtatataacctacgcacaccctcccatatactttagatcgtctctagactacttctaatacctaatataagaggaatgccatgtatatagttgttataaagtatcatttaggaaataacaaaaaagtctttacatattctgcacagatgcaaccattcattttttttcccgaatattcccaatggttgattgaatccacatatgtggagcatcaactgtgtactgttttctgtgcttcatttcattccttaaaaccaaaataaagagcctcccaatgagagaaggatgtgagagcaccacaggcaagtcagttttcaagcaacaacactcaaatttctattgacattactattttttttgcaagtaataaaagcaagtgctcagtgaatatgcctataagtccttaatttcatgaattatcagaattcattctttttggggaagtgagataggaggtcaagtaactttatataactactatttcactaaatagaattctcatttttgtgtgaattaagaattgattagaagcctgcctggcccagatcaactgggagctggagtgacttaccaactcggggaaagggtgagtgagagacttccacatccctactgyaaaactgtggaatctgggctgttggagaacaccttgaccctcccaacccctgaaactaacagggagctgcagggatgtcacggaatgaaactgctccaagaagggatcttgcagtgagccccataccttttctgagacctaagcagttatgaaaaggaaccatttccaaatctagcctgtagcagactacacactatccttaggacccagtggtgccaggactgaggcattacagaaactcgggctgttgctgatgcaacttgggagtgagctgggagtgccttctcacctggcgtaggaagtgagcaaggtgtgcactgcagctgctgctgccaggaagtgggcaaccccaggatggagattaggatatgaacagggtgtgagttgcctttgggacttgctcttacgaccaagaaggtgtaagctaggcataggctttcactgctggaggggccagccccactaagactggggtatgagtgggggttgcatgtttctcacccattggcccagactatgaccacccaggcaagtcctcagtgcagctgctactgtctctttaccaagcagaacactccacctgaggcctggggattgtccacccatgcccatcatggctggttgctgctgtcaccattagggaaccggagcacaagcctgcccagctcattttgccctccccccatccaagatagagcacatagcctggggatgtggggattgcccaaccaatccaccacctcatgyaactcagcactcctacaggcctgaggttgggccttaactcacagcctgtacctcctcagctggtatatacctgcaagcaccaactgtggacctggagacaggcccgcccagcccatcacagctactgccaatatcaatgcacacagattaggacccagagaaatcatcttgccatggctactgctattgcccatgccacagcagctatctaggagcctgagaacccctctacccctgccactactggcatctgagcaagccaccttgaggcccaagaatcaggccaccagtaacaaccaacataggttctcgggtacatcatcttgaagcgcaaagataggcatgctcagcccaccactgtcaccactggggccttaagactggcctacctggcatcttagtccccagtacaacttcactgtatcctccactaataactacaccctaaccaattgcggaaatcgcagaaaccaataacactgtttacagctaaagaaatcatatggagactacctactgcatgtacccagaatcaaagttgaagtgccttrctcaaccaacatcatagatacatcttcaggaaaaattctcccatatgaaagtaaatttaaaaataggaagaagtgactattaaaccagatgcacagatattaatgcaaggacacagacacaaagcaagaaaatacaacatccccagaagaacacagtaattctccagcaaaagatcttcatctaaaggaaatatttgaaattccagataaagaattcaaaatattgattttaaagcagatcagtgagatatgagagcattctgacaaataatacaaggaaattagaaaaacaattcagaatatgaacaacttttcaaaaagatatttgaaaaaagaacccaatagaaattctagaagtggcagggtgcagtggctcatgcctgtaatccagcactttggaaggctgagacggatggatcacttgaggccaggagttcaagaccagcttggccaaatggtgaaaccctgtctctacaaaaactacaaaaattagccgggcatggtggcgtatacctgtggtgccagctgtttgggaggctgaggcaggagaatctcttgaacctgagaggcagggtttcagtgagccaatatcatgccactacactccagcttgggtgacagagcaagactgtctctgcatccccactcaccctcaaaaaaaaaaaaaaaattctagaagaattcattaaaggaaatagaaaatacatttgaaagcttcaacaatagactagactagtcagaagaagaaaattctaagacttgaagacaggtcttttgaaacaatctagccagacaataatgaagaaaaaataggaaagaatgagcaaagccttagttacattttggaaaaaagtggtcaaatatttaaattattggtatccccaagggaaaaggaacaaaatattagaaaacatatttatagtttgtgtttattgtttcatatattatctttatttaacaagataatatatgaaaacctgctggatctagcaagagatttagatattcagatacaggaggctcagtaatccctggactgaacaaggcaaaaaggtctctacaatacattacagccagactaaagtcaaagataaacagcaagttctaaaagcagcaagggaaaagtgcctagtcacttataaaagaaatcccatcagagtaacagtgaatttctcaataaaaacctttcaggccagaagagaatgggacgatatattcaaagtgctgaaagaaaaaaaaaacaacctgccagacaatactatacctagcaaaatatcttttataaagtttttccagacaggcaaatgctgaggaatattttaccactagaatagttctacaaaaaatgcttaagggagtcctaaacctaagagcaaaaggacatttaccatcatataaacacatgaaagtgtaaaacctactggtaaagaaatcacacaaaggaggaagagaaaggactcaaatggtaccactacagaaatccaccaggatcacaataacaataagagaaaaagacaggaatgaaaaatatacaaaacaaccagaaaataattagcaatatgataggaacaatacttcccatatcaataataatctttaayataaatagattaaattgtccacttaaatgttgtagaatggctgaatggattttttaaaaaccatgatccaactatatgcttcttacaaaaaattcacctataaagacatatagataaaaagcaaagggatagaaagttattctgtgcaaaatgaaactgaaagcaggagtagctatacttacatcagataaaacagattaagtcaagaacagttttttcttttttaaatttttattttactttaatttctgtgatacatgtgcagaacatgcaggtttgccacataggtacccatgtgccacagtggtctgccacacgcatcaacccgtcacctagatattaagccccacatgcattaggcatttgtctcaatgctcttcctcaccccgccccctgactggccccagtgtgtgatgttcccctccctgtgtccatgtgttctcattgttcagctctcacttatgagtgagagcaggtggtgtttggttttctgttcctgtgttagtttgctgagaatgatggtttccagcttcatccatgtccctacaaaggacatgaactcatcctttttcatggctgcatagtattacatggtggatatgtgccacattttctttatccagtctatcactgatgggcatttgggttgattccaagtctttgctattgtaaatagtgctgcaataaacatacgtgtgcatatgtctttatagtggaatgattatattccttatgactagtaatgggattgctgggtcaaatggtatttctggttctagatccttcaggaatcgccacagttttccacaatggttgaactaatttacattcccaccaacagtgtaaaagtgttcctatttctccatagccttgccagcatctgttgtttcctgactttttaataattgccattctaactggcatgagatgatatctcattgtggttttgatttgtattcaataacaggttttttttaaagctttatatatcaataaaggatcagttcagtgacagaacacataacaattctacatatatatgcacccaacactggagcacccagattcataaagcaaatattactacatctacaggaacagatagactgcaatatattaatactgggttacttcaacattccattctcagcattagacagatcatttagacagaaaatcaacaaacattgagtttaaactggatttcagaccaaatggacctaacagacatttagagaacattctattcaacaactgtggaatacacattctttttatcagcaaatggaccatttttcaagatagaccatatgttaggctgcaaaccaagtctcaacaaatgtcaaaaaatcaaaatcatatcaagtatcttctcagaccacaatgggatacaactagaaatcaatactaaaaactttgaaagctatagttataaaattaacatgcttctgaagaaattaaaatgcaaattacattttttgacacaaatgaaaatggaaacacaatataccaaaacttgtgggatacagcaaaagcagtactaagagggaagtttatatcagtaaatgtctatatcaagagtagaaagattacaaattaacaatctcacagtgtacctcaaagaactagaaaagcaagaacaaatcaaacccagaattagcagaagaaaagaaataataaaaatcagagaagaactaaatgaagtctagactgagaaaagtacaaaggatcaacaaaacaaaaagttgcttcttcaaaaagataaacaaaattgataaactgccaggtagactaaccaagaagcgtagatccaaatacgatcagatgaaaaaggagacattacaactgataacacagaaatacaaacacaaacatttatcggagactattacaaacaactatatacaacaaactggaaaatctaaatgaaatgagtaagttcttagaaacattcatcttattaagattgaatcaaaaagaaatagaaaacctgaacagatcaacaatgagtagtaaaattgaatcagtaataacaagtctcctgaatggatccttagccaaattctaccaaatgtacaaaaatcactactaccaatgtttctgaaactattccaaaaaattaaaggtgagagaattctaactcattcaacaaggccagcatcaccctgatgccaaaaatcagacaaggatacgaggaaaaagaaaacagggccaatatctctgatgaatatagatggcaaaaatcatcaacaaaatactagcaaatgaaatccaacagcagaacaaaacgataatacaccacaaccaagtgagatttatcccagggatgcaaggattgctcaatatatgtaaatcaataaacatggtatatcgacaaaaaatgaaggataaaaaccatatgattttcttaatagatgcagaaaaagcatttgataaaattcaacaattcatgatgaaaactcaaactggacatagaacacacctaaaaacaataaaggccacatatgacaaacacatagctaacatcatacccaattggcaaaagttgaaagcctttactaagaactggaacaaggcaaaaatgaccacttttacccttttattcaacttcatactggaagtgttccctgagcaatcaggaaggagaaaaggcatccaaatttgcaaagaggaagtcaaattgttcttctttgctaatgggatgatcttatatctagacaaacctagagactccatgaaaaaaactcttagatcggacaaatgaattaaagttgcaggacacaaaattaggatacaaaaatcagtagcatttctattcactaatcatgtagctgagaaagaaatcccatttacaatagataagcgctccccctcccccaccaaaaaaaaaccctaggaataaatttaaccaaggaggtaaaagatctctacaaggaaaagaacaaaacgttgatgaaagaaactgaaggcaacacaaatagaaaagtatccatgctcatgggttggaaaaattaatattaaaatgaccacattggccatggcaatctatagattcaacacgattcctatcaaaataccattttatttctttacagaattagaaaaatactaacatatatatgaaacccaaagagcctaaatagccaaagcaatcctgagcaaaaagaacaaagctggaagcaccatgttacctaacttcaaaatatattacaagtaaccaaaacagtatggtactggttaaaaaaaawatatatatatatgtrtatatatatatacatatatatatatacgtatatatatatatatacatatatatatacacgtatatatatatatatatatrtatgtgtgtatatatatatatgtatatatatatatagactagtggaccagaatagagaatccagcaataaagccacatatttatagtcaactgttttttgacaaagctgacaagaacttacaatagaaaaaggacaccctattcaataaatggtgctggaaaaattgtacagccacatgcagaagaatgaaactagacccgatctctcaccatatacaaaaatcaactcaagatggattaaagatgtaaatgtaaaacctaaaactgtgaaaacaatagaaagaaaacctagagaaaacattcctggatattggtcaaagcaaagaatttatgactaagacttcaaaagcatagccaacaaagacaaaaatagccaaatgagactatattaaactaaaaagctgctgcatagcaaaggaaacaatgaacagagtgagagaacaacttgttttaaatgagagaaaatatttgcaaactgttcatctgacaggggactaatatcagaatgtagaaggaacaggaaaaaagcacaaatctttttaaaaagtaggcaaagtaagtgaatagacatttctcaaaagaagatgtacagatggcaaacaggtttataatcagtaataatcagaatgatacaatctatactgatatagattattactgattatttgccatttgtatggcaaacaggcttatgatcagtaataatcagtaatgtatttcagtaataatcagagaaatgtaaatcatatccacaatgagatatcatcttattgccattcataatagctattagtaaaacaaaacaaaacaaaataaacacatgttggcaaggatgcagaaaaaagggaactctttttttttttttttttttttttttttgagatggagtctcgctctcgcccaggctggagtgcagtggctcgatctcggctcactgcaatctctgcctccggagttcatgccattctcctgcctcagcctcccgagtaactgggactacaggggcccgctaccacgcctggctaatttttttttgtatttttaatatagacagggtttcactgtgtgagccaggatggtctcgatctcctgacctcgtgatccgcccacctcggcctcccaaagtgctgggattacaggcatgagccaccgcgcccggccaagggaactctttttacattgtktgtgggaatgtaaattttacagccactatagaagacagtatagaaatttcttaaaaaactaagaatagaactatcattcaatccagcaatcctactacgacctaaagggaaagatgtcagtacatcaaagggatctctgcactgcatatttatggcagcactattcacaacagtaaagacatgggataacctatatgtccatcagtggatgaatagataaagaaaatgtggtttctacacataatggagcaaccacagaaaagaacgaaatcttgtcacttgcagcaacgtagatgacactgaggggtcattattttaagtgaaataagccaggcataagacaaatatcatatgttatatgtgggttatctgtgggagctaaaaaatttgatcacacggaggtagagagtggaaagacagataacagagactgggaagggtgactgtggggagaggagagaatgaagggaactgggttaaagtatacaaatatatagtaagatagaataaagtcaatatttggccatgtgcagtggtgcaaacctataatcccagcactttgggaggctgaggtgggcggatcacctgaagtcaggagtttgagaccagcctggctaggtgaaaccctgactctactaaaaatacaaaaaattagccaggcgtggtggcgtgcacctgtagtcccagctacttgggaggctgaggtgggagaatcacttgaacccaggaggtggaggttgcagtgacctgagattgtgccactgtactccagcttgggcgacagagtggagtcttgactccatctccgaaaaaaagttaatagagtagggtgactatacttaagaaaaatgttgtacttggtgatggataccctaaataccttgacttcatcactatgcatataatatatatgtatacatatatattatatatgtatatatagtatatatatagtatatatatgtgtgtgtatatatatatatgtaacaaactttctcacatacctcatacatttgtgccaaaaaaaacctcattagggagtaaaatgccaaattgaaacagcataaaaagaaatccctccaaaaaactatatttgttgagtatatatgtgagggaaagtgtggctcttttaaagagtgaatgttggatgagaaaaccaaggaagtttgtgagaaactacctggttagagagaatttaggcaggtagcctctaatatatgggaacaaaagcatcttcgttctttgaaacaattctcctagtaaaaccaaaataacataaatgagttaattctaagcatcttttgtgaacactttttcattctttcaacaactgtgagtgtattgggggaggggggcaatgggggtggggaagataaagtccctgackccttacggataagttgggtgattgaagttaataaacaagtgtcttcatgaaacaagcacttccctcaaatcaattaagggaagaaaagatgcttccccacacccttttttctttttttgatactcgcctccagatggcctttaaaccaacaaaatcaatctaaaattccccacactctacggattaggtgccttgttgaaaaatgacttttctcgctaagtctggctcttacacagccgatgagtgctgggcagtggaatcaggcaggactcaaagataagctagaattacccatagtggaaggatttttatgataaaccaactgaaaaaaagtgaggaagaaacgggtggtactgtgtgacagggcagctgtgtgtgcctacaagaaaaggtttggccttgttatgtctttccaggagaggcaaggggccaataaagctttgtgaatgctggctcatctgtcatttccagctgtttcccctgttcaagtccacctgcaggctcagaagcagcaggccttcccacacgttcatttatggtgtgctagcatcaccagcctccactagtagagatcctagcagaatggggctctagcaggaaaggcttttgagcttgtggagtctaaaattctccctgccctgggcagtggagacttgcaaatgtggagtgggaggttcccaaggttcagccagatgatggatggtgaaatgagggttgacaatgtgctcagagggttgaaattaaaacaaaagccaagtcattagatcattgtgttttaacagtgatgttgtggcttctcttaatatcctggcttgcagagtcctggaggaatctcccagtcaataagctcagaggttactaaatggtagtcatttcctgggttgcactatttgaatcagatttggcccaggctgaacagagagaaatgtgagaaagggaattcctttacttcatgcatgatgaaaatgatttctctgccaatttgggaaggaatggagggctggaagattcccacaactattgtttagcatcttgtggttctaggaagtgtttcagctggagtgcactgatattatrtatgggatgattcacatggcagagaatgggtagagatgaggatgatttagcctcaagctccttgaagccatgtgggactagatgaggacaagtatatttgtctgataccttccaggcctcctctccccattcctccagcctaccaccctgcctttctgatgtacaggaagaagtatcttcccttaagaagagtaggcaagaagtggaaggtgagagtctgaaaacagagttggccttagttctaagcaatatgaattcaaccttagtgcacctgctatatcactgaaacccttcacaaaacactggagggggcaatctaagattagaggtgctttactctctatctgatttacactgtctacacatgcaaagtgaatacactaacaagttagttggaaggaaaagtgagtgaatatctacaccatttaaccagagaaatacttcggccttaattatttgggtattatcttagatatagtttaacataagactaactatctatcttaaaagtgtctttaaaaattattttttattcccttttyttcattgaggtggcagtcattcaagcactaaaaaaacttcaggaagacaacacttagagtgcattaaataaatataaattttattaaaaacactcacatagcattatcaggaatgatataataataaacagctttcaaataacctgcattcataacattacaatacttacagtatttataaccatcctcagatcttataaaccaaacatctcatgaaaatgaaatgaaactagtttttaaaaaagcatagaaaaatgcacacagaagttatcttagtgtcaaactgcaaaagtttcctacacaagttaaccactagcttcagaagtgaactgtacatcactgtgcgtcaatcaagatgaaaaattcattcaagtaaagttgacaccactcagaagcattttcaagtatggctatatagtcaacctgatattcctatattagcaaattgtagatctgctttccattcattctaactgaggcaggttttatatttacaattatagatctgatatttacaatatgccactcaatttcttctcttccttatgtaaactctccccaaccccccaaactatacttcctgttcttgttggccagcagtttaacaaatgacagtaggtgacacagaaatcaaatattaagaatggatgatcaaaatcaccaatgcacatgtagtaatcaaatgtttggggctagatattatggtatacaaaaaacattaaaatcatgtggtttgtaagcaaagcaaacatttttggaaatgtttgcaaattggacacaaccacaaattcaagaaattttttaaaaagacaaaagccagcttacaaagatttgaccaataaaacccaaaggcctcctctgattaagaatttattttaaatactagtaagcaaaaatgtatttaggccaaaatgtaattgtacaatctgttgcacaccatacctgtaggtgtttgcctgtttaagggaagtccacatggagtatgtaccttcagtgattacaggatcaaaaaaacttcatttagagagttacaagtaagtctctggccaacagccacttgccaaactcctgccttacaatttttccctttatcaactcagtgcattctattttcatgtaatttttttttcctgcttgaaacagtcaaaagattcctcaaacttttaaaatgcttttctttacaataaaaagagccaacagatttacaaaattagttttagttacatcagcacatgtacaagtaaaatagaagggattcaaaataaaagggttaaatccctgacaaagaatatatttattaacctacaacaattttacataaacacaggtgacatgttggcatagggagagcatgagctgaaatatccctgaatttttagaacaaaaaggttgaagttcaagttatacttgctaagaaatcaagtattgaaaaaaggtatgcttttttttttaacaataaaaaaaaggacttggaaaaaaatgatggtacacaatgctttcactctcagwtcaatatcctattgccaaactagtgttgaggtatatgacaagtaggaacatcactcaaacatttaatgaattcttagctcacattatgatatatttgtagcaggctgagtagcaccatcatgatgtgaattctgcttcaaactcatatatatatatatatatatatatatatatatgtatatatttaatttttttacagtactaaaatactaaagcattgcattaaaaaagttttgtttacaatttaatttactatacaactctttcacttctttatacaaattaatgatttaaaaccaccacagcaaaccagctgcctgtttttgtttctttttaactgacagattcacatggaactaaccctgtttattcatcttatgcaggcatcagtctgctcaatcctcttgttaaagaggacacttaagctaagaaatgacaacgtcacaatgtacataattatcaacacaaaggcagactgccattcagttctctgaagagcctatgatccataaaatagcataggcttcagtgaactagctttgttgagtctgcagcatgcagctaattattacctgcagttaatagaaaattcttaaaactgtacatttttgagcaatgaacttgtcatacaattttgtataaaactgttttacagtatagcatgtgagatgagcaccagaaaacatgttttgtggactaacgtattcccttgaatccagtaagccccatggtggatttaactggctgtgttaaaaatggacacaattgctcatcagcagatgcatggctaaaagcaaaaatattttaaaagctttctttgtttccttaaaaaaatcaactttgcattctaaaatgaaagtaaacttgttttttaaacatctcagtaccttagcattgttcaagttgtcaaagcttaggtagacaaagtgcttctaaaacaccatttaaaatatttatacatatacatgtgtgtgcacatatacatgtttgtgtatatatgtacatatatacgtttattgtcctacaaggacttcactggatgagcaaaatccagaggcctttaaaatgtccacattttaaaaactaagcttgtgtaagaataggtaattatgataaaaacttgaatgaaaaggtacccctattattcaagggcactggagtacactgatagcatcttgatgatataaaggcattaaatttttagctattaaagacaccattttcttagcaccatttcttagaacatccaaacaaattcagtgttttcctgctattcatgtttcctgtagctattttgataaataaaagttaagattacagtaaaaactgcatttcaaaaagccataattccagtatttcagtacatcatatattcagcaccagatggtattttaagattcctgtcactgtaatactacagtacttgtttgatttgtgttccatgactatgcaaacttgatattattaaaagtggtcacagatgtgtagagttgtaagcgggggggggggatcacatttacatatcatctcgtccaataatagaaccagtgtttaaaaatgtaaattgcggaacactttcttccccaccttctttttgcatagaatgctttggtcttttcctagatgccatctgtgaccacttgggagccagtgaaaattaagtgctatggtaagataacctcttttgttgctggtgagctgaggtttttcccaccacatttgtcatgaatactgtgacctttccccactgcccacgtcatgagaactatactactgacaggttggttgtggtcttttcaagtgaggtaaccaacaaaagggggtgatatcatatatatctgttgtaaggccctgtgacccgagtgaaggcatatggagatgtagttactgtggagtctgtggtcacggacatggtcctttcggcaagagacttgatgaaacgcaggtaagtgggctctgaagtttcatgtggctcagcaggctcccgtttcacttttttgccatgggatttctgaggcacatagtctgggccatacttttcacactcttcctctttctcacgggctttttcagccattttggcttcccaaagagccaagccatgttttggctcattcatgctcttatgctggtaaaagacgagggagatcctggtggggtgattcctattgggattctttaaaggggttgtggcatgcagctcacgctttgcacactcaatgagaattgacccatgagttggagccacggccactcccccaatgtcaggatccagaaagctctgctcgctgtctgaccagacctcatcgttgtcctctgcaccagaagccacaccctggactagtgccaatggctgcttttcctgaccattagcatcacttaatttgtgtaagcctccttggacacaagcagttctatcatggttaagagctggaagcatctttgataacccattagctgtgtgggaaagcatgtcattctccttgttttggagatgcagggcaygaagagagctgttgaacatgcccggagctgcactgtagttatggattangtgagaaggtgaatgatgttcaccatttttatagtccatgtttggattgctcagattgggtggtaatctagaggtggctcccatgaagtggccatccatctcatgagtgggataaggaggcmatttccctacatgatgtacatttggtctaatggtacaactgctgaaaccatctccctgyatattttggtttccataacctaagtatttagatgtaaaactctggctatttccaaaccttggctggtaaagtgtatggatgggtggtagactgagcttagacagagggtcttggcttggatacctatacagatccatcggctgagactggggagaataggaacccagatatggggagcagttgtccactgataggtttccattgcattgatatgatggatattgggtattctgattcaaaagcccagggtaagggttcatgggattagaagaattcaaatatgaacctgcagcttgagatgaggtggaatagaagttcatagggctggtgcttccatagatatctgaagtgtgtgaagagtttggataaggactaactggattgggccgtctcatgtatggattggtggatccagaagcagaataagagttgacagactctgtctgrgggtgatgtggctgctgctgctggggtctctgctgctgctggggctgtggtggctgcttctgtagaggctggggctgctgggactgctgcatgactggtcctgaaagtcgcaaaagttctgtggacagggtaagagagaacagaaacaggtatctttgatgttgatgattattttatgaaggctagtgaggrtacttaaatgtaggtaagaaactccactagtgatatacracacccattaagcaaagataagagcaaagtcagggttctgatcattgtccagcacaattttttgtctaaggcattagaaatacaaaacttagtgaaaaaaaaaatgtaataaacatccaaagccattccattgagagcaaaatgttctttggaacttctgaacatgcctctgcttgaagtgcctcccttttcctccctctctccctatccttccttggtgtagtcatcccttcctcaagggaccgctttgacctcatcttctagtgcttttgtaatactcaactgcaaagatagatctgataaagcaatactcacaatgtattatagttatgtttttagccctctcttcacccccactggtaagtaaattcctaaatgggaaggaaaatgttttattttacttacttcttcattgcctggcatgcaatggaatttgctaaataattaaaataagatttattatgtaagattcgggaatgttgtgaaaaaaaagaatgacacgtatttaaacacaaaaagyatcttatataatcaacaagtgctactttatragcaggctttccagaaaggaagttaacacagttgtagataacactttaaagaaactttcagctttgtaaatgaaacttttaaaagtcatacttctgttttgacctcactttaaaaagtcatatgagttaagaacaaatagatgaaactgcaatggcagttctgagaacagaagggattattacctgcagaagccagttaaaagggagcagagacaaggttctatctaattatatttcacagctaacctaagtgaacagtatttacttagtgttaagtcaaccagtcaataaacacttatcaagcatctttagcatattctaaattatttaacttagttcctctgagcttggaaatgaatcagtagagaaatttgacttcatgaagcagcaaagatggctagttttaagcaaactggtttgcttttgttaatggccaggccaataccatcccaaattttggattttttttctttttacaaactgcagacataaagcaggaggctatggaaagacaataacttagtattcatgaataatgttctattgttattactacagctgtaatctattttgatgggtaaaagttttgtagcataatctacatgtagaacccctcctaaaccacagactcaacatgtctaaggaaaaatgtttcattctcccctctctctctctcaatcatattttcaaacttacttatttcaataaatagtactgttttagaaacctaaaacagtaggttaagtttaggtttaaaactttggggtcatctttaaacttttcttctctttcattccagtgttttgtcaccaatgtattttctttttcccattttggaagagctcatttgcatcattttgctatatctttgctactaaccaacaaaattcaaggtcttgttacctcagttctggtttactgtgtttatctccaaactattagctcctctactaatttggcctactgccaaattacaatgaatttcatcgtatcacttacctgttaaaaaaagttgctgtttattatagaataaaatccagacttttccatgttttccatgttgatggtgcaatatctcattaccatctctgagaacaaagcctggcccttgctactttagagaagactctggcacagaactaagaccatgattgatataactttccaaaattaacaatgttcattttacaataagagcacatggacacatggtgggggagtggggacaacacacactggcgcctattggtaggggtgcatcaggaagatgctgggcttaatacctaggtaatgggttgatctgtgcagcaaatcaccatggcacatgtttacctgtataacaaacctgcacatcctgcatgtgtaccccagaacttacaagttgatgggggcaaaaccaaaataattttcatttttaatataccacacaacacatttatctacaaatgctttacattaaatttacctgccaactgtttagcctggcttgcgttttcagtttgttttgtacgtgatggggctgacttttccttttcatttttatttgagctgttctccagggaggaaagcttttcagctgcagctttcttggcttctagtttcctttgtcggcaagtcttgactggctctgctaacatcctgacttttcgccgaaaagaactcagtacctgaatggcaccactccgttttttctcctcctgagcttccacactcccaaactcatccacgtcagagactttgtataaaggcagaacgtgaagctgctcatcctcaggttttcctccaaattctcgattgtcttctctagtgagagtgcatacctggtagggaagtaagacattacagcctcaactacaggtcccaaagaaaacgtgtgtgtgtgtgtgtatctttctcctctcagtattcagatttgtgttggtggcctagttgatccagatcagtgacatatayattaccataaaaccatcctacctgttattaatgaaaatagcaacaaaatggtacagggagataagacaaattgacattgcccacccaccctttctctgagtctatcaggaacagttagctgtggtgacccttgttcttcacatatgtttctgtctatgggaagaagcaacactcccccaaaatgaagcactctcttgcttttcacacttcaaaaatagatgtgctagatgtgaagcctcttcaaaaacaggctraaagttttttctacgaaatgacttcctctgtttttggtagtatcacatttgcctcatctcatacttctgaacacaaatttcatgtcttttcacatacctgacacctaactctctctgtttaagaaatttccataagataactgaagtaaaaatataaaaaatgaaaaggtaaasatttggctgatacaggtaatatgcaacttaatactattttcactctcttgtctctcctcctttgtactctgtcaaacctaactttctcttttcttcatttcttttctgaaatatgaccatataagtgggtactctgaaaagggtaaggggtggagggaggaaagctacctctgttgctttgataattaaatggtactttttgctttagttactacaattacactagctttggtaaaagattatttgtggtttttaaatactaactttttagtatttagtgtttttgatcaatggagacaatgtgatctaatgtgatctaaaataaaattagaagatattcttgagagaaatgtgatcacaatggactgactttagaaataacttyaacatgagatggtattaatgagcctgtcactttctgcacagaagtcttcaaattcatgtctctgagcaccttgttacttttcccatacatatttaaccctattcagttcttatctagtgctcctttccattttacttcacagaacccatgctctatcagaggcaaattcttcttgattctaaacatccttctcatcatcttactctctgtcrccttcctggaatgaaacatggttatattaggatgcactatagccccagttatcatttactacttctgcttttcagaaactagcatagcctcctaataatgagcagktgctgagtacatgattagtgatgattttagatgttggggtggttggtaggccttgtgtttgttcttctggatcagaagttaggaaaccagaacctacggctaatgtgcctcacagcttgtgtttgtatggccagtaaactaagaatggtttttacattttcaaggagtttttaaaaaacaaaataaacaaaaaaaccccaccaaacaatgtgacagaaatcctatgtggcctgcagtccctaaaatatttaccatcttgccctttatagagaagagttttccaatctctgatctagaacattaaattaatatcttctctgcttctcaacaaaaacttcacaccagcttcttcaaattacttcagctatcatctaatacctccatgaatgcttttctgccctagaatatgactttaattcctgatatctgtttccatattctcactgaccatcttcttcaactacacctacatccatgttgataattcattaggttgattgattcatagttttttcaacagaatattttgttctttatctctactctgggtcacccctttacatgcaaaattataccctgaaccctttgttggtatagaacatatatatatatatatwtatatataacatgtatctattttcccctcaccactgcctccaattacaagaccgatccattttacccactgtaatatgtagtcaggctcttttgcactgtgaatcttttacaataggttaccacagttactgtgacaatgatgatgtgtttctcatttatgcttctctctctgtaaggtgaatatgcttctctctctgtaaggtgaatggcttgtatttggctttttgcttaactgattacaatctaccaggtaactggcactgaattttgagattttcctggaagttaactgtaactggcaatgcatagtcactggtttagattaacaccaaggatttccatgattctcatgtgcttgtcaacacaattgacaggaaactaatgtgccaacctatcatgagagtgctagttatgccaaagcaggtcactttgcaacaggaattcattcatgaaaatattgctgtccagtgaaacctgcagacaacatattactctaaccgaatgctactaaattccagtgttctgctcctcaacatgagatgctgctgatatggtctggctgtgtccctacctaaatctcatcttgaattgtagctcccaaaattcccatgtgttttgggaaggacccagtgggaggtaattgaatcatgggggcagatctttcccatgctgttctcaggagagtaartctcatgagatctgatgattttataaaggggagttcccctgcacatgttctcttgcctgccgccatgtaagatgtgactttgctcctcatttgccttcagctatgattgtgaggcctccacagccatgtggaactgtgagtcaattaaatctctttcctttataaattacccagtcttgcatatgtctttattagcagtgtgagaacagactcaacagctgctaagctgtcctcagcycaacttaccaatgtgctgccattctgcatgttgtgcaagtctctgtgggcntgagcacagaagtccaaacatgcagtgacccctgagaatggacggccttccttcagacccagacggcactctggtgctctgtgttcatattcaatctgaaaaataaaagtgtgtgtgaatgcgaaagtagttagttttactcttacaccgaaaactcactagtatttagaccatttagaactttaaaaaaatgttttgaacttaaatatatatccagaaacaaaatggaatgacacaaaatagagcaaatatcttgacatggtaaaatttttattttatagtgttattgaggccataaagtatgctatttgagttttgatatatatttgtcacaaccaaaataaagtacatattcattactcttaaaaatttcctcatgcccctgtataattcatgcttcctgctttgttctcagacaactactaatctatcactacagattttcattttctagaatttcatataaatggatttatttggagttaatttttataaatggtgtgaaattaagggtcaagattaccttttttcccttatggctttccaactgttcagatactactggataaaatggttatcccttcccaattgaatcatctttgttaaaaatcaattgaccatattatatatgttggrtctacttaaggattctctattctgatccacttgtgtataatggtgtgtatgtaggtatgtcaatatcaaactttttaaaaattttatttatttattgagacagagtcccactctgtcacccaggctggagtgcagtggcacgatctgggctcactgcaacctctgcctcctggattcaagcgattctcaggcctcaacctcccaagcagctgggactataagcacgcgccaccatgccccagtaattttttgtatttttattagagatagagttttgccatgttggccaggctggtctcaaaactcctggcctcaagtgatccacccacctcggcctccgaaagtgctggaattacaggcgtgagccactgcgcctgggcaatatcaaactgtcttgacagacagtagcaattatagatttcagtaaatctgaaaaccatgcaatatatagtctcaaattctgcccttattttaaaatattatttgactattccaagtcctttgcatttccaagtatatatattttacagccatcttgtccaattctttcaaaaaacctgctggggttttgaaacatcatgtattgaacatattgattagtttggggagaamtgacatcttaataatatttagtcttttgatccattaacatagtgtatctctccagttactgaagttttctataatttatctcagcaatgttttagtttccagtatataatcttatacatttttgtcaaatgtatgtctaagaattttatattttgatgctattttaatggtttattttgatttatttattgctagtatataaaaatacacttgaattttgtatttcacaactttgctaaattcatatattaatttcattttctggtagattttttgagacttcttatgtagacaaacatgtcatctgcaaataagtacagttttattttttcctacccaatcttgactgctttatttattgccttactgcactttctaaaatttacagtttgatgttgaatagaagcagttggttaaaaatggacattgttgtcttgttccttatcttaggggtcaagtattagtctttcaccactaagtatagcattagcttttggctttccatttatgtatttaataggttgagaaagtttccttttatgaatgttgaatattatcaaatggtttttctgtacctactgcaataatcatattttttcctgttatgtcttttcaacatcattttttatgttaaaaatatctttttaatttatttgtatctttatatttaaagtggttttcttggtttttgcttttttttcaatatcacaagctctgccttataattaggggtgttaaaaccatttacatttaatgtggttgttgatacagttgggtttaaataaaccatcttgctatttgttttatttttatatttatctttttttggtcctatatatttttaaaaacatttttggattgatttcatttttctgtctttactggctgattagctatatactttttttttttttttagtggtttaaggtacacagtgtactctaacgtctcacagtttacagccaagtaatatacccagtccacatatcgtataagtactttacaataatatactttcaattcctcagcctctgtgctacttctacgtgttataaacctcataatacattgttaatatatttttaagatagcaagttatcatttttttaaaagtcttttaaccatgtttactatttttgatactgttcatttcattatgttgatctggatttctgtctggtatcatgttctttcttcctgaaggatttcgtttaacatttttaaagtgctagtttgttggtggtgaattctttcagcttttgtatgtatgtctgaaaaaatattctttattttgctgtcttttttgagagttgttttcattggttatatatttctgggtggagagtcttttttcttttagtatgttaaagatgtttctcttacatcttctctcttgcctttttctgaatgaagtctcctgtcttattttttcccacctagtgtaatatgtccttttttctccatttgcctttctgagtttctctttatcacagattgtaagcaagttgattataaatttttgatagtctttttttatgtctttgttttttaatctggggtttgctgagctgctgagatctgtgggttcacagttttgaacaaatctgaaaaaaatttggccattgtttctttaaatatttttctgtctcccacctccttctggtactccaattacacatatattagtgtaacaatattggctaataggtcttttatatattcatttttttcagttttttctttatactgaaaaatttctattactatgtcttcaagttccttaatctgttaattccgcctagtgtatttttaatctagatatatatttttcacttctagaaggtcattgtagggtattttaatatcttctgatctttccttatcactctcatgctttcctctggcattttaacatatgaaatatgatagccattttaatgaacttatttacatattgtatcacatatgtcagttctgggactatttttattgattgatttctgcctgttccccagtaaaggttatattttcttttttctttgtatgccttgtattttctgatggaatgctagactataaattttaccttgttggtagattttttttttaatttttgtactgtgatgcagttaaattacttagaatcagtttggcccttctatgttttcattttaagcatttttagatgaggtcagaactgccaaatttacttctactaccaaggcaatacaattatgaatagtattatgaagtcttctccgtctggctggtatgatcaagaactattccaggtcctgtgtgagatcaagggattattctgcctgcttcttctgatggttctttccctacctagccttggcagttttttcacatgcatgtgctgtttaatactcagctgaagactggatcagaaccctctgcaggtctctggagcttttctcaataacactctctcctctctgatattctgaatagtgaactctcgtcaccttggcctctccaaattttgaactttgtctccttaatacagagataaggctgggtgtgtttgggttcctactggctacactggagcctaatactctcttcaggaagtaaactggggtatttataggttcacctttttacttcctttctctctggtgccactgtctcttgaatttcttattctatgtctaaaaaccattgtttcatatattttgtcagttttttcttaaatgtgtaacggcatatgtagtctctgtttactccatcatggctagaagatgaacttgcattaggataaaagtttgtggtggcttcatattatttactgttggattcatatatgtatttgtctatctaacctcataaaactttggccaaaggaaaatgaaggtaccaactactctttaacatagatgtgtgctttgtggccgttcagttcatgctgtggtctagttagctttattctgtttcttgaacaaaaacagatatacaatcagctagaaattacacttatgccatctcctaaaaaataccatgcaggattttgtgaatgaattactggaaatccatctaaatgtctggaagacaattctaaatgcataactttctcatggtctaaggttgtgctgttcactatggtaaccattatccacatgtggctgtttgtgttaatttttacattaatttaaactcaattacactagccacgtatcaactgttaaataataaccacatgtggctagtgcctattacactgaacagcataaatagagaatatttccatcttcatagaaagctctcttagaagcatttgtctaaaatgtcatcttcatgtatgataaatagcacacgattttgagattgacacctgctatttcaggtctactgttaaattgtaaggcaggcatagaaaagacagagccaaatatatgtctactggatagacacgaagaaaggacatttaagttgagaaaactgaagctctaattccatgggactgacagaagagatgctgtggagagccaactaaactttagcaataagacttcatgaaatcaaggaataaagcaaggaagaatattcagatgtgagaaatagagatacgacactcagttggggaaaggaggtaaagatcaaatagtaggttttatgacagcatctataacatcaaatggtcttcccgtgtactgtgtggaaacatcacatggctattattttgatctctaaagcatattaacatacatggatgaatattaccaatagtacctaccatgcaatataaaaatattttatccattcagaagcatctcatccatttacaactattaattgacttaatttatctagacattacatcaacacattttcatatataaatattaaaacttgaacatatttgatggcttcatattttgggtacttaagttttaggaaatgtataaaatagtttcaagtatgagacrgtccataataagaatcaagggagcaaaaagaacatcaatgctttgttattctgcctcaagtaaagccatttgattaacagcacctattaaaaattcatttaatagaaaatgacccaactttaaatctagcaacatagactcattcatttatttatttttatagcttgatttatttcagaagttcttgctgagaattaaacttttacracagtatcaaagcactccttatactytgtgatactagstaaacaaaataacagtattaatccaactattaatagtgtttaaaaacttttcatagatattcatacacatttctaaaaacataatttgacataaaataacttacaaatagaccatcgtttaatttgcctctattgttcgaacsaaaaaaaaaaaaaaatgtttgggactgttaaagtccacagtggaaaagaagagtagctaaatcattttaggattagtcccttgtccatgtctgctgtgtaaactaatctaatcccacgagagtctttaatattatcaagtaaatgacagagcacccatcccagagccccatacctattgctcctgtatactctgctctgggtgtcttctcatcattccagctttcctccatccatccatctccctctttcacttttcctactacatttcttctactccctcccccagttcttacttcattggcttctcttcctccactcatgcctaaaatgattgatggctccagaatcccatcatcagccctttgtcctctttataatctctactttgaaaacctcctttcattcctatgtattcaactttaagtcctgccagcattctgactctcaaatctacagtgctagcctgaatttttctcctgattctccatctaattaacctagaagcctagcatgtccaaaattttgatatcttctccccatcccaaaacttactatttcttaccaatttctgatactagttaatagaactacctgtccaaactggaaatttgttgtatctccaaattcttttctcatccatacatctagtcaccaagttctctaagctccaccttagtkagtgtacatacttaattcctgccatttctttaggtccttaaaatctcttgcccaatgattgcaatagctttcttctctctctaatcttacatagatttaagttatatttcccttacttggcttttaagtaaatttttcaaaatacgaattacatcactttacccttccatccccaacacacacttgaaacagcccaatggttacctacagaataaagttcaaagatctttatttagcgtctaaggctgcttgtgacatctagtctacttttgggttttgtttttaaatttttttagaaatgtgcacattcttctattccagctggaactgtgtaattctaaaattgctatttattttatatgtctctrtctccactaaagaaggaattcttttgttttttgctttttttttagaatctgggtcatctttgtcacccaggatggagcacagtgatgcaatcatggctcaccgcagcctcagactcctggtctcctgggtagctgggattacaggcataaactaccgcacccagttaaagatgaatttttttttttttttgagatggagtttcgctcttgttgcmtaggctggagtgcaatggtttgacttcggctcactgcaacctccacctcccaggttcaagctattctcctgccttagccttccgagtagctgggattacaggtgcctgccaccacacccagctaattttgtatttttagtagagacagggtttctccatgttgatcaggctggtctagaactcctgacctcaggtgatccacctgccttggcctcccaaagtgttgggattaaaggtgtgagccaccgtacccagcaaagacggaattcktaaagacagacagagatggcactgctcacctttatgttcccagtgactaaacacagtgtttagtttgtaatagactttcacttaatgcttttgttgttgatgttactgaaacagtgaagattttagttttttgccttcatgatgagagatttctgaccaaatcatctacctgtcttaactagctatagtttagaatacacatgtaaaatagaaaaaaaaaatgtttttgcttggtgtatgaagtcaaggtcaaacaaaaaaggaagatcrgcaaaatctgacacatctggaccgaaatatatatacttacaatgttagtatatgcatagctttatgtgaatatttgtaagtctataaattcttatgaatactcatttatacttatagacttgcagtaaaaataggtagttagaacctatagcttgggccacataattttgatgtaatctccatagtctgtttacagaaacaaaattattcatatgagaacaagattagtagatagaacagcctgtgacttttagaagcgcatgtctttacagctaaaagacaaaaaaaatgtacttttgtatggtataatttttatatactcgaaactgaacactgcagtggtttcaacaattaagaggaaaagttagaataatatttaaaaatcattgtttcaaaaatatttttggacataggtcattagtaacaagtaagttgttacaattgctgccaatgattatttaaacttacctgattattatatgcatcaggtgcaagtttcttatatgttggtgccataagagtggacaggttttgcaaatgagactccagtttctcttcctgtataaagtgaataattctacatattaaattctaagtccattttctctatgtaaaagagactatcagttagattattccccttacattttgaatcccaaacacaatatatggtgcctttattactaaataaagcatctttaaaacatgactatcatttaatttcatatgtgctagtaaatatctagctatttgtttttttcataagattgattttctaactgcatgcagatattttgcattttatacacacaagcctgtgccaggagtagggttaggggaattaagccgtatggtcttaaagaggtcacattttttagctaccaaggaagatgaactattaaaagaacttctttagcttaatttgtctatttctaatctttacattttatgtttataaagatagtatttaaataatttggaatgatctctccatagagcaactaaaatttactggacacttcaaatatggataaaatgcttcagaactagaatgcaggatacatgaaaacctttgcagaatttacttgaaaggggaaatgctcagttacacccccacctgccctgctcatgaagaacagattttccaagtaatatactgttaaaaaatggtaggtgatcatatttagctgctccatttatacttagaagtcttcatttcagattgatatttctctaaaaaaaaaaagttgtgagacataaccacctggcagagatgtaaattttagaaggtgaggaggtttctgaacagagctctcctacccaacagaggcaataagttacttggtatcctctggatttggtttacatgaaacctcgtgaaagtgataaacatttatcacttgataaaacagtggttaaaaaaaaagttatctgtagaaaattaaaatgacagcaagcaaaatcagtacttttcattaagttattaatattcatattcttgtcttatgaaatgatgtctcgcacatttaagtaaactttaattattgaaaacatcctttaaaaaacttatactgtgatttcaggagtttttgcacttgctttattaactgtgactataatagtaagtgaaagcttaataaggttaacaaattcttcatttaaagggactcatcaatgttataatatctatagtatggaaatattttaattgtattcgaaattcaaaagataattgtaagtgtatagaatgactgaaaatgtggtcatagctaaatgctaaatatactgaggttttctcatcattcaattagtacggagacagtccctgacctataatggcttcgttttttttttactttaggatgggtttattgggggtattaaatggattttcattttayaacggatttataggaatgtagtctcctcataagtcaagaagtatctatactctagactacatgccacccaaaagttgttaaatttatcaatttgcaaattataagaaatacgtattctacagacaagacaaaaaccaatgacttcagtgagaaattagtgtccatttatttccattacagagttatattaaaatctaaatgttttagttacttaaatgcattcattacagtgactttattaaatgcattcattacagtgactttaaattatttgaatctcattgcacataaatgtgactaaaaatggtcttttctgaatgtagtacttatgtaacttccataattcagagtcaaaatatgaaaaacatcaccaattctcatttagttttaacaatgaagtgacacccctttaaaactttggaattaacataaaagaccaaagaggaagtttttgttgctcaaattttatctattattttggcataatatgattattatgccaacttaaaaaatagtgtgtatctacagtttgggaaaaactttgattaataagagcttaccaagatatgtcatattgttcacttcatctaagctaatgaattctctatgaaaaataaagcgattatacatcaggaagtaaacaaacctcttttgggtcatccccaagcagcttaaacttccttgggatcttgcttctggcaaacttacatccattgtagtacatgctccatgaacaaccaaaagagaaggaggcaccacaggtttctggatccagcccctgacaggcgcaagttctcctgaaaaatcaaaagaccaaattcattgctatggatagcattatataggctgtgcagctgatattataggtgtctatatgcaaaatgagtttgaaaagaagtctaatctaactctgtattaagctgtggcataaccacacacagaactatttcaattgacttttaaacaattttattgcaatgtaatacacatacagaaaagtgcacataattttacagtttacaaatggaaaatacccagttaagtagaacccacactaagaaacaaaatatttactatcccctggaatttcccctcattttgcctttcagtcactcactgtctgtctccctaacagtaacttctctaagaatatagtagttctgcctatttttatgttaataatgctttcttttttacagatggggtcttgctatgttgctcaggttgaacctgaacttctgggctcaagtgatcttcccgcctcagcctcccaaatagctggaactataggtgtgtgccaccatcagtrgcttgttttgcctacttttatacttgatatatacataggtatatggaattatataatataagcttatttgtgtgtgctttttccattatgtttgggatatccatccaaatcactgcatgtagttgtactttattcattttcattgagtaccatattccatcttataaaaatgtgatgaattattctaccattgatgggcatttgagtgctaggtcctagtttctggctaaaatatagtattacagctttatagccctagtttgatacattctaatgacaataaacaaacatacaagtaagcaaagagagataaaacaacttacaagaaaaaatattcaggtagcactgtaaattatttttaaattaatgtatgtatattgtgatataagtaaataattgttaatatcaaaaaccaagaatttcagtgtacaagagaagcagaacaaaagataataatactctgtcaactatgaataggaaaaatcagtatgaattaatgatttgagttaatctcagattttctttctaaaaaataattacttcatgtatttgcccattaaaaaagcctaaaagtaatgacacctccatagcagggagcacatctagacactgattgtgatctctaaatataatttcccatcaaaatctctgaaatttgagaagtaaagattcttgccatgcatttattctatcattcttacaaactatattaaatggtaactaacrgttgatgaggaaaagtcctgtaaagtattccagctaataaatgcaaaaggaattttacaattagaaatgatcactttacacatgtcagcaaaaatggcagaataaggatctctgaaaattttatcctccataaaagcaataaaagtactgataaatattgtcagaatcagctttttcagatctggaaattagcaaaaagcttgcagcaatatagggagaatttgttcaagggaaaaaaagacaggatttcagtgagaagagtgagctctgtggtattttaactttccccacagctctatggtagccttcaaatcaaaacagcccacatttattatgaaaagcagcagccaggctgccactagaggaggccagattggttggatatactctagactggttggatatactctaaagtcccattcacagagaccttacattatttgacctgtttggtagtttcctggaagatcccactagtaaggttatctttactttatctaacttggagttcacctagtgtgaaccaccttttccacagaggcatttgtcaaataatcataggcagctgttgaatattgtcactgactcaggtgtagctaataactggagcaaaacataagataactaaaaaagctyaaaagtaaattacctgggaaatgagatgatccacaggaggctttgaaaatatattcctgggaatttagaaagccacatgcaactgtagggcccacaaaagacctcagaaagccctaaactctcaccacagtctaaccttgagactctgcacaagcagggaataaaggctaatccagagctgcaaatagcctggctgagtgttgaatgcatgccccaacacacatacagacccctttgtcaaagactgacttattgatctcaggcacctaaggaattctgtctaatccttagctgacctctaagttaaccaagcaaagacttcgatggctatctatgagaaacaatacaaactttataggagtagttaaaaagaaataaacaacaaccaccagaaacagtaacatattctgggcagggggtagaatctgrttttcagatttaccagattatattattttatttatttttatttttgtagagacagggtctcactatgctgcccaggctagtcttgaactcctgggcttaagtgatgctcctgctttggcctctcaacgtgctgggattacaggcacgagccactgctctcagccattacattagtttaaaatgkctaaacaattaagagaaacagaaacaaagtatggcccctataaagtagtcaatagaggctattcctgaaaaagtccagatgttaggccactggacaaagactttaagtcagctatttcatgtatgcccaaataatgaaagaaaactgtatttaaataactaaagtaagactacagcattttattaaatacatgagataaactcaagaaaaagatattattaaatagaattctaaagctgaaagtgtaataactgcagtaaaaattagaggggttcaatagcagagttgaaaaggaggggaaaaagggacttgaagataagtcaattgagattattcagtctgaaaaatgaaaacataaacagaacctcagagatctgtggaagaccataaagcataccaacatagayataatgcaggtccccaaagtagaggatgaagaataaagaataggaagaatatttgaaaaataatggccgaaaacttctcaaatttgatgaacaacatcaatctacatgtccaagaagctcaactaactccatgtaacataaacccaaagatatgcatacatataaacatcataaccaaactgctgaaagccaacacaagaaaatcatgaaaactgtatgattatcatgtatgcaggattcccaataagattaatagctgatctctgatcagaaacaatgaagaccagaaggcagtagaatgacatagaaccacaagaaaaagactgccaaccaagaattctgtattttgcaaaactatctttcagaaatgtattatataataaattaggacattctctgataaataagagtttattgttttcaggcatgtcctacaaaaaatactaaatgtatacttcaggctgaaaggaaaggacactagacagtacctcaaatacacctaagaacttaaagagcaccagtaaagataattacataggtaaatatgaaatcatatatgtatttttttgtaactatttttctcatatttgatttaaatgacaatatcaatctgatttaaaagaaaaaacataatctgtgttaatgggcataaaataaaatgtaatttgtataatagcacagagtaaaaagagggaatgtagctatatgggaacaaagtttccttatattgtaatgaaattggtattacttcagactagctgttataagttagttgtaatccccagggaaaccattaagaacataacatcaaaaaatttagtaaaagacaagggaattaaaacagtacactagaaaatatctattgaacacaaaaaaagacaagatacagacaaaatggcagacaaatcctaccttatcaataattatgttaaatgtatataaattgaaaaattaaaaggcaaagactagcaatatcaatttttaaaaagatttaactatacgatatctacaagatatacacattttataataaaaagttcaagccattaaaatgatgtaacaaatgtaaacatacatgtaataagcaacagagcaccaaaatacatgaagcaaaaaatggcagaattaaaggaataaatagataatttactaatccactttcaataatggctaaaagtagatagaagattaaaaagaaaacagaagttgtaaaaaacactataaaccaactaggtctaacagacatctataaaacatgccacccaccaacagctgaatatacacattcttctcaagcacacgtgaaacattctccaggatggactgtatgtcaagttataaaacaagtctaaataaatgtaacactgcaaaaattgtgcaaagtgtgttttctgataaaattatacatgaataacaagcaaatttgggtaataggtaaaaatatactcctatacagtcaggaatcaaaaaaacatgatagaaattagaaaataccttgttgtaaatgaaaactcgacatactcatattttattggatggagctaaagcagagctagagaacaaacttctagaaaaacacaaactactaaaattgactgaagaagaaatagaaaatctgaatatacctacaacaggttaaaagatgtaatcaagactacttagatctgtcagagaaatgaggtcacagggaaaatcactgccctcacaaccaaggaagcagatggataaaaagaattacagcttactggagcagaaacctctgtaggaaccagtgttgggataggaaaatctgaaatataattgatgaattgctggaggttcagtgtgaacaactccaaaggcatccagtcataataggttcctcacagttttgtgagttttctacattcaggagccagatgaggttctcacaatgaatactagagaaaaatcccttcatgcttccataggaggaggggaaaacaatttttgaaaatgccatataccattctattgttcctaaaaagttctgccatcaggctaggtgtgatggctcatgcctgcaatcccatcactctttggaggctgaggcaggcagattgcttgagtccaggagttcaagaccacactgggcaacataggaaaactccatctctaataataataaaaaaattagccaggcatggtggcatgtgcctgtagtccgagctacttgggaggctgaggtgggtaaatcacttgagcccaggaagtcaaggctgcagtgagctgagatcatactactgcactccagcctgggcaaccagagtgagaccctgtctcaaaaacaaaggataataaagaaatattatgaacaaatgtgcccacacatttaataatcaaggtgaaatggaccaattccttgaaggacacaactaccaatatttatgcaaaataataatctaaataggcctatatctatgaaagaaattgaatcagcaataacttttcaaaacaaagtaccagacacagatggttcattctgatttctaccaaagttttaaggaagaaattatatgaattctctacaatctcaattaagacagaagcagagaaaatacttcataacttattctatgagggcagcattaccttaataccaacaccaaagtctttacaataaaagataactacagactaatagcaaccatgaccatgaatgcattcataaataatgtatcacaaccatgtgggatttgctccaggtatgccagtctagttcaaaatttgaaaatcaattaatgtaatccatttcgttaataagctaaagaaaaatcatatggtaatatcaataggtggaaaaaaagtatttacaaaatccaacactgattaatgattttcaaaagcctctcagtaaactaggaaaagaggggaactacctgaacctgataaagaatatatacaaaaccatacagctaacatatttaatgtarataaagaatatctacaaaaccatagagctaacataaaattgaagatttcctgctgagatcaggaacaaggcaagtatgttgcctctcaccaatgcctttcaacatcatactggaaatgctagctaatacattaagacaagaaaataaaaggtatacagattagaaagaagttgtctttgctagatgacatgatcacctagaaaatatgaaagaatgaccaaaaaaaaaaaaactggatctaaagtgattatataacatggttgcaggaaacaagtttaatatacaaaagttgatcacttttctgcataccagcaatgtacaagcagaatctgagataaaaatacattaccattagcacccccccaaatgaaatatttatgtataaatctaatatgtacatggtctatatggggaaaatgcaaaattctaatgaaggatatccaagaaagagatgttccatgttcatggataggaagatgtgtattgtcaagatggcagtatttctaactcaatctagaaatgcagtgcaatctatcaaaattcctgcaagattttgaggatactgacaaagtaattttaaagtttatatcaagaggcaaaagaccaataaatgactgtatatatagccttttcagactgctttttttacttagtaataggcaaaagaatagccaactcaatactgaaggagaaaaacaatgtcagaggactgacactacatgattgcaagacttactctaaagcctaagttaacaagatagtgtggtattggtgaaagtctagacaaatatatcaatggaacagaataaagagtccagaaacagaccacttaattataatcaactgatctttgacaaagtagcaaaggtaatacaataaagcaaagatagtctttaagaaatggtacgggaacaactggacaactccacatgcaaacaagtgaatctatacatagtctttatagcttttgcaaaattaatgcaaaatgggtcacagccctaaatgtaaaatgcagaactataaaatttctggaagataacacagaacatatagatgaccttggtgttgactttttagatacaataccaaaaacattattcatgaattaactgataacctagacttcattaaaattaaaactttctgtttgttctgcaaatggcactgtcaagtgaatgaaaaaataagacacagactgagaaaaaatatttcttactcttactgtcaatcaagctactgtgctctgtgttatttactcaaaggagctgaaaacttttgtccacacaaaaacctacatacttttataacagctttattcataattgtcaaaacttggaagcaactaagatgtctttcactatgtgaatggataaatcaactgtgataaaccagacaatggaatattattcaatgctgaaaagaaatgaacgatcatgacatggtggaaaatttaaaagcttattactaagtgacaaaaaccagtctgaaaaggctccatatactgtatcattccaactatatgacattctggaataggcaaaattattgagataaaaagatcattggttgctaagggttagtggggtaggagagaaaaataggtagggtacagaggacttttaaggcagtgaaattactctgaatgatactgtaatggtgaatgagtatcattaaacatggatccagactcacagaatacataacaccaaaggtgaactctaaactatgaactttcakcgacaattgtcaatgcaggttcattgactgcaacaaatgtaccattctggtaaaggatgttgataatgagggaggctatgcacatacaggggcagcatgtacttaaggaagctctgtgcctttcattcaatgtgcttttaccctaaaattgctttaaaaataatctattttaaaaatgtttaaaaattcccacaaaggaaagcccaggggtagagaatttcctcaaacatttaaaaaagagttaaaccaatcctttgtaaactcttccaaaagatagagaagggaacatttcccaatgcattttgtgaactcagaattactctgacaccaaaaccaaagatatcacaagagaactaaagatcagtataccttatcaacagagatgcgaaagtcctcaatgaaatacctgcaaacagactccagcaatatataaaaagtaatacacactgaggccaagtgggatttattccagaaatataatgttaatctaatgtataaaaatgaatcaatataatataccatattaatagaataaaggagaagaacgcatgatcatttcattagatgtagccacagcatttgagaaaagttcaacaccctttcgtgataaaattattcaacaaactagcaacagaagggaacttctgaacttgacacagtctttttttaaacaaaacctacaactagtatcatacttaatggtgaaaaactaaaaatttctttctaaaatgaataagacaaggatgtytgcagttgttaattgtacctgacattttctggaagttctaactgggtaatcaggcaagaaaaaaacataaagccacccagattggaagtgaagaaacaaaactatctctacttgtagatgacataatcttgtatgcagcaaatcctaaggaatctaccaaaaaaagttagtgctaataagctagttcagcaagttggtaggatatgagaccaatatataaaaatgaaatttatgaccatatattatcaacaaaaaatttgattttgcaataggataaaaaaaatacatagaaaaaattttaacagaagtacaggccaggcgtggtggctcatgcctgtaatcccagtactttgggaggccaaggcagtcaggtcacttgaggccaggtgtttgagaccagcctggccaacatggtgaaaccctgtctccaccaaaaacacaaaacaattagccaggcatggtggcgcgcacctgtagttccagctgaggcaggagaatcacttgaacccggaggtggaggttgcagtgagctgagatggcagcactgcactctggactgggcagcagagcaagactctgtcttaaaaaaaataaaaagtgcaggactttgtacatgtttcatccaaaacattactgaaagaaatttaagaataaatggaaaaatagcctgtgttcataaattggaagctttaatgttaagatatcaatactctccaaattgaccaacagattcaacagaaccccagtcaaagtcccagaagggggttggatgtggtggctcatgcctgtaaccccagcwctytgggaagcctaggmgggaggatctctttagccaggagttcaaaaccagcttgggtaatatagtaagactccagctccmccaaaaaaaaaaaaaaaaaaaaaaaaaaaaaaatccagaaaggaaacggagaagctgatcttaaaatgcatatggaaacccaagaaacatggtaggcaaaagtacaaagttggaagacttacctgtcttgatttcaaaatttactacaaaactacaggaatcagcacagtgtggtactggcataagaaaagtcatgcagattaacagaattaagagtccagaaataaacccatacatcttggtcagttaattgaaaaaaaacagtcttttaacaaatggtgctgagaaaactggacagctacttgcaaaggaatgaagttggactcttatctctcaccatcaaattaactcaacattaattaaaaatctaaatgtaagaactaaagttataatactctgagaagaaagcataggtgtaaatctttcagatcttgaatgaggcaatgatttcttaaatatgaccccaaatgcacaagctgccaattaaaaagaaattgagtttcatcaaaatcaatttaaaacttttgtactttaaggacattatcaaagtgaagcgacaacctgtgggataggagaaaatatctgcaaaccaggcatttgacaaagttcaagtatcaacataacatattcttacaactctaaaaataatacaattaaaaacatataagtagacttttctcaaaaaaatacatggtcaatacacacgtgaaaagatgcccaatatcagccattaggaaaatgcaaatcaaaatcacgagataaacttcatacccacttggatggttacaattaaaaagacaataacattttcttgaggatgtggagatacactggaaccttcatacattgttggcagaaatgtaaaagcataaagctactttggaaaacagtttggcagttcttcaaaaagttaaacataaagttaccatattactaacaatgtcactcctaggtgtatatcccaaggtaactgaaaacatgttcacacaaaaacttgtacaccgatgttcattgcagcataatttataatcgccaaaaagtagaaacgatccaaatgtcaattaactaataaatggaaaaagaaaatgtggctgggcacagtggctcatgcttgtaatcccagcactttaggaggctaaggtagaaggatcacttgaggctgagtttgagaccagcctagccaacatggtgaaaccctgtctctactaaaaatacaaaaattagctgggtgtggtggtgcacaactgtaatcccaactacttgggggctgaggcatgagaatcacttgaacccgggagacagaggttgcagtgagctgaggttgcaccattgcaccctagcctgggcaacagagcgagactctgtctcaaaaaatgtggtgtgaatatatacgtggacaaaaaaaaaaaaaagaaaaagaaaaaaggtactttttttttttaataaaatgaatgagacttgaaaacattgaggtacatgaaagaagccagagagaaaggccaaatacatgatttcactaatacaaaatgcccagaataggtaaatccagagaaactgaatgtttatttgtggttgccacttagaggaaggaagaaggggagaaggggaagtgactgcctaataaatacagggtttccttctgggaatgatgaaaacgttctgaaactaggtagaggtgacatttgcatagctttgtgaatgtactgaaacaactgaattgtatactttaaaagggtaaattttatggtatgtgaattatatctcaattagaaaaaaacatgggggaataacttaaagttgattttctaataaagtggctactaaaaggtatatttattttgataggggtctttcaaatattgttagaattagcacatgacagtcattttaatatgacttgaaatttggctcatggtaaatgatataaagggcaaatattaaaatgtcatctatataacagatttctgcaaaaattcttaacctttgatttactatttggacttctaattgtaaaatatttttaaagtaaaaattaggtcagttattcaaatgtatacagcatagaaaaaatagcaaaataatttaactttatataactaaatttacacaacatcaagtgagagaaaactgtcaacttgaaaacaaaataatagaaacaggcaatgatcatcaattgatgtgaaactatctggtgaaagtttgatgaagaacataatgatggatcaggctgacaactaaacatgctaaacactcttaatatcactaaaatgggaaacaaacagacattatgtgtctcctgatgtatataaataagatgattttagcactacttatgaagtgtttttgccaatgtatactatacatgcacacatacttatattacttaaaaatcagctgggcgtgatagctcatgcctgtaatcccagcactttgggaggccaaggtgggcggatcacttgaggccaggagttccagaccagcctggccaacatggcgaaaccccgtctctactaaamgtacaaaaatcagcaggatgaggtggcacatgcttgcagtcccagttactcaggaggctgaggcatgagaatagcttgaacctgggaggtggaggttgcagtgagctgagattgggccactgcactccagcctaagcgacagagcgagagcctgtctcaaaaaaaaaaaaaaaaaaaaaaaagaaaagaaaaagaaccagtcaaactaccagtccacagaagatactggggatagaggaataggttaadcaaaagaaccaagatgaaatcggccaaatccagaatgtggggaattttacagagaaaatcacastttctttaaaaaacaaattcaaattcataaagaaaggggaagggctattataaataaaaagaggcttgtgaatcacagaatttatcttctaaatggagagaattttatgagaggaagttttatttaatagctatcccagacaatggacatgaactgggatcacactactcagaagtgtcaatcatgtggaagggctttctttttctcattatcatttttgtttatgtgtgtgttttctgaaatagaatctaatcagataatttgaacaaacacagtctaaatattaaatgataaagtctttacctgttagaaatacatcctgaaatgttaacaggtaagatggtaagttatctgtcttctgctttcaaacactagtgggagtggatgtgggaaaaatatatgaaaaaatattgataaaatgttgataaatattgatgctgtgtgatgggtccatggaattcattatattgcacttttccttttatgtttgacaatttttataatataaagttccttgaaatgtttaacatcacccaccatggcagaaggcatttctggctttgatttccttatgatgacagatacactcccacaactcttacttgccaaaaaaatactggttagacttagtcataaaatggaaatctcaaagggaaatctttaaagaagaaacagctggtttggctcaaaggaaatgtaaaaatcagtttttactttcctactgaaagatgcactcagagttcttttctgaactcacagtgggtggtttggagcatgtggacacagggatttgtaagaactcagtgatgaggttcacacagctttgaacataaaactgagtccgcagccccaatttgagattattctattctctgttcttggcaaaaagttgtaattttcatttctgccagccataaaataaaatctatttatggggtagaagaaacttcaaaagctatttctgagtaaagtctgtattgacattggatacgtgtctattttaatcatgtatttaagtattaaaattttttattttggagaattgctctaagtatgcataagcatagcttaagcattatctaaatgattattcatctttaccttgaaactagacaaaaagcaaaagtgtacagctgtgcttttaaattgtcttcatatttgaagcatgtcttttaatagttttgtatctgcctgacatttagagcagttaaactaacaaactacaagctttctgagactctggtccaactatttttcatggttttcaaatgcaaaataataaaagttcttcatgtaattttttatatgtcagattccatttcaggcattggcatttataagaattatggaaaagctggctgggcatggtggcctacacctgtaatcccagcactttgggaggccagggtgggtgggttacctgaagccaggagttcgagatcaatctggccaacatggtgaaaccctgtctctactaaaaatacaaaaatgagccgggtgggtgcctgtaattctagctactcgggaggctgtggcatgagaatcacttgaacccgggaggtggaggttgtggtgagctgagaaaaatattagagatctatgttaatgaaaattaaattcattacaatgaatgaaatatagtttccaggaaacttcaagaaaatcaaacattttgcaataggactatttttgaaaagaaattttaaaactatcattttcacaagaggttcttcagtgatttagaatctcaaaccgtcaagtctaagagatattatgctttaaagacaatgcagtattactgagttcttgaaagaaatgctattaccaatatgagcacaagttgccttaatttttaattttttttctaattaaaggcacctacatacatttttaaaaatttttcttcagaaagagcaagaggagtcagggtagattaaaaaaatatttcaggctgggcacagtggctcatgcctgtaatcccagcactctgggaggccgaggcgggcggatcacccgaggtcaggagttccagaccagcctgatcaacatggagaaaccctgtctctactaaaaatacaaaattagctgggtgtggtagtgcatgcctgtaatcccagctattcgggaggctgaggcaggagaattgcttgaacccaggagatggaggttgcagtgagccgagatcgcaccattgcactccagcctgggtgacagagtgaaactctgtcttaaaaaaaaaaaaaaaatttatgcttaaagtagtccatcataagtttataagttacatgttatgaatcagcaatttctaccttccaattaatcatttgtaaaagtggtcaggtacacaccataaaatttttggatcataattatcatagaaagtcaagtcacactttcatatagaaagagtaacttttctaaagagattatttataattgatttgtctccccacaacccagagagagaaactgtgttaacataaatttagtaaaaccatgctagttagagttttaaacagcaaaggacaaatttggctagctgttgcaatgagcagtatgagcatttcttataagctcagcaaatgattctatagtttggtggatgcagagaaaaagacactaaaggaaatagtgcaaaattaaaattattttaaaaccaatcgtgggcaaaataacttgtaagatttctggccaggcgcggcggctcatgcctgtaaggcactttgggaggccgaggtgggcaatcacctgaggtcgggagttcgagaccagcctgaccaacatggagaaaccctgtctctactaaaaatacaaaattagccgggtgtggtggcacatgcctgtaatcccagctactagggaggctgaggcaggagaatctcttgaacctgggaggtggaggtcgcggtgaaccaagatcgcgccattgcactccagcctgggcaacaagagcgaaactccatctcaaaaaaaaaaaaaaaaaaratttctgtgtagcaccgtgaacattcatctattcttttagtgttatacaggattatcagcacagtagaggaatattaaaaatgaggctttttccaactgaaggtttagacttcatgcaaagtggatggtgtttaaaacaaaacattagcaactggatgcactaaatatatttaagtgcatactcttgcagttctattctaaattcttatattcctggaaaataatatatatccatatccagtaatttgctgatcatttagcagcagtaaaagtagaagcagttttgattactattgtggaaataatgaatagtttgaatgaaagtaaaaatcagttctatttctacagaacttctaggctttgtattttgtttttgctacatacatatggaaggtatttgacctgggaatcccaaagtttctcattagacttactttctgtttcagatactgcaacatggaagtggagtcaatacatactaatatagtggccaggcacacaggagccgtcacttgtagcatgtgagcacataaacaatttcaagtttatggtataactgaggccatgtggttacagacactctgactgctcctaattaatggctaaactgtacaattcagataatgaaatcatctcaagttattcacattagcaaatacaacttcttatcgcatgactgccaaacaggcattttgatgcccattttataaatgtaaaagtgcacgctgaactctcttcctttcaaccaaagattgggctttcctatcagtggccgcaaagaggggagaggccctgggcttcacttactcttcattcaaggcacaccggcgattggtgagcgtgccgtatttcctcagcgtctcggtaagctccgagtagagtttgtcagccagagacagcgggattccttcccacaccaggatgagaatcacaatcactgcagcctcacaggtgtggccagctcgctcccgcaccaaacacagtagcttctcttcactgctgcttctgcgaaccacctgcgtggatcaccattccatcccaaacaccccccaccccaaccaaaacaaaacaagggtcacttgcagcagataagggcacttatgtatgtatattttatcatgtttagatcacaattagggcaacatttatcagcatgtccaatgtgccttttgctgcccatctataaaaagtgggctttgaccctagtatcagaacaaggagagatgcaaaactactccttaatgtttagcagactatacccagtacagtggggacaattaaatgctacctgcattaaaaccagagctagatgaaagatacataagtcttagttcaaggttttcataaatgacaatataaagattaactgaaggtatttaaaagtttaaggacaacttcacattctaagaaggattatacatttagcaggcactagaatggacctcttcctcatcactaaattatttcaattaaatacaatttgttgattttagaactaatctgcctcttcttaagagataacacatgataaaaaatacaggtaatgttctttttaactggcatgagtctttgatctgggtaacccaattctcagggtcagatttacaaatcaaaatgcccaagatttaagaccaaaggctttatcaagtcacacttacccacttagcaataggacatccctgagaacttttgccttctttaccagtatagatgactctttcaatcctaatagctttacccttctgtccaaaccttaaagaaacccacagaaacacacacacatacaattagcaaatgaattcaagaggcaatcaaaatatttgaacatttgagcataactttattctatgaccacatcctgagaaatgaacggtttattattttttaaacaggtctacgccaagcaaactggataatggtttttaagccttgtttttcctcaatatcaaaatgtacagataattgtaatgaactattttgtaaattacatgtgggtgaaaatgggaaagctcatttcgatataaaatttcacaaagcacaaaattcaggttagtttgctaagttcagtcttctaaaacataaactattttttcccttactaaatttagctattttaaaacttggggagtcataatagattttagttagaactgttcctccaagaatgtctcacaatttagaaaaggaggctggcaaatagttagtatccagccacatggaaaatatggaatagtcctagaaatagactatatcttcccttatgaccaaagcaccacctactgcttgtttaaaaaacaaaacaaaaaaacaacaaaaaaaaggcacttagggaaattcactatttctgccaggccactagatgattatttagtgaacttctacatgctaatttagaaatgaataatttggaaatggagcaagaatgatactgaatatgtcctagctgccccaatgtatcctaagtactttaataataatactgcctacctcttaatgaaaaggcaccctagaagaagaacagctcagagctgtataaatttatatgaaaggccttctctgcattatctcgctcataagagtcttctacatgcaggagtaaaggcaagtacttgtatacctgtgattgatagcaaaaaaaaaaaaaaaggcagctgtaaatagtatgtttctctttctattcaacatatcacacttgctctctttttatggtaaaagaaaacttagagataagtactcatttgcaacactaggtgaatttaattcagtggttcttttcttataccacactttaccagtctttctgctttgacactttattatcaggtgggaaagccagagtgggacctctcgttggagcctgtgccagtaccttgtggctggcagcctggctggccgattcctgttcatgcctgggttttctggcatccatcgcaaagtgggcagcctgtgccagctagcagactattagtcctgtcaaatattgtgactctctggtgaatagcacagtgtgtagtgttggcaaccctagaatagctaagcctactaataattactcaatttacaattgtttactgctttgtgtgtgaaggctggaaaaattctgacatatacaaaaggataaacgttaatctgccctgtgcctttgcgttaattacctttcttccatgatttctctaatagctgccacattaggacctgctcctagatgggtataaaaaggaccttcatctttttcaataatttgctctgttgagataatagaagattattattttagacctcaattatactaaatataaaggctacatccacaaagcttaacccccaactacacattaagggctctaaaagtgactttaaaatttttttttctttaaaatgagtagattgatggactgatctattagaaaatgtgccacataattaagtatatgtacatgctggttgttggataaaaatatattacatttcagatatgggataaaaaattattttaaaccaaataaatgaaactaaacaaagaatacagtgagggaattagaatgtattatatgtagtatcaactacaatccaattttttgagctggaaaaaaaaaacatttaaagctaactggaagcctacctattacttggattttaaaagattaaaaataaaatttcctgctctatcccacccccagaatattgcttggtttattgtcaaggatacccctttttcttcctacttccctataacatttaattgctgttttgcaaataagaatagtcaatccagacccatattagtatgtactttagaacaatttatgatgagagaaaatcctggagagtcaggcaaaaagaaggggctgttgcaaaccaacaaagatggaaaagtgggaagataggggtgggtgataagagaagagtgaagacgattacaacttaccaaatattatctatgagatgtgtggtgttttagcccagtgaggcaacttaataaccacacgcaaagagggacagtaggagtcctccctccatccttctacacagtgtggggtatctcattgcaagagggaaaacatggcacgggtaggtcattagccacactaatttaacatttgtcttttcaaatgtctttgactaaatctatgctgcatagctataattaagatcttcatctctatccacgtatatatctacatccatcagcaaaaatatttcactattcctacagacctattacatatcctgaattttaacaaaaagctttttttaaaaatacaggcatacctcgttttattgtgctttgttcttttgtgagtcacagttactgtgacttttacaaactgaaggtttgtggcaatcccacgtgttaagtatgtctatcagtgtcatttttttcaacagcatgtgctcacttcatgtctctgtatcacattttggtaattctcacagtattttaaagtttattattatttatgttatggcgatctgtgatcagtgatctttgatgttactattctaatttttggggggtgccacaaaccgtacccataatctggtaaatggtgcaaacataatctgataaatgttgtgtgcattctgcctgctctatcaaccagccgtttgggctctctccctctccctgggcctctctattccctaaaacacaacaatattgaaattaggccaattaataaccctacagtggcctctaagtgttcaagtgaaaggaagagttgtatgcctgccactttaaatcaaaagctagatatgacgagctaagtgaggaaggcatgtcaaaagccaagacaggctgaaagctaggccttgcatgccagttagccaagttgtgaatgtaaaggaaaaattcttgaaggaaattactccagtgaacacatgaaaggtaagaaagcaaaacggccttattgctgatatggagagcgctttagtggtctggatagaagatcacgtcagccacaacattccttaagccaaagcttaatccagagcaaggccttgactcccttcagttctatgaagagaatgaggaagctgcagaagagaagttggaagctagcagaagttggtttataaagtttaagaagcgcagctgtctctataacataaaaggacaaggtgaggcagcaagtgctgatgtagaagctgcagcaagttatgcagaagatctagctaagatcactgatgaaggtggctgtactaaacagcctactattgaaacaaggtgccatctaagactttcatagatagaagtcaatgccttgcttcaaaggacaggctgactctcttgttacaggctaatgcagttgatgattttaagttgaagcccatactcatttaccattctgaaaattccaaggcccttaagaattatgctaagtgtaccctgcttgtgtagagtaatggaacaacaaagtctggatgataacacatctttttacaacatagtttactgaatattttaagcccagtgttgagacttactgctaaaaaacaaaaaaaaaaaacaaaaaacaaaaccaaaacctcctttcaaaatattactgctcaaggcacctagtcacccaagagctccgatggagatgcacaagattaatgctgttttcgtgcctgttaatacaacattgattctgcagcctatggattaaggagtacttttgactttcaagtcttatcatttaagaaatatattgttagtctacagctgccaagatagtcttctgatggatccgggcaaagtacattgaaagccttctggaaaggtatcaccatttagaagttattaagaacattcataattcatgggagggggtcaatatatcaacattaacaggagtttagaagttgattccaaccctcatggattactttgaggagttcaagacttccgtggagaggtcactgcagatgagggagatgtagcaagagaaccagaattagaagtagagcctgaagatggggctgagttactgcaatgtcatgaaaaaacttgataagaagttgcttcttatggatgaacaaagaatgtttgagatggaatatacttccaatgaagatgctgtaaactgctgaaatgacaacaaaggattcagaatattacaaaaacttagttgataaagcagcagcacagtttgagaggactgagtccaattttcaaagaaattctgctgtgggttaaatgctatcaaacagcattgcatgctacagagaaatcttttgtgaatggaaaaatcaattgatacagcacttcactgttgtcttattttaagaaattgccacacacacagccatcccagcaaccttcagcaactaccaccatgatcagtccacagcgatcaatactgaagcacgaccctccaccagcaaaaagattagcactcactaaaggcccagataattgttggcatttttttaacaataaattatttttaaagtatatattttttagacacaatgctattgcacacttagtatgttacagtatagtatataaataacttttacatacagtgagaaaccaaaaagtccttacaacttgctttattgtaatattcattttattgtggtatggagccaaacccacaatatctctgaggtatgcctgtatcatattttttaatcaaaaagatgaaattttagagaaaagggaatcaaaatgaatataaatcacaacattccaaatgtataaatggagaaaaggaaactttaggagcactaagagtgtcagcattatcatttccccca

SEQ ID NO: 94945 - DNA, 16940 bp, Homo sapiens
  misc_feature (1)...(16940): n = A,T,C or G
ccaaactaactttgggaggaacttataatttagctttgaaacaaagatgataacagtgcttttccaaaacaaacactattgcctatagaccggactgcctaaagccacaagatgagaagttatggtaatcttactaaatttaagatgtagctatttttattaaaccaatattaatgtcttatttattaaagatttgttaaatatagtgaactccaagtttctcttcaaagaatcagtatgtcagtatgttcagctctcttattctttgattctccattttaaagtttagcttcctggttctctttgccccctagcttctagtttcagtaaacaactttcccgccagtcctaatcagtagttcacagctgttcccctggtcacctgctttgacctgagtcactcttggtcacctactctgtcctgattcatcctgagccaactgttctgtaaccgcccttactgctaaactactcaccctgccactccggctggtactcctgctctttttaaaatagtcaatyggaattagcttagactgtgcggtccaaccctatccaataggggaacgacacagcagtaggggctacctgcatgaggaataagaactcctgcccctcccctgtccaagtgtgctctcaccattgtttcatctgcgaggggcaccttttctgcagaaagtgaaaattgccttgctgagaaaactaaatttatgtttgagtgctatttctttgtggcactggggaataagcattttgcatttctaacaagcttacacaagcaaagatcattctgttttgggctgggtatatagttttgtaacccctatgagaaattttgacaccttatagtatttggcagggataagtatgaaactgctggattaatatgcaaacaaaaatgtatgctggcaattcttcagacatttctaatattactttaccagtaattttaaggctagcttatttattaataattttactgagttacataaacttgaaaaaatatttgacgagtcttttttcctgataaagcatttcattcgagcacttttattttcttaagccagttaattagagctcttttaagcattttcagtagtgaagcattgtgtacacaacacataaatacatagacgtattaggcatgctgatagaagtacatcttatggatacactcagattattgataacctgcttcacaaccctaggcagttgtcagctaactagccttatgtttgcatattaaaggaaacaactcaggtgaaaatcaaatagcaaaatttacatcataaggtacagagagaaaaagtctgatggtgccagagggagatgaaagatgaatgccaaatcaaacataaaattaaagaaatttgccgggtgtggtggttcattcctgtaatcccaacactttggggggccgaggtgggcggatcacaaggtcaggagatcgaaaccatcctggctaacacggcgaaaccccgtctctattaaaaatacaaaaaattagctgggcgtggtggtgggcgcctgtagtcccagttatgtctgtactctctggagtacagagatcrccccactgtactccaacctgggtgacagcgagactctgtctcaaaaaaaaaaaaacaaaaaagaaatttatcataggattgtataaggagactagttttatttagataaagggactaccttttaagtggatctctgagctctgggcagagcccacactgaatcctgggtctccaagaagggacacttattatgaggttagaacacgtgatgcttttacagtgcactttttaaaaaacttcttttaaacaaagacatttctaagtgtctaaaccatagtcttccttaaaaacccaagggtaggctgggtgcagtggcttatgcctgtaatcccagcactttgggaggctgaggcgggcggatcatgaggtcaggagatcgagaccatcctggctaacacggtgaaacccgtctctactaaaaatacaaaacaaacaaacaaacaaacaaacaaacaaaaaacaagctgggcatggtggcgcttgtagtcccagctacttgggaggctgaggcaggagaatggcgtgaacccgggaggcggagcttgcagtgagccgagattgcgccactgcactccagcctgggcgacagagtgaaactcagactcaaaacaaacaaacaaacaatacaaaaaacaaaaaacaaaaaaacccaagggtaacctctgttgcaataactattttagtcaaaaaaaaaaacaaaaaaaaacccaaaaaaaaaccacaaacaggtaacaacaatacaaaagtaagcagttgaagagacgagacgaacttgcctgtttacactctggggattgcataagaaaaaacaggtttctcccttaaagggagcctggtgccttctctgttctctttaaggaaccccagctattataaactattttaggtccctcatgcagcagagggtgcaagagaaaggagatacagccgaagtaaatgaagaaaacagaattcagtcaactgagaagaaaaaaactttcgctcaaaaaaagacaagattcttggagaaaaacaaaaacaaaaacatgaagtccttttaaatacaaacacacacacgcacatgcgcacacacacacacaccacacatacacatgcacatcttcgatgttagcttttaattaagctgacttttaatcattgagctcctttaaaaaaatcttttaaaatctcattaccatatttcagctaggacaaattgctgctatttcagaagcacagccattgctctttcagtttggcctggctagcaaaaaggtggcctcgttgtgtaactaaagccacttagtagtcaaaataaaaaatctttccttttttttttccttttgctggctgtttttcaccccctatcacatcatcctttgtgtatgtgtgtgtgtgtgaatttagccacttcagaggccttgttccccataatttgggacttcctttgtatttgatcaagtcagatagagttgatcaaacccaatgggaaaaagactgaaagaacaacaaaaagagaaatgaacaacaacaaaacagttaagcaaaacaaatgatcacacaatttatatgattactaagctttctagtggtaaggagaaattaagaccagctggttgtaatcttaactttagccaaaacaaaccccaattcagttacttacctagggatgggtttcaggctgaagactgctctctaccatcctagaagcagggaaaaaccctcatcttccctgttggttgcgagctcaaacaccataaaggagttacctgccttccatcaacatggaagcaggaaaaatttgccttccttgtgttagaagcaagtaaaactccaaaaaaaaaagaggagttgtacaacaaaatgaactttagatcttgaccagattttgaaagataaggtattctctggagggtgtgcttccgggcctcagcaaattgtcctattggtttgagccataaagatagctcaagctggtaccaagcactgatagctttgtcaaaggtcaggggcgcctccagtcagaattcttctgtggttaccaaaatatgaaccccccaaatctgagaaaggtctcagttaatttagaaagtttattttgccaatgatgatggtgtgacacagcctcaggagatcccaatgacatgtccccaaggtggtcagagcacaatttagttttatacattttggggagacttgagacgtcactcaacatacgtaagatgaacattgtttgggtctggaaagacagggagggggcttcccggtcataggtagataagagacaaatgtttgcattcttttgagtttctaattatcctctcaaaaggaggcagtcagatatgcatttagctcagtgatcagaggggtgactttgaaagaatgggaggcaggtttgccttaagcagttcccagcttgacttttccctttagcttagtaattttgggggctcaagatatttccctttcagacctcttcagtagaattctttcttctgatgaggcaagcattgagttttatgtagacctgtatggatttcccaccactcacatgaagaccatgacctgtgacacattccctggaggtcctgagaacatgtacccaaggcagttgagttacaactggttttatacagtttagggaggcatcagacagtaatcaatataagcagggtatgcattggttccttctgattgagggaggagcttacaggtcataggtgaattcaaagacttttctgattggcgctgggcacggtggctcacacttgtaatcccagcattttggggagccaaggcgggtggatcacttgaggtcaggagttcgagaccagcctggaccaacatggtgaaaccctgtctctattaaaaatacaaaaattagctgggcatggtggcactcctgtaatcccagctacttgggaggctgaggcatgagaacagcttgaacccaggagatggaggttgtagtgagctgagatcacgccactgcctgagcaacagagtgagactccatctcaaaaaaaaaaaaaaatttctgattttcaattggttgaaagaagttattatccaaagacttggaatcttggtatacaacaacaaaattttttttaaataaaaaattttaaaaaagacaacctggaatcaatagaaataagcatctgggttaagataaggagttgtggagaccaaggttctttttttttgagacagagtctcgctctgtcgccaggctggagtgccgtggtgcgatctcagctcactgcaacctccacctcctgggttcaagcgattctcctgcctcagcctcccaagtagctgagactacaggcgtgtaccaccatgcccagctaatttttgtatttttagtagaaacggggtttcaccatgttggccaagagggtctctatctcttgacctcgtgatcctcccactttggcctcccaaagtgctggcattacagatgtgagccgctgcacccggcccaaggttcttattatgtaacatagatggtaaatgtctaaggcgttaaaaggtgccagactcttagttaaatctcccttagatcaggataaaacctggaaagaggctggacgcggtggctcatgcctgtaatcccagcactttgggaggccaaggcaggtggatcacgaggtcaggagttcaagaccagcctggccaagatggtgaaaccctgtctctactaaaaatagaaaaattatctgggcacagtggcaggcacctgtaatcccagctacttgggaggctgaggcaggagaatcgcttgaacccagtgggtggaggttgcagcacgctactgcactccagcctgggccacagagtgactctgtctcaaaacaaaacaaaacaaaacaaaaaacctggaaaggggaggggattctctacagattctagattttccccacaaaagacagctttttggagctatttaaaaaaaaaatcagaggaatatattttgggggtaaaatacattgatttctttcagggcctgctatctgtcaggtgatgctagagtcaggttggaatttggtatcttattgctacaaagagtctgttttgtgtcttaagatcagaatgccttaaggtctctgttttaatgttaatgctggtcagttgtgtctgaattctaaaggaaggagggggataatgaggcttgtcctaaacctcttcccatcacagcctgaattaatttttcaggtttattttggaatgccctgggctgagagggaggtccattcagtcggttgggaggcttagaattttatttttgccttacagtttcccaaaacgtccagtgaacctcgcctctcctttagaagtgtcgtccctggagcccacgaaaatgtctgcaagatctgcaagggccaccttaaagcccgtgccaccttaagcaggccccacccctggcctagccaatgggctgacagcagcagtakctgctgccacagtagctgactggtcaccctgccacccagtgctcacaccctctggccagtgcctggctatggcccgactgctcaggtctgcaacctgggagctgttcccctggaggggctactgctcccagaaggcaaaggtaccgggagagaagagaagtcctctggagggatgaggtggggagcggggagcagggggttctgatcccaagtttcctgggctctgtgacgccccagcaccaagtgacctgaccttgggcaaaagggcactgggcttaccctgtggcaactgtgggtgggtgtagagtgagatcagctgagtccccactgctaccatgagtggggctgggggagtcaaatggatgcccctggaataaaacacacctgtggaagaaggccctgaaggaaaggncctgggttccaggccaggctctgtccttaacttggcctccatttctcatctgtaaaatgggaagaaacacatcccccgccccgccgcgccccgccccccacgaagggcccagaagccccaggcaacgtagagtggggagggggcagtggaagcttttcctccccctaattcccttatcaagctctgagttccctgtggctggggtggtgcttggttggccctggagaaaggaggaagtgagggatcttttcggttgctcaggctgggctggctattgaaggaaccctgctgatagcctttttggagagtgaattctggttttttatttggatggctgggcgctgtggctcacgcctgtaaccccagcactttgggaggccgaggcaggtggatcgcttgagcccaggagtttgaaaccatcctgggcaacatagttaagaccctgtttttattaaaaaagaaaacattaaaaaaattctggtggcgtttttttctgaggggaaactttgacccccaatggctctgtttggaaaagaggcatttctggatagtgggtttgtttaaagtgggcccacctggcaaggatgttgtcagcggggcgggcgcaggggaggctcactccagcctccagcccccagccctccccccgacactggggcagggctgtggccccatgtgtctttcgggggaccctggcagtgtgtttcttccctgcagggagagctctgcagggacttcgtagaggctctgaaggccgtggtgggcggctcccacgtgtccactgccgcggtggtccgagagcagcacgggcgcgatgagtcggtgcacaggtatgggagggttcgcgggcccctcccctgtcttctggattcaaccccagctgagagagagggtgctgggttgccttcctcctcactcatctgttttggggtgctctggcatgttctctgcccctcgcttgctgtagcctcaggccctgcaacacctcgggaccagagggtgtcacgccccgctaaatcgctgagggtctggttctaggtgcgaacctcctgatgctgtggtgtggccccagaacgtggagcaggtcagccggctggcagccctgtgctatcgccaaggtgtgcccatcatcccattcggcaccggcaccgggcttgagggtggcgtctgtgctgtgcaggtacagtggggctccctcgcccggcccgaggatggtcccagcacaccttggcacacctgtggctgcctcccccgccacacacggcaccttgggtctgctcccgcccgtgggctgcctgcctctgggggtctggtctggctgctggggggacacccgcggggtgtggtccggggacgtggccaggtcagagacccaggtctgcagtggtcttagcacctgccccaaccagggcggcgtctgcgttaacctgacgcatatggaccgaatcctggagctgaaccaggaggacttctctgtggtggtggagccaggtgtcacccgcaaagccctcaacgcccacctgcgggacagcggcctctggtttcccgtgggtaggactcgcgaacctttcctgggaccctgagggcaccgtgggagcagggctgtgtctggggttcaggggaccttcctcccccagcccgagggaaaggacctccggtccctgaggctgcnttctgtacgcygccctccagacccrggcgcggacgcctctctctgtggcatggcggccaccggggcgtcggggaccaacgcggtccgctacggcaccatgcgggacaacgtgctcaacctggaggtggtgctgcccgacgggcggctgctgcacacggcgggccgaggccggcatttccggtgagygccctctgcsgggggcccgggctctggccctgrgcactgctggcgggctgccctgcagagaccgggctgtgaaaagcacctcctggcggccccctggtttggcaggctaggcttcctcaggctctgaagccctgtcagctgggccaaagtggatgggaccagggtttgctctccctgcctgaggccgactggctttgtggagcagaaagcactgggccagggaaactgggcccgagggaggccagcccagacctcagtgcctggggtcggtgtcttgggttccagcttcggcttctggccagaaatccctcatcacacagcctggtactcaccttgtgtgtccctgggacgtargaagagtgcagccggctacaacctcacggggctcttcgtgggctccgaggggacgctgggcctcatcacagccaccaccctgcgcctgcaccctgcccctgaggccacagtggccgccacgtgtgcgttccccagtgtccaggctgctgtggacagcactgtacacatyctccaggctgcagtgcccgtagcccgcattggtgagctgaggatgggggcagtcagggtgggctccctggaagaggccccctgggaaggccaggcctcacctggcctgccatctccctggatccagagttcctggatgaagtcatgatggatgcctgcaacaggtacagcaagctgaattgcttagtggcgcccacactcttcctggagttccatggctcccagcaggcactggaggagcagctgcagcgcacaggtatgctggggtggagtggggcagcagggtgggctgcctcagtggcggcccggtgtcagccccccttccccaactgcagaggagatagtccagcagaacggagcctctgacttctcctgggccaaggaggccgaggagcgcagccggctttggacagcacggcacaatgcctggtacgcagccctggccacgcggccaggctgcaaggtgagctggggctggggtacagatggggcccacagctcggcccacaaaccctttcctcaacccaccactctactgcacagagcagcaggctgagcctcaacaacggggctgggcctggctgagcaggcgctagaaacaagggctgcagaccgccccacccagctgttcagataccgtctacagggaaagcacagttgtctgctaagccctcaaaagcccttcctgtgagccaggtcatgggaacggtgcggtgctcttgggagctgtacatggaaggaaggcttcctggaggaagagatgatagagagggggatgttagcctaacctggggaagggaagtctgggctccaggcagctatgcaaaggctcagcagcctggggcttgggggtgggagccacaggggaggtgtggcaagcacacctgggccattggtctcctgtgttgtgtcggggggaggtgagggctgaggcctagagaagagcaggattatttccttgtgtgaggccaagagctgaagcccagtgccctcygacccatcctcagccttgaccacggtgaccccgtacacccaatcaggcaggggtaactcataggcttccctctgaccagggctactccacggatgtgtgtgtgcccatctcccggctgccggagatcgtggtgcagaccaaggaggatctgaatgcctcaggactcacaggttctgcccaccctgctgctsgggagaggtggggaggtgtcagggctgatcagagcctggggcagcaggaggcaagaggaggactgggctggagaatagttctgtcctctgggcccccaggaagcattgtcgggcatgtgggtgacggcaacttccactgcatcctgctggtcaaccctgatgacgccgaggaactgggcagsgtcaaggcttttgcagaacagctgggcaggtaggagcaaagccagggaggggaagagctgagggcagaggaaagggagccccctgaggatgtctccttcctgcccccaggcgggcactggctctccacggaacgtgcacgggggagcatggcatcggaatgggcaagcggcagctgctgcaggaggaggtgggcgccgtgggcgtggagaccatgcggcagctcaaggccgtgctagacccccaaggyctcatgaatccaggcaaagtgctgtgaagggggtctgagcacttagcccacaagttccctgactacggagccggttctggaacttttcttcatgccacggcccctgcaaggaaatagatgctgaggcagtcttcctgccagcgagcccactgtatctgggcccaaggccagagggcccagagagaagcctgagcaccgtgttacctccctggccctctggctggccccaggagcctttggttcagtaaacgacccagggtggttcccagcaaagctgcttcctctctgctcctacgcatcctgtcctggcgggaagagagcgtctgggtccattcaagactctgatgacacccctccccgaggcctcccactgccggggtcccaggacccttcccccttcacctggtgacaggaacactcctttcctggtatggaacgtgagctcccgtgacatgatgataggtcttctccttggggcctcccccaataaatctgtaataaacctgaaacccacctacagctacctggaagtcagcaggcagcacttcctcccctccccctccagggtctctgtcctttggtcagtgacccctttgttttggggctgtcctctgacttcttatagcctggggaggaggttggtgctcagggttcggaaaggaacccaggtccctgtcccagctactccgcctcagagctgaggacctgcccacggcacatgtcactcaggatgggctccccaactgggcctgaaccgggcctctgaacacactgaatgtgttcctcagcagctgccacgtctctagaaacagagatgagactatttttgcacccacctcttcatggggtgatgtatcgtaccaccagctgttttgccctcaaggtctgtccacccgagggcctgcccctgtcttgggccggagcccgtcttgagaccttggcagttgttcccccctaagcccacaggagggcgcccgaaatcatgaagctcagataccacgcggcatctgcagctcacgactcctctgcccagggcctgcggcactcagccctgggcaaacctcctcctagggtcaggtaagtcctggcagcctggaagccaagctagtcctccatcccctgcaggtcccaggaacctgcagtgctgtctcatcttccttgcccctctagccttcggtcccttttggaaagaggcatgtcacaccccacgccctccctggcctccgcccctctcctcctcccatcagctgtcagtgctcaggcaggctgctaggccttaggcagaggcagctgcgctgagacgccccagtccaacttcagttcttggaacccctcctccgtgctaatactgggctccagccgacagcagttacaccaacctgagcctggaggctactcctccgtgacgtttctgtcccgtgctgccctggtggggagcagagaccgtgccaagggctcactggtgacaaatctcagccctctccccaaaccaccccagcacgcgtgtgctcatcaccgagacagccctctcgcccctccccttccagccagccagccagccacccactcttccaggcgagaatcctgcagcagctgcgctctccctcctgggtaggactcttctttgatgcgccctccagtgcctggcaactaggaggcgctcagcaaatgaccatttcccacaatcttttattaagaaaaattccaaacatacagaaaagttgaaagaacaagtacactgttcactgaaataccagccactgcagattcaacaatgaacattttggccttatttgctttgtgtattttggggggaactatttggaattaaattacacatttcttgaaggcattcacctatataatccagcawctatctcctaagaatgaggacattttcccatgaactgcagtaccgttaaatggctattagaggaatggttggtctttgtgagggtctcacgtccaggaacctcatcaaagygtgctaggcccttagcagagagggtagaacctgctcgccggctccctcaccttctctcccatcccagaaaggcagaacaggggcaacacaggattctggagagctgtccagatagaggatcacaaacatgagctccacctgggaaacacagacagccccaatcccacccccacaacaagagcaggcaacctgggtccaaattcagaggacaccacagccggcagagggctgcagcatgccaggtaggacggaagtcgctgggggtggggatgagcaccagcccctagagcctggaatagcacccggcgtgggctacagccctgccccacccacctcacagctgctcggctcacccatggcactgccaaagcagcaggcttaagccgccaaggcgggcacatgaagcctccatttccaggtccaggggtcaggcaaggagatctccttcagggctgggccctgcctcgccagctttgctggtggaattaaatatagcacagggagacacagttgccaggcagaagcaggaggtgctgtgaatagaacagtgccctttgtggtgacaaagctatggggagcctgctgtgcatgtgccaagacctgcagggcagctcccccagcccccacagggacctctgagctgcatggttttgtccccgcttcacatgtgaaatatctgaagttcagatgaagtcgtttccccaagatcattctgccaagtaggagagcctgaatgcacagtctagagcccacgttcctgccaccgactcacaacagccccaaggtcttcaccccagacgggtcccgcgctgagacccaggctctgaaccaccgagtcttctttagtgtttctccgctggccctggctcacgtttgcccactggcctgttgtgaatgcccttgcacagagtaggtgcttctggaagcatctgatggagggtgactgcggagccaggggccgtggcagcagggggatggtccagcacatcaggcgggcctgagaagggtcagagcagagaggcggtggagtcgtctccctctagagctttccttcrctggctctgcaggaggctctggaatgctgctccgggagcccgctgggcacggggacacaggccaggcctgcactgctgctccctgccccgagctgcctgcccagcccgcattttgccaacttttgtgagcctgagcagttggttctggttcaagggctctgagctggcacagccccaaaccagggcctcttcctgggcctcaatgaagcatgcccgtgagtcagcactgagacgcaaactgaacaacaggcagggcgagtggaacgtgggatggggagcaaaggctggaaggaggggggctgggcccacacctggaagaacccacatccttgcagcctccggtggctgcaacatcttggcccctgcagatcttttcagaggtccggcacaatgactccacagagggctgactggttccatgatgcttaagaggttaggaagcttgtaggaggcacgcctgacttgccactccctccacccaggcctgactatctgaggaccaattcacacacctggagccccgagtagcagcctgaaggaatgctaaggaggtaggtgagggagtggggggcaggcccttgcccccatttcttgattgtataacacttcattaaaataaaatcacgcagtgccatcttttattagacattttaataccatatcaaaacaccttgactaatgaagaaagcttttctcccaagctttgaacatttttttaaacattttataagtttttttttgtattttaatatataaatacagaaacctatcttgcatgggctgatgccacgtgtgaacatcaatggctaaaatgttctcaaacatagtgcctgaaaacaggggtagctgtacatatttcttagtaagtctttttttgtttaagttttctgaaaaaaaaaatccacgagggcctaagaataatgttcaggcatttttgcaggacacttgtgattgttaaatcctctgaactgaccggaaccaggaggaaagaagggaaaagagatgggatcagtaggaagaaagttctcaatgggttgttttttggcaatgaagtcaagatattagggtctcaaggggagaaaagagcaaaaaaccagccagaaaaatagagggaaaaaaccaaacaaacccaaagtagagaagttggtggtggagagggccagttggggcaggggaagagaccgtgtgctcgcccgccgtcagaaggctggcagcgaggccttagctgtgttcgtctgtcactgagtgggttatggctgggcagcaaacagcaagctgtaaacatcacgagggaaaacaccagtcgacactagactttttttttatataatttttttttgtaaacactttaaagacagacccacaatgcctttcaaagatgaaaaagaaaatgccctttccctcctgggctgaggggtgaggggaaggatagcagttgattcattcttctctcaaacttgctctcatccaatttggtgtcctcagggaggaagggagaaccatgatctggaagtcagtgcagaaggggtgccctgttcccgctggtgtcccaagctcagctctgccccagggtccggtgagcctcctccctggagcaggggcgctctgtccctgtgtggaccgtaataaataagtcgtgctccatcgggccgagggctgtctgctcatcccagggcagctgcatcccaagagggcaggcggggctggggcgtctacacaggaccccagaagccaaacagcacacggggaatttgcagccatgtgcctgggcaggttctactcccctgcctcactctcccccctggctctttcttctccccttgtcatcagtttttgaggtggaggtaaaaagagcaaatgtccctgatttgtctgacatcatcagctgttctgggagtttacttggaataaataaaataaacctaacaaaagaaaacgaaagcaagagagagagaaagggaggggggaagaaaaaggtcccaaaacctttggctgtgagatggagttgggcttttggtttttatgggggttttgtctacttgtttgccagaaaaaggaaaatgccagcccagaacttggaggggacaggtgagatgggggtcaggggtggatggttggcagcaagtggggtacccctgggggagaaatggggaggccagacccagcggtaagccagggggatgtgtggagtcagcacccagtgctgtgggatagagggatcgagtctggcctggaggcctcagattcatctggaagcggcatgggaagaagcagtggtcaaatgatcgctgaccagcactttgcagggaacaatgcactgcccatggctgtttagtaagtgcaatgtccttatggcaacagggagtgagattatccccgttaccatagaagaggcggagactcagaggtgagcgaggatgaggccaagccaggcacaaacccaccgctcaggctccttttcctgcccgtgcacattcccaggggatattcctgaactttctttaggaatgtagattgtactggtctcttccccaactgatcctaactcttctgagcctgttcttcataactgtccatgttggtttgtatctcttgtccttcccagggaaaatcatttccggatgactaactgctcactgatgaggtgctccttccctctgctcctgctttcttctcagtggcataagggcagcccggctccctaaactgcaggcccccaaagtgacctgaccccaagccttgagcccggagcacccccaaacgcgggctcacctttgagaggagtcagcaagcaagcccgcaggtcagtccgcagggtgttccggacaagatctgttcacttcaaaccacgagtctatgcagctgggaggagggggccgcaagggaaaccacgttacctgctgcccaggctgctttgaaggggctctttcagagggccagattcctgagcaggagcttcctaagtctcttctgaaaggaccccagggaaacacagtcatgtccccagatatccctactttctgaagcacgaagaagggtgaacaccaagactagtcttggcccaggtggaggcagcagtaccggctcagggggatctggtgctgcaggaaggggcagagtggctttcagaaggaccaaagctttctgtgcagagcccaggagaatggcagcagccaccagtgagaaggtgagagcggtggacccctcagggcagctagtcagctgtctccaagactcccaagggcagggaagtgggaacaatggcatggcaggagggccacggctctgggtgccacagtcctgaaagagctccttcctgggtcaaaagaacagctgtgaagctccctcccagtgggtgacctcttaggagagccccaagctctacccggctcagccatgatcagctgatcagcagcatctagtccttcctgcaagaggcgggaggggagccagacagtgaagccctgctctccagtgtttacagaga

SEQ ID NO: 94946 - DNA, 73857 bp, Homo sapiens
gcatttttgtagttttcagttagaggttttagataatttttgtcaaatttatccttgcatactttatgggttttgccactattataaatgaaattctaaaacattattttccaattgtttgttgctagtaattaaaatatgactgatttttgtattttgaccttggatcctatggacttgctaaatttacttattagttctggttgttttgcaaattggttgagattttctatgtaaacgatcatggtctctgcaagtagaaagttttcctccttcatttcttctttttatggctttcttttttttgtttgccttacatcactggctagcattgctaatgttgaatataagtgataagactgccatccttgccttgtttctaatattagggctagagattttcatgcatctttcatggagatgtaaaatagtatatccacctagaagtcaatttacattctcttgcaaatttgaacacttgcgtactctaggatgtactcctaggtacataggctacagaaagtctcacccataggtataagaaatttcacaatagaaaaaaaaagaaacaattaaaattcctttgaagaggaaaagggaaatgaataaattcatatagtggaatatgacatagcagtgaaaactggtgtgrtagcacgtgcctgtcatcccagctactcagcaggctgaggcagaataattggttgaacccaggagacggaggttgaaatgggctcagattgcacctctgcactccagcctgggcgacagagtaagactctgtttccaaaaaaaaaaaaaaaaagtgatcctcaacactggatggagtgtcggatgaatcttcaaataaataaagcatgcacggccacataaagctaaatagagtatcacatgattttcataaaatcaaaaccaagctgatctaaataatacattctataggcacacacttaggtgtgctaaaaatattaaaactaaaagcagactgggcgcggtggctcacgcctgtaatcctagcactttgggacgccgaggtgggcagatcacctgaggtcaggagttcaagaccagcctggccaaaatggtgaaacctcatctctacaaaaataaaaaaattagctgggtgtgacggcagaagcctgtaatccagttacttgggaggctgaggtatgagaattgcttcaacctagaaggcagaggttgcactgagccaagatcacagcactgcactccagcctggggacaggactcaattctgtttcaaaggaaggatgagcataaacatcagggaaaattttatgtctttgtaaccaataggcagagaggtgaaaggtttggggtacagtagtaggtgcaagtttttggtaatgtcctagctcttgagttaggaggaagattcaaggagttaaggaaactttttgctttaaaaattacatatatgtttttgttttcataaaaatatcttaaagattaaataattaaaaatagcaaactagtttttagcatgccatacacaccattcctgttgttttcccctacaatactctggagattattctaaattagtacacatagatctacctcattttttctaatggctacatagtatttcactgtctgaatataccatagtttatttaatcagtcctccctcatgatgaacatttgatcatttctagtctataaatgaggttgcaattaatgttattgttcatgcatcttgatatagtatatctgtaagattaaatttctagaagtggaaataactagggcaagaactgtgagtgttacaattctgaacagatggccaaatcatttgttcaactgtaaacactgggagttcacagccatggtgagaaatccaaatgggagtgcccacagatactgtcagcaagaagtgcctgagtacacctgcgactgtgcgcttggctgctttggcacatgaacgggatttgcagcagagtaggtgtggaagttgggtaaaggtgactacttatgcattcaccgcttgagaaaagcaacaactctgttgatgtgaggcctctaggcctgacggacaggtgctccatagacccacagacagcaaaactctcgcctactccctgagggtcagtccgaagagaagggagagggaagaggggcggctcttctgacctggggacccctgaggcatctgggccaggcttcccatacttgaactggcccagcacagatgcctggccccagaagggcacaaatggagatgatccttaaaatatctttcctgaaagagacaaagccagctggatgggttagcctctgtaccaggagcatttgattacaaatcatgagttcaagtgggatcccctgtggctgagcaagtaaagctgggtgtggcttttctgctttttgttttctgtttaagagatggagctcactctgttgcccaggctggagtgcagtggtgcagtcataggatactgcagcctcaaactcctggactcaagagatcctttggcctcagcctccccagtagctgggacgataggcctgcatcactacaactggctaattttttaaattatttatttatccaattatttttgagatggagcctcgctctgtcacrcaggctggagtgcagtggtgcaatctccactcactgcaacatctgacgcctgggttcaagcgattctccagcctcagtcttctaagtagctgggactacaggggcatgccactgcgcccgactaattttcttgtatttttagtagagacagggtttcaccatgttcgccaggctggtctcaaactcctgacctcaggggatctgcctgccttggcctcccaaagtgctaggattacaggtgtgagccaccgcacctggcctcaattttttttttttttttttttgagacagagtttcgctcttgttgcccaggctggagtgcaatggcacaatctcactgcaacctctgcctcccgggttcaaatgattctcctgcctcagccttcctgagtagctgagattacaggcaggcaccaccatgcctggctaattttttatttttagtagagatagagtttctccatgttggtcaggctggtctcaaactcccgacctcaggtgatccgcccacctcggcctcccaaagtgctgggactacaggcatgagccaccgcgcccggcctggcctcaatttaaaaaaaaaatttttttgtagagacgaggtattgctttgttgcccaggctggtcttgaactcctgggctcaagcgatcctcctgccttggcctcccaaagggttgggattacaggcatgagccaccatgtccaaccaagtttttcctgttctaaacaaaactgtgatgaacaaattcagtcctcctttccacacagcatcacccccagcctttactcctgtaggcccctacttccccttctgtaatggagacagtgttctctgttctcccctcaggtccttccccagggcccaggattagagtgagggagtgaggcactaaccctgagagcaaaatctacaggcatgccaaaaaacaaacaaaaaaaagtaaccaagataaataatattttaatgcagtattgtaaaacttcaagattaatgcaaaaaaatccatgatggacaaaatatcaaaattttaaataaaaacaggagctaaccctgcactttcacatccctgtctcatgaatccctggccctggttccaataaaactttatttacaaaaacaggtggccaatgccacgcccccaaccccacccctcacccctgtcttttgacaatgtgattttttaaaacattcttaaatattttgtattgcggtaaaatatacataatataaatttaccattccaaccattttcagtgtacagttcagtggcattaagaacattcacattgtgcaacaaaataattttttttttgagacagagtctctctttctcgccaggctggagtgtggtggggcgttctcggctcactgcaacctccaactcccagattcaagcgattcccctgcctcagcctcccaagtagctaggactacagatgcgtgcctccacagccagctaatttttgtatttttagtagagatggggtttcactatgttggccaagatggtctcgatctcttgacctcgtgattcgcccacctcggcctcccaaagtgctgggattacaggtgtgagttaccgcacccagccaacaatataattttttaaatattacgttcaggtattagatatagtgatgactgagttttggggtgccccattaaattttgccctcgaacattattaaaaagtcaagaaacagtagatgtctgcgtgtatgtagtgaaagggggatgcttatgctatgcactgctggtgggaatgtaaattagtacaacttgtttggaaaacagtacagagattctttaacaaactaaaagtacactttggggctgggcgcggtggctcacgcctgtaatcccagcattttgggaggctgcggcgggaggatcactagaggccaggagttcgagaccaacctggccaacatggtgaaaccccgtctctactaaaaatacaaaaaaattagccgggcgtggtggcacgcgcctatagtcatagctactctggaggctgaggcaggagaatcgcttgaacccgggaggcggaggtagcagtgagctgagattgtgccactgcacttcagcctgggcaacagagtgagactctgtctcaaaaaaaaaaaaaaaaagtgcactatgggaggccatggcaggcaaatcgcttgagcccaggagtttgagaccatcctgggcagcatggtgaaacctcgtctctacaaaaaatacaaaaattagccaggcgtagtggtgcatgcctgtagtgccagctacttgggaggctgaggtaagaggattgcttgagcccgggaggtcgaggctgcagtgaaccaagatcgcaccactactctccagcctgggtgacagagtgagaccttgtcacgggaagggaagggaaaggaagggaaggggaggggaggggaggggaggagagaaaaagtagattcaccattcggtccagcaatcccaccactgggtatctacccaaaggaaaagagtcattatatgaaaaagacacttgcacacgaatgtttgttttttgcagcccaattcacaatcgaaaagatatggaaccaacttaaataaccatcaaccaatgagtggataaagaaaatgtagttgatatacacgatagaatactactcagccataaaaaggaacgaaatgaagtcttttgcagcaacttgcatggagctggaggccattattctaagtgaaagtgattcaggaatggaaaaccaaacactgtatgttctcactcataagtaggaactaagctatgaggacgcaaaggcatacagagtgatataatggacaatagggagaatgggagggggtgtaacacacacacacacacaaaaccctacacattgggtataatgtacactactcgggggacaggtggactaaaatctcaggacttaccactatacaattcctccatgtaaccaaaaaccactggtaccccaaaagctactgaaattttaaaaacaaacaaatatttgcacccgaggcgagcacctcattcgcctctcgctctctcgggcacctcctggagccagagggtcccatgcggccagctcctccgtggaagcagttgaagttattccagcagcgatcaggccaccgaggatgtccgcccagacaaccacccgcgacggggagactcgctccgcctgtgtccgcccaccctcctcccgcgcgggacacacctggcgggcgcggcactccctgtccgcggccacctggcgcgcagctcccggcgccgggcccgcccctcgcggctctgccggggctcccggccggccaatgggagcgcggtatgcaaatgagcaggtgcggtggcggcccgcccggaacggccgcggggctcccgggatgttagaggcgctcagggtggcagcagagcagacgccgggctgcgcgctgggagctgcggtctccggccatggcccccgctccgccccccgccgcctccttctcgccctccgaggtccagcggcgcctggcggccggcgcgtgctgggtccgccgcggggcccgcctctacgacctctccagcttcgtgcggcaccacccggggggcgagcagctgctgcgggccagggcgggccaggacatcagcgccgacctggacgggccgccgcacaggcactcggccaacgcgcgccgctggytggagcagtactacgtgggagagctccgcggggagcagcaggtacagccgggccggggccccccaccccaacccaggcctccgtcagccttccactcccgggcgagccccgttcacttgccctctagcaggacccaaggtgacagcttctgccctcccttccctcgctttccctctcttctctccaggcaacaggtcactgtcgtcccctccaacccctccttcctctctccaggaacttgctcttcctttccacccttaccgcctggcccgcctccgtgccagctctcccatttccccagcacccctccttccagcgtgttccttctgcagcccctgccctccgacaacctggattcccgtttctgtccccagccccccatacgcctcggctttccttcctcttcacttatcggcctctccctctttgcaaccactctccgtttctgtttggataatgggctcaacctgttcccacctccccatcccacctcacttctgcttcaaagaggcacagatcagtaactcttctcactagcttgggtttcctggtgccgccctggccttgcctgggccatgtctggggtggactgtgtcctccaacctctcagaccttcccttatattcttgtcctacacgctggcttgggactccaaaagagtgaaatgaaaggcatgagccagttttgccaaggaaaagggaccagcactttggaccagactgtgtgctgagctgcacgcttctgtgcagtaccagctcccgatggtatttaagtccttaactcaacctggggcaggttttgttattcccatttcaggatatggaatctgaggctcagggaggctctgattaatgcgcctaaggtcaaatagctaaatagtgggaaagccacatgtatctgactccaaaatcaatgctggctccatcccaaaagtcttcgggtggaggagacagacctagtccacaggattccaggtaggctcaggccagaggcaaagcgactctcttgatgttccccaggcctggctctgggactggtatggggccatcatgcttagatatacagtagttcccccttgtccaaggggatacatttcaagaccctcagtggatccttaaaaccacagatagtaccgaatcctatatatgctatgttttttcccatatatgcatatctatgataaagttaaatttataaattaagaacaataggaagagattaacaacaacaataatagaatagttacaacaatatactgtaataagagctatttgtatgtggtccctttctctcaaaacatcttatagtactgtactcactcttcttgtgataatgtaagatgataacatgaggccaggcaargtggctgacatctgtaatcctagcactttgggaggccgaggtaagaggatcgctcgagcccaggagttcaagaccagcctgggcaacatagggagaccttgtgtctacaaaaaataccaaaattagccgggtgtggtggcatgtggctataattctagctacttgggaggctaaggtgggaggatcacctgagaggtggaggctgcagtgagccatgatcatgccactgcactccagcctgagcaacagagtgagagctcacctcaaaaaaaaaaagataataagatgcctacatgatgggttggagtgaggtgaatgacaggtgtggtgatgtggcattggctactattgaaaagtaatttaaaacttataaattatttctggaattttccatttaattatgtttttggacccaggttgaccgtgggttactgaaaccatggaaagtgaaaccgtggataagggggactcctgaaaaccaacaattgtcccctgcttctaactcttgctttcaagatgagcccagcaactactcttagatctttggttgaaaggacttagcacccactgtttcaggtggcttttcattgggtcatcctgcctaatttctccatcatttattcagtcatggaactggttccttaatgggttgacagcactgtgctgggtgtggggagatatcaatgaacaaaacgaattcggttcctgtcttcatggagctaatgggataatggggaaggagagggaacacacagatcacatgatagttgcttaattaatggtgtatcagagtacggatctagaggggaggagcatagagagccttcttgagaaagcgacattgacactgagagctgattgataggctgggcttagccaggtggcatgtagcaggaagaatattttgggcaaagggaacagcacgtgtgaaggctctggcaggaagagcttgacatagtaaaagactgcaaataaaaccaacgtggccagaggctgatgggcaaagacagggatgtggggggaggccaaaagtcggccggggccacatcacacggggcttcgtaggctgtggtcaggatttgggacttgactctaacaaaaatgggaagccaggtgagcccgggaggtggaggttgcagtgagccaagatcacgccactgcacttcagcctgggcaatagagcaagactccatcttaaaaaaaaaaaaaaaaggaagccagggaagaggttcaggcagggttcatggtcagatttgcatctttagaagaggacgctggctgcagtttcaaggaggaacagagacagcctaagtgggtgtgaggagatcaggcaggatgctgctgcatggctgccactgcagtggctgtgaccatggggggaagggggatgaattygggagagtctctagacaatatgctgggactcagcattstgtggtgagggcccagtttaatctgagaggttggtgtttggtgtcggctcatgctgaagggtttagaagaagatataagaaaaactgagtgcaggaggccaggcacggtggctcatacctgtaatcccaggaatttgggagggtaaggcgggtggatcacttgaggtcaggggtttgagaccagtctggccaacatggtgaaacgctgtccctactaaaaatacaaaaaattagccgggtgtggttgtgcactgggtgtggtggtgccctcccagctgcttgggaggctgaggcaggctgatcacttgaggtcaggagttcgacatcagcctgggcaacacggtaaaatcttatctctgctaaaaatacaaaaattagctgggcgtggtggtgcatgcctgtaatcccagctgctcgggaggctgaggtaagagaatcgtttgaacccaggaggcagaagttgcagtgagctgagatcgcaccactgcattccagtctgggcgacaggtaagattttgtcacaaaaaaatagaaaaggaaaaagaaaagaaaagaaaaactgagtgcaggaaataagagaggttgagactgacaggtttgcggtggctcatgggcccgccctgtgttgtcactgtatcctctagaaaggagccttagggtgtggctcgtcctcgcaacaccatcctgagtatgcttacagccacccctggccagctgccctggatggtcccacctcccagctctgctaaccacctagcaccatggtttgccttgtctgatgcttagagagggacccagggacccagtctcacatgtgcttctgacctgtatgctcatctgttgcctaagagcccgagggcgggccatgctgcagacatccttacttctgggccccaacctgagcatgtggaacaaaactcaaaacaatgcatctgcagacgcatagcccaaacttgacaatggtcacactagcccagccctccactgggctgccagcttctgccttcagagttctaacctaagaactagtacagggttgtctttaaattgagagagaggaaggctgggcacagtggctcatgcttataattccagcactttgggaggccaaggtgggtggatcacttgagcccaggagttcgagaccagcctgggcaacatggtgaaaccccgtctctacaaaaaattagctgggtgtggtggctcgtgcctgcagtcccagctactcaggaggctgaggtgagaggatcactggagcccaggaggcggaagttgcagtgagccagatcacaccactgtactctccagcctgggtgacagagcaagaccctgtctcaaaaacaaacaaacaaacaaaaaacttgtgggagaggttgtcaaaggagaaatctgggggtgggatatcctttcaaagagatgcctggctggagacaatttctgttcttctccctagctaagcccttctagcaagcctcaagctgccttttgcacttccctcctctcctgctggaccagggatgctgacacccttgtggttagagccccctgtctctggaggagcaggaggcttttgctggggaaggggagtgccatgaaccagctctgttgtttggggctcgtttctgaatggtgcccctcctagggccctgtcctgctggtttagcccttggatgggagcatcctggcccttcccccagggagaaggcctggacccgtttgttccccctgcaccccactttgctgcaccctctgtaggtacacacattcacactcacacgaaggcacattcacaaaacaagtccaacttgtttgagccaacatgctgcctgccacggccttggacatggtgaagccaagctgcccaccttgagcgagtgacagagccgtggctgagcagggaaggagctcagggcggtggggtcaagagcctcaccccaagctcaggcgagagcagtgctctgccagstgcagccacatgttagcagagtatgaagtccacttattgagctgcgaccggcatttttcacaaaagaaatagacaaggaaaggactttaggtctaaacctccttcccaggctatattactgtgtttcccagactctgggcatccatgaatcaccaccccaggtttttttccccccagtttggtgtactatactctggttactcttcagattgtataagtctttcgccttttaccaatttggtgtaccacttgaactgtcataatgtaatatttatctttaaattgacccactttatttttccatgtactcatgcttggcgataataacagtaaaatcaaagcttttacgtgcactttaaagggaatgggggccaggcacggtggctcatgcctgtaatccaggcactttgggaggctgaggtgggcaggtcgctagagcccaggagtttgagaccagcctgggcaacatggtgaaaaactatctctacaagaaaaaattacaaaaattagccaggcatggtggcatgcacctgtggtcccagctacttgggaggctgaggtgggaggatcacctgagcctgggaagttgagcctgcaataagctgtgatcatgccactgcactgcagcctgagtgacagaggagaccccgtctcaataaataaataaagtgaatatggaactggggtttttcctgagccccaagcctgccacccagagcgatgataactgccagagggtggctcatactcccccatgccccaccaatcctggagaggtcctaccgttggcagatatctgactatgccagctgaccatgccctctgcttgagaagactttagggagaaggcaagcctgactcgtcagccactagtgttggggtaaccttgatgtgtgaaggtctcgatgccatgttttaattccacagggcttgtctgtctcagcatggctgagaagtccacagattcagccacacatgggtctgtaagactttgggctctggccattcagagcttaagggcttgaataattaaatggggagggacaataaggaggagatctaagtgcagaaagacttggagtttccaccctacccaggaccgggaacatcttgagctcagcccatcttggaaagccggtctgakaaaaactgatgcttggggaatttgctgaactgccgccaccttctgagcagagtagagccgagaagtcgacttactggaggggttgagatcacttggcctctaagggggcatcccaggggagcctgcctgagcaatcaacagtcactgccctctaccacctgcaggggcttctacactctggcctgctgtggtgccagtcgagtctcacctggaggacgaagctagggccagctggtggggcatccagggcccaggtcactgcagttccatggccaccccagggtcagcacaagctccaggagtgctctctggtgtcaccccacaattcagtgaataaagaggctttgagacccagaattgggaagagggtcaaaaattaggattctctggaggaaataaaaagaaacaaacaggattcctagaaatacatgagagtaattgtctttggaagtattcccgggaaataacccagactgatgcttcggcaacagcattcatcatcttcgcttattttttttcttatgacacatgctcctcattggtctgtatgtagtcttcatttatttagacaggtgataagcatcccatgcgctctgaaacccaccacatcacagaaacagcccttgctggcgttaccaggaccttcgccttcctccacccggtggtcagtgctcaccttaccttgcatggcctggcagcaactggtgacaccattgatcacccttcctcccctccagtacactttcttcacctggctgctggatgccatacccttttagttttccacctgaattcatttttgattgcttctctggcaaattatcacaaactcggtggcttaaagcaacacacatttactctcttacagttccaaagtaaaaaatgaatctgcagggaagcattcyttctggatgctctaggggagattcttttttcctgccttttccagctactggaggctgcctgcattccttggctcttggcccagccagcaatctcatcatgccagcctctgcctctgttgctgcgtctcctcctacgactgatgctcctacatccatcttccacttagaagtacactcggggtcacactggacccacctagatgatccaggataatctcatctcaagatctttcacttaatgacatctgcagagtcccttttgaaaagtcaggtarcatattcacagattgtggctcacacaccayccagaccccggttgtgacttctcagtctccattgttagtttctctcacttctcatttcccagaaaggtgcacaaagtttaaacatacagctcagtgatttttttttttatgagtctccctctgtcaccaggctagagtgcaatggcacaatctcggctcactgcaacctccgcctcccaggttcaagcaattctcctgcctcggcctcccaagtagctgggattacaggcacacaccaccacgcccagctaatttttgtatttttagtagagacggggtttcactatgttggccaggatgatcttgatctcttaacctcgcgatttgcctgcctcagcctcccaaagtgttgggattacaggcgtgagccaccatgcccggccaattttttttttttaacctaggtaaacatctctgttgccaccacccagatcgagacctagaactcttccagcacctagcacaggctcctgcctcctcccaggcaacagcgcctcccagaggcagccactgttctaatctctatccccataggatagttttgtgaatccctcatgtttatatgggcatcatgcactctgttgatggctgctttcactcagtattatgtctggggtattattgatgtttttcttactcttcacagtaatcgtttccattggctactctgtcctagagaatccataggcagagggagaaaatggggagtaactggagcaagaagagccaatggcttggaccacctgttgatcttcaggagcccccccccttagttttccttctggaacattcccctcacttctgccctagtttggctagagcctcgctacactcactattgtcgcagtctcttgggcaggtcttcctctgttccccattgtctctgaacctttctgaagagaacttgatcatgttatggcagggctcctaagtattcaatggctccctattgccatatcccttaagtccagcttgaatcctctttcttccacagagattctccttacctcctcacctatatctgcttttttccccttcactcagactctcatagctctttacctgaacctatcttacagcattcataacttttttttttttttattgagacagagtcttgctgtgttcccccggccccaggctagagtgcagtggcacgatctcagctcactgtaacctctgcctcccaggttcaagtgattctcctgcctcagcatcccgagtagctgggattacaggtgcccaccactatgcccagctaatttttgtatttttactagagacagggtttcaccatgtttgccaggctgatcttgaactcctgacctcacctgcctcggcctcccaaagtgctgggatcayaggtgtgagccaccacacccagcagataacattctttcttatttaacatatttccactgtggctcttgtcttccctattgttttgtctactaatctgtaaactccccaaggactggacttgtctagttcacctggatttctctagcacacacaggcaccactggtacataccaataggtactaataaatatttgaatgctctgggtatgggctcatacctgtaatcacagcactttgggaggccaaggcagaaagagagcttgagaccaggagttcaaggccagcctgggcagcatagtgagaccttaggtctacaaaaaaattttccaacatagccaggcgtggtcatgtgtctgtagtcccagctatttgggagattgcttgagcccaggaggtcaaggctgcagtgagccgtgactgcaccatttgtactccagtctgggcagcagagtgagaccctgtctcaaaaaaatgaatgaatgaataaataaatgtttgaataagtggatgaatgagttgcttggaaaactgaggtacgtgcataattgaaaaggaaatattagcatatgcaagatactttaagaatgaaacatagccgggcacggtggctcatgcctgtaatcccagcactttgggaggccaaggcaggcggattacctgaggtcaggagtccgagaccagcctggccaacatggtgaaacctcgtctctactaaaaatacaaaaattagccaggtgtggtggygcatgcctataatcccagctacttgggaggctgaggcaggagagtcgcttgaacccaggaggcggaggttgcagtgagccaagatcgcgccattgcactccagcctgggggacaagagcgagactttgtatcaaaaaaaaaaaaaagattaagaaaaatctcttttctgtgtcttgttaaaaggttgggagttgatggaaaggatggagaaccatcaagcaagtcactcatttctgcctttgtcctcggttctttgcagccggagagagttagcaaaacctctcccttagcaggctcttacagtctacccgtcccatgagtctccttcaggggttagaagtgaagttaaccatagaaaatctcaatcaagacccacattgctctcagggttaagacccccccagtcctcrtgtagctataagtacctgggtgacactcataggtatgtcccaggttgcctgggtttctagtcctgtttactctttctggtgtcttttcatgcaaaattctctaaagcacatagactcagaacagtggttctcaatcttctctaattgctcctattctttttttttttttaaacttctaagttcagcaatacatgtgcaggtttgttaaataggtaaactcatgtcatgggggtttgtagtacagattattttgtcacccaggtgttaagtctagtacccattagttatgtttcctgctcctctccctcctcctatcctgcaccctcgggtggaggcctcaggtatctgttgtttccatctttgtgtccataaattctcatcatttagctcccacttataagtgagaacatgtggtatttggtttctgttcctgacttagtttgctaaggataatggcttccagctccatccatattccctcaagggacatgatctcgttcttttttgtggctgtatagtattccatggtgtatatgtaccacattttctttatccagtctaccattgatgggcgtttgggttgatttcatgtctttgctgttgtgaacagtgctgcaatgaacatacatgtacatgtgtctttgtgatggaatgatttatattcctctgggtatatacccagtaactggattgctgggtgacatggtattgtaaggtgggcagaagactctaatgaccactttccccacctgctctttctctctgatggaaaaagagctcagccacaacaacaaaattcgagaacaacaaacttgatgctagcaacactcataaagcttataactgagaaatatgaacttccaactcagtactttatattgtgaaacactgcctccaaaacactattatccarataacttcagtttcttaccttgatggtatattgcaaagtatttaaacagcaataccaggcaagcaaatttgaaggtggygggatttgctttaacatatttgaagtctgatgcatagaaagtatttttaaaatcctgttacagtaaaactagtagccaccaatttcattcatgaaagtatgtcattatatacttagagtgaaccatgcaacctgcaataaacttgcttgaaaattacctaagtaaattagttgtaatttctcctttaagagggggagtagaattctagttctctktgttctcttgtgcccagtaggacctttccagtgttgcttagcattgaatgatgttcagattacctaatgagaaatggaattagagtttttagggatctctagaaatggctggttttagtttataaattccaggccgggcacggtggcgcacgcctgtaatcccggcactttgggaagctgaggaaggcggatcgcttgaggccaggagttcaagaacagcctggccaacatggtgagacctcrtctctactaaaaatacaaaaactagccgggtgtggtggtgcgtgcctgtaatcccagttactcggaaggctgagatacgagaattgcttgaacctgggaggctgaggttgcagtgaatggaaatcacgccactgcactccagcctgggtaacagaatgagactctgtctcaaaaaaaacaaaaaaaaattccaaacgttaataacttataataacccacttaggtacttgtacatagcccctagtcttaggtaataacagaaatctatgaaatggcatcgtttactcacaaagatcaaagaaagacctcaaattttaaagtcagtttgatcaaggcctacactttgggaccctgttgtggaggaataaggagcacctcgctggactgaataaatccagcttccatgatcctgtgttgcccccaaacagggaaaaggacagatcagcttggtttcatggttgctttctcttgtgccaggcaaggtcttctggaaacaaccataatgacttytgctggttggagacaaggtgccataaaaaattcagttgttccttagacccaagtagaagagtccttgaatcctaataaaaggccacttttttaagttwttctactctaggccgggygcagtggctcatgcctgtaatcccagaactttgggatgctgaggtgggtggatcacaaggtcaggagttcaagaccagcctgaccaayatggtgaaaccccatctctactaaaaatacaaaaattagctgggtgtgatggcatgcacctgtagtcccagttaatcgggaggctgaagcaggaaaattcttgaaccagggaggcggaggttgcagtgagccaagatcgtgccactgcactccagcctaggtgacagagtgagactccatcttgaaaaaaagttactctattctaaatgaagaccaatatttcatagacataggacaaggggttgggagagggaaattgattatctttaaaaaagaaactgaaaaggacttaaagttcgcagtgttgcactgatttttagttgagcaaataatgagtcaagtcgtgttggttttgtgcacatgtgtggtttttccaaaaaaattgtatgggccgggcayggtggctcacgcctgtaatcccaacactttgggaggccgaggcgggtggatcacgaggtcaggaaatcgagaccaccctggctaatacggtgaaaccccgtctctactaaaaatccaaaaaaattagccagacttgatggtgggcacctgcagtcccacctactcaggcggctgaggcaggagaatcacttgaacctgggaggtggaggttgcagtgagccgagatcacgccactgcactccagcctgggtgacagtgagaccctgtctcaaaaaaaaaattgtgtggaagcacaatgtgacatgccataaactccaatttgaacattcacagcttactcctaaatgagtcatcttattaacaagtgtatttaagggctaagggtctctcttcatcctttaacaggtctatctcttttgaaaggcttcttccttcattcattgcccctttttcaatactggcctccttatttggcaatggagttgtgagtcaaacagttctccactgctttcagtgacttcatgaagttttctattttttttctgcatggatgtttatcttactttgcattttgatacattgcatattgttggatgatagcaccctctaaccatcaaagagagaacactttgcctagatgggcagggcaaagttggggtaggaggtggtcagtatttgagcaagggccaaatttattaaacaactgactcataaatatctacatgatttttgctgtcttttgcaacttgaatcttcaggaacgcagataaagaacagttggataacgatgatccctgtagagctaatagtaacacaccttaagtgtatatagtgatctacgtttttctttctttctttctttctttcttttttttttttgagacagagtcttgctctgttgcctaggctggagtgcagtggcgtgatctcaggtcactacaacctctgcctccctgatccaagcgattctccagtctcagcctcccgagtagctgggattacaggtgtatgccgccatgcccggctaatttttgtatttttagtagagacagggttttaccatgttggccaggctggtctcgaactcctgacctcagggtgatctgctcgccttggcttcccaaagtgctgggattacaggcatgaaccaccgcgcccgaccctatctacatttttcaaagtatttttccatagactttttttcccttccaacttttattttaactttaggggtacacgtgcaggatgtgcaggtttgttacacaggtaaacgtgtgccatggtggtttgctgcccaggtcatcccatcacctagatgttaagcccagcatccattctctgtctttcctgatgctctccctcctcccaccccgccccatagatttctacttgaactcttaaagtgggtggagtagatgtaggaacctgtatttcagagagatcctgcaatatgggtctccaagtgcccagtattttcaatgcatactcattagggacaaatcttagacatgagattaagccgaggggtaccaaatacatttctttcagatctaggagggatgaggtaccatccaaggtcacctctgatccttctgactgggctgaagtcaggcctctgaagacagaaggagaaggatccttaggcggaagctgtttgctttctagacttcataaacttgtcttctaggatgacgtgaggcaatgagtatactcatgtgatggggatttcctggggggagcaggcatgccttcctctgacgtgtcattgactccctgcacgctcagttactgatcaatcagcggatcactccagcttcctggcagctgccctttcatggggtgagggagtgtgggtcagagtgtaagctgggatgatgtgttggcttgaaaagctttacctgccatcacaggcgcttaggaaatgcctggttgctgcagttgtatcccaaagtctttaatttagacaattttagtttagccagtctagagaatacttcctttatgagcattagggcctgcaaaacaccccaaatacatgggaaacctgaaataataatgatttgtggctcccagcatgctccctcgggggcctggtgtcctggaggctggtctgacttgcccggaggtcactggtgtgtggctcagctgcagcggcagcgtagtgggtgtccaggggagtggacaagcaattctcctgtcatttgcaactttcttcaggaactcagataaagaacacttggataacgatgatccctgtagagggatttcatctgtaccatcacacatggaagaggagttgctaggtcaggaaaggcagctgctaagctaaggttcttgtccctttgtccttgcatgcctaaggaggggctgtccaggacaaggtaactttgtagatcctcacctccttcctaaaaaaacttgccatggggttgcaatgtgccatgtccatcagtgctccagcagacaccaggagaggaagaggggacccctaggaggtggctgctgcttctcctgtccaagatgcaagtcctgtccaggtgaaatagggcaggcgaggccctggctgcactgccagacagtatcccataggcagacagagcctcaggccagcacctcgccttccagccagcatggctgtgactccctaagcagcctgatccaggattgctgttacctctggagtgtcttgctagcagaggtgaccttcccggggaaagtaagggaattttaaatgctccttctatctaggtttctcttgtttagaaaacaaggaagtacatgtgggtgacacaggtgtgctcaacaaacaggtttaagaagggtctttagtgggaagaatggaaaaaggagtgggaaactcttacttcctccaccactcttgatctcacccacaaaggtgagttcaccttgcaccctgagtgggttggagctgatcccagccaatcagccgatggcatgttgctacctcatagccaggaaaagcccatctcagcagtaagacctagggccttccacatcagaccttctctacggcagtggctggtctgacttgggaaaatggaggaagatagatgtgtcatgaatgaaacgtgtgtagtatgttggtgcacatttaaagacattgaagactgacatcgaagttcccttatagaaataaatgaatcctggagttctaattgctggtcccacctaagtatcttctccttcaggataagagtataaagaatgtcccagactagatgtcatgagtctagacccgtgttaagggagaacctgccaggtgcaacagagtgggacgtgacctgataaggcaggggaccaaggtgactcatgaactttagtgcagagccaggcagccatgatgagagcakagtttgtaggcagctacctggctttgagccttgcatgcagccaagatcccaaggccttcaggaggattcccctggaatgttctagatacaggaagcggtacctgctgaaagggctgggaaggagatttttcctggactgtttcaaatccactgtgtcctagacacttgcattttttwaaattattttttaatattttgtagagatggggttcttgctctgtggcccaggctagtctcgagctcctggcctcaagtgatctgcacacctcagcctcccaaagtgctgggattacaggtgtgagccaccgtcctggcctagaaactctcattctaatcgacattaattaatactctctaatggcatttcgttaggattgatgtcaaagttttatcacattctgcagtattctgtttgttcagggaatggataggatagttgaataaaattagagtagattttttctatcataataattacatattaatatagttcataaaaatttaaatagttaagacgaacgtgcaaaaaagaattgtttccagccgggcacggtggctcatgactgtaatcccagcattttaggaggccgaggcaggcggatcacgaggtcaggagttcgagaccagtctggccaacatagtgaaaccctgactctactaaaaatacaaaaaattagccgggtgtggtggtgtgcgcctataatcccagctactcaggaggctgaggcaggagaattgcttgaacccaggaggcggaggttgcaatgagccaagatcacaccattgcactccagcccgggcgacagtccgagactccgtctcaaaaaaaaaaaaaaaaaaaaagaattgtttccctctcactctagtccctctataaataccatcattttttgtgtaatctcacagagattctacccatatacatgcgtatatatatatttaaagacaggctctcactctatcacccagactggagtatagtggtgctatctcagctcactgcagccttgacctccccggctcaggtgatcctcccaccttagcctcccaaatagctgggactacaggcacaagccaccactcccagctrgtctttgtattttttttgtagagacagggttttgccatgttgcccaggctggtctcaaactcctgggctgaaacaatccacccacctcagcctcccaaagtgccaggattacaggcatgtgccacgacgcccagccacacatatagtattatctttttatttctcacataaaggaatcatatgaggcagactgcttgacaacttgctgtctttttcacccaatgacatattttgtacctctttccatatcagcaatataattttactccattctttttaacagctgttcctattgatgcttttatctattacgtcagtgtcacaagaagcattcttacacaatcsctttgcatatatatgcaaatcaaccataatacagagtcctggatttggaatttctggatccaaataatacacatcttatattttaatagatagtgccaaattgcccccaaaacagttgtaccagttttaactccctccaaaaacgtgtgagaatgcctgtttctccacactttcaccaattctgtgtgttagcagtcttttcaatcattgtcaatggatgaaaaaattgctccctgtttaaattcttatttatatgaaggataagggaggttctgagtctttccatgtttctgaactttttgcacgtttttagtaaactgccttttcatgtcctttatccatctttctattgatagttgtctttttcttactgatttataatctctccttagaggtaaagggtattagcctgttttttggcatctgtgttactatttttcttccacttttcatttgccttttgccttgcttaatgttttttttttcaacgcaaaacctttaaatttccttgtagtaaaagacaccggttttattcttagaaggttctgcccctactttaagattttatacataaaaacaaaatatttcagtttcctactaataattgtatgcttagtgtttttcttgtgtgtttgtttttgcttaaatattttgcttccctggaattttttttggagggatggggtgtaaggaaaaaaataggtattattttaggtttatatttttccaaattactaaccagttttcccagtagatttattgaatgatctatctttttccactgattttttttaaaaaacctactcttttcacatatcagtcatttacatatatagttatttaggtctgtttttggactatattctataccaatgaaatcactactgttttattaggttttagccatttgcgtttttcctccttgcattcccttgcagccaagactctgctccgctagagaaagaaaaggaacaggaggtgggagtgattctggagcctgtcaccagccttggcgaacacagtcaagtttgactttcaaaggctagggctgccgggcttgccctgggccctgaggtcatgtggctggagcagataagaagccactttggagaaacccttgcaagcggcagcccccagcagcatgtgtgtggcccacagtggttgtccgtccaagcagtgatggaatagtagtgatttcagccaggggatgcgggcatggggaggggtgtggaaggagcaggtagctgcagcttgtcctggaactcagcattcaggtgggtcctgcttattcttcctgctttgtgttcacagcctgtggttagaggggaggcctgcaggccagattccacgtgtgcgtggatgaccaaggctaggacggcagaggggcagccatgattgctagggggaacatggcacctctactggaaagccacttgaatctcaaactttactctccctctggccgagggaactggacatgtattccgcatctcctcctcgttcctttcatcagaattgcatgaggagcatattaaaatagattcctgggactttctggggagatggaactggtctgtatcttgatttgggcattggctgtaaggaggcatatcgttgtcagactatacccttacggttgatttttttttaactatatgaaaattacgcttagtagggggaaaagagagccaaataaatttaacaccagctttatagtcactcctaagcaggtgacctcacatttgcaagagttagtgctggtatacacaagccttataaagactgctttggaaagaaaaagtagaatgtgaatggtgaaatccaggttagaggggatgcaggtgctcctggtgagattctcccagtttgctgtatgtttgaaattttcctaacaaaatgttggacaaaatactaagtagttaccctgtggaaatcattcacagacgtgttcttaaagaatgagtagaaaaataaaataacagcacatgaatggttatatgcagcaaaggatcacatttccagtgatattatgttggccatcacaaagcaccgtacacaggatggcttaaaacaacagaaatgcactttgggaggccgaggcgggtggatcacctgaggtcgggagtttgagaccagtctgaccaacatggcgaaaccccgtctctactaaaaatacaaaaattagctgggtgtggtagcacatgcgtgtagtcccagctactctggaggctgaagtgggagaatcacttaaatctgtgaggtggaggttgcagtgagccgagatggcatcactgcattccagcctgggtgacagagcaagactccatccccacccaccaacaccccccagccctgccaaaaaaaaaaaacacaaatgtattctctcacacttctagaggctggacagcggacatcaagatttcaacagggttggttccctctagaggctgcgaggaagaatccacttcaagcccctctccgggcttctaggggggctgctgtcctttggtgtttcttggcttgtagttgtatcgcttccatctctgcctccatctttatgggtgttcttcccatacgggtggctctatgtcaatgtctcctcagtcccctcttaggaggatgctagtcatactgaagttagaacccaccctaatctagcatgacctcatcttacattgattacatcaaagatcctatttctgaccaggggtggtggctcaggcatgtaatcccagcactttgggaggccgaggcaggagggtcacttgagcccagaagtttgagaccaacctgggcaacatagggagaccctgtctctataaaaaatacaaaaattacccggatgtggtggcgtgcacctgtagtctcagctactcaggaggctaaggtgggaggatcacttgagcccaggagtcagaggtctcagtgagctgagatcacgtcaatgcattccagcctgtgtgacagagccagaccctgtctcaaaaataaataaataaataaaaatcctgtttccaaataaagtcacattcacaagctctgggcggacatgagttggcagggggaattggaggaggaacactattcctcccagtaaattttttttgttttttgttttttgttttttgttcttgagatggagtcttgctctgtcacctaggctggagtgcagtggcccaatcttggctcactgcaacctscacctcccaggctcaagtagttctcctgcctcagcctcccacatagctgggactacaggcacgtgccaccacacctggctaatttttgtatttttagtagagacagggttttgccatattggccagtctggtcttgaactcccgacctcaagtgatccactcaccttggcctcccaaagtgctgcaattacaggcgtgagccactgtgcctggccccaatacagttattattaaacaacttctgccactcaaacaacctagatgaaagtgaatatgaatgctcattggagaactatggtctattgaagaaaaatgactccaagacagagagttcaatgtcgaagactcatgtgaaaagtttgatgcttcacttgagtgaaaaaaatcygtgtgtaactaaagaattaatgtgcgtagattatatttttaaaagattataaggccaccctccaaacctacaaaatgtaaatctctggagtcaagacctcagaaatctgtattttttgtaaataccctttgtgactccggagcaccatgaagtttgttgtaacycattgtcctagaaggataaggacagaagaaaaatggagatggggaaattggaggtgstgggtgtggcttggcaggcagtgcttatggggttatttatttattttgagctggagtctcgctctktcacccaggctggagtacagaggtgcaatcttagctcactgcaacctccaactcctgggttcaagcgattctcccacctcagcctcccaagtagctggaattattacaggtgcgtgccaycacacccagctatttttagtagagacggggttcactatgttggccaggctggtcttaaactcctgacctcatgatccatccgcctcggactcccaaagtgctgggaggcatgagccacctcgccctgctgttcgtggggttattaaagaagccacatcctcaagctcttgtcgtggtgcgtagcgtttggtgcggagcagttgagctgtggacactgaccgggcagcccatgctcttgccctctgagacagaggagggagtctaggatctggagcctaagactgtgctctagttctggctctgtatctaactggcggtgtgactttgggcaagttaatcaacctctctgagcagtgtgttcctcacgccctgcctcccctgcaggattctgtgtggctacagtgagataatatgagagctgtggaacaggacgcagggatcacacccacacaggagggcaaggagtcccttcagctccagcttctgctaaccaggggtgggtctctgctaggtggtgagggacgggtgttttcagaacctgagctgctgtgtgcttggaccctcctgggcaggactgtgcacccctggaggagccggagaatgtgacattctggtctctctgagtcatccctccaggcctggccagggagatctgcgatggcctcccgccttcactccatcttcacctggacaggtgcagcactatacccaggacacttaccctggtcagggaaggacagtccccaaaggtgaggctggccaaggccccagtttgtcttgggggctcacggggctgcctcctgctccccaccatcccttcctccattcagccgcaaatatgctaatatttcctctgtgccaggcaccctgcttggtgctggggacaaaaagacacctggctgagacactcatggggattacctcagaggagtgagacagacatgataattacaggtggcagcaagtgatgsaatagaatagaaacattctgtatggaccaataccctgggtcagaaacattccaggcagagggaacagcaggtgcaaaggccctgaggcatgacaggaccgagaggagactctggcattgctggagcatggggagggatggagtctggtgggggctgaagtggaaggaggtgggcaagagccctacttggtggggctcatgggtcatggccagggatttagattttatgctgagaaccaagggcggccactggaggattttaagcagaagactgacagattttstctacatttgatcagwtagctctggctgccatgtggagggcagattgggcttggggggagtcaagagtggaagcagyaagagagttaagaggccattgctattgtccaggtggcagatgggggtggcctggattggtgactgtgaggatggagagaatttgaaattgtcgtggacatggaaccattagaacttgctgatgcattggatgtcagcagcgagggaaaggaagaagttgaggatgacaccaaggttttggcttgagcaactgggcgatttgatttatggaaatgattaatactggggtgggtgtccatgtttgggataggactatcaaagctcaccggggycaggtttgagatgccagggaaacatcagtagagattttgaatactgattgaatatgtgagtccagagctgagctgtccaaggtgggaaccaccagccatattagacagcacacatatagaacatttccatcactggacaaaatcctgccgggtggcactggtctagagctgtgtcccagcccagcaccataggcatttctctctgggataatggcacccaatctgatggtgctgtctacgaagctgctgtccgtgtgtcatttgcaaatggctctttcttgccctctctgcttgatcacaccagaatgtgtattcagtgctgtcccttacctgtggccatgtcaggcaggcactgacctcccagaaagacaatttaccctgtggtcatttaaggaagtcacttcctggggctgaagcatcattatggtgacgagtgtaacacatagaatggaggctatacccaccaggcgtcaccagttgtcatgaattctaggactcactgcgtagactttgctaattgaagaaatgtgtgatggggccaggcgcagtggctcaaagttataaacccagcactttgggaggccaaggcgggtgggtcgcctgaggtcaggagttcaagaccagcctgggcaacatagtgaaatcycatctctactaaaaatacaaaaaattagtcaggcatggtggtgcatgcctataatcccagctactcgggaggctgaggcaggaggatcgcttgaacccgggaggcagaggttgcagtgagccgagattgagccactacactctggcctgggtgacagagcgagactctgtctcaaaaaacaaacaaaaagaaatgtacagtgggaccaggcacagtagctcatgcctgtaatcccagaagtttgggaggctgaggtagaaggatcccctgaggccaggagtttgagaccagcctgggcaagatagcatgacctcatctctaaaaaaaaataaacagattagccggccattgtggcatgtgcctatagtcctaactactcaggaggctgaggtagaaggattgcttgagcccaggaactcgaggctgaggttgcagtgagccatgattgcaccactgcactccagcctgctgacagagcgagaccctgtctcttaaacacacacacacacacacacacacacacagtgaaaaaaaagaggacataggcctgaatccaatggacttgtcttctagaacacaccatgccacctgagacaagtcagccaatctttctaagcataaacatccttaactgcacagggaggagattgcatggccaggcatggggagagggaattgcttgaatcagcaaaaagaagtaggaggtatgagggagggtgttgttgttgttgctgctcttgttgtttgggttttttaaataaaacagttcagtgactattattgtttttcgtagtataatcatttgccattttgtaaacagtggcaagaacaatatttttctttcttaaattattagataataaawgacgcatttcaaaatattgtttctggaataatggcatatgaggttgtttgtaaatcaatagtcttgattctccttttaaaaatagcaaaatacaggataattcttagattggagtgttgtgcaatagatctgaaatttgttttattatactagttgggtcagtgaggagataatatattttaggtgtcgtacgtgtattttccttgtggaatgcacatcctgtaaacctacttgaggtggcttgaggtctcagtcttgagagactacggtccagaagtggtctcagcaagtctgcaaaaggacatgttttaaggaactcatgtcctgtgagctgttgatgctgctcattggagttgaaactcagatcctcccattttacccgtgcagcaagaggcaggattttgtaaggaaagacccagaagggaagcctccaaaagcccctcttgtttaccctgacaagctctggccgcgtcccttccagctgtgctcccagcacggagactttccctgggggcctctccagatccccaagtccagcattcactggaaaaacccacgtgtctccctgactcagtgcattcttggaaactttgccctaatccgaggttagaggctggagggctaaggatcccggtggctgccaacagtcagtggcaacatttggtaaagaatggagttagtggcttgaaaacccacagggggtatcctagcgagtggtaatttcattttttcaaaccactggccccttttcctacgtcctgggttgcctgcccacctgtgctggcttaggcttccggtgtcgaggttgctggcaatggcatcagagggagttcacttcacgagcagaagcaatgctgggtccgtggtgaatagagtcaacgccccagggcccaagactgtctttttgttctccacacaccygagctggagagttggtcacagctcaggcacaggtttcctgctggttttctttcctcctttcctcttgctcccgtgaataccaggacggtggcctgcagggcccatcgccttgcaatgactgcggggasggcgaggggtgggtgggcttcgggggttctgaggcttctcacttgccagatatggtttcttaggccaccacaggcatccagagctcagctcctggccggtcctgactcctggattggatctagaaaggcagagggcagcttattaaagatggaagcaagcggatccgctgccttcatttcagccgaaagcttttaccaaaaacaaccagctcgaaggggactgctccctgggggccgcagaggtgggcttgttaatgcaaaaggctcctccccaagaaaggctcttgctgcagatacagataacggcttggaacagccttggcaccatcatctccctctggggcctgccccttcctagctgccaggggccatgtgccacccaggggcgctgcgacacctggaccccccaccttccccctgggcctccatggggtgggggcagctggacccaaggcccgaggcaaccattccctttcagaaaaagggttttcaggcaaaatccaggctatgggataaaaggccatctgtccgtcccgcggtgcccagccccagctttcccgaacaacatgcctttatgccggcgcccccgcccccagcccccgcccgccgcacactgcctcctttcacgcggcctctatggtggacttgtttgtttgtggtgcagagcgcagactttctgttgttcttctctgttctctcccccgtgcgccgtccaagcaaaccctctctagggaggacagggtctgggaccctggaggaagctgggggcttggggacctcccagagagtcctccacgaggggagaaaggaggctactgtgaggaaccttcccgggaacagccctcggagtgggctgctgtgtgctccccccgcccgtccagcaatcacttgagagatcttgaataagtcattcgggccgcctgtgcctcagtttcccccgtgtgtggaatgcctcctgccagtctctcagggagagttgtgtccgccccagtgagacgccgccacatgtgcgcctcggtgaaggtgcttgtggtggagatggcagggctgttccagctgccacgtggggggtgggggaagtgcagaatagaacaaggtttgcactaaagagggcggcgtttgcttcactgctccacgcgcagcgtttccatgtagsgaaaactgcgaagtgacctctcaggccctaaagaaggggaacaaggccgcccctggctgcagatgggcagcagtgggctaggaacggacctatttgaatgcctgtcctatttgaatgcctgtccccccggggccatctgtgtggcctgcccctgcgggctgggtggcaaggctgtgctgactgaaagagcctggtttctgccgcgtcctcagcataggatgaggggcagactcctggctccacggctcctcggatgcctccctcggttgtcccctcttctggttggattccctctcctttggtggcggtcttgatcccaratgaaactgattagctgattcaggccttgttacaggttttctaggctgctgtaacaaactgtcacaaagtgggtggttgaacaacagaaatgtattgtctcgcagctctggaggccagaagtctgagagcaaggtgttggcagggttggttccttctgaggacattgaggggcagtccttccagccctcccctgagctgctgggggctgccagctgctcttgaccatccttggcttggagaggcattgctcccatctctccttccatcttcacacgygtgtgtctgtgtccaaatcaccccttttataaggcccaccgtaatgatctcatcttaactacatctgcaatgaccctgtttccaaagaaggtcacattctgagacactgggggttagaacttcagcatagagttctttgtgaggactggcatagctcaacccacaacctctacactgggaagcgagaccctggaggtaacgcccttggtgcatggcctgagactctactgtgattccttacccctcacagattttgtcacttttctttctttctttctttcttatttatttatttatttattttgaggtggagtcttgctctgtcacccaggctggagtgcagtggcgagatctcggctcactgcagcctccatttcctgggttcaagcaattctcctgcctcagcctcccaagtagctgagattacaggtgcctgccaccatgcctggctaatttttgtatttttagtagagatgaggttttgtcatgtttcccaggctggtctcaaactcctgacctcaggtgatccacctgcctctgcctcccaaagtgctgggataacaggcatgaaccgccatgcctggctaattttatcacctttctagacataaggggaggagaaccgggaaaaaccaggtccaacccccacttctactccctgacccgctgcttcctctagaaaccagtccccacctgaggttgcccttcatcagaccttgctgggactctggtccctctggtgcctacctgccctgaccccacctgggccttggtacaactggccctgaatgcctgccccatgaagctatatagcccaggctccccattggaattccctgttctgggaattgacagagagaagaaaacccctgctctcgtctgtctctgctcatccttctcagtggacagggcatcccagggagcaggaggcctgcagcttgcctgggagtttcaaactggcaaaccaagggccacatttatattcatatgtgttggttcggcccacatcatttgttttaaatgcaagtcaaattttaaaatctggagattttacataaaaatatatttttccagcttttcatagaaatcagggccaggcgcagtggcttatgcctgtaatcctagcaccttaggaagccaaggtaggaggatcacctgaggccaggatttcgaggctaggaggttgagactaacctgggccacatagcgagacccccttttctaccaaaaaaaaaawaataataataataataattgagcccaggagttcaaggctgcagcaagccatgatcacaccactccactccagcctgggcaacgaagtgagaccctgtgtcaaaagaaaagaaaaagagaaaagaaaagaaatctgaaggtctgacaacccttggtccccatcctcctatgacttggacctaagtcagagctgccctcttgtaacagggtgtggcccctctatttcactgtagtctgcttcattccctgcagcctccttgatacgaagatgcagtgacaggccaggcactgtggctcatgcctgtaatcccaaggaggccgaggygggcagattgcctgagttcacgagttcaaaaccagcctgggcaacacggtgaaaccccgtctctgctaaaaatacaaaaaattagccaggcatgttggtgcatgcctgtagtcccarctactcaggaggctgaggcaggagaattgcttgaactcaggacacagaggctgcagtgagacaagatggtgccactgcattctagccagggctacagagcaagactctgtctcaaaaaaaaaaaaaaaaaaaaaaatccattgacagtgactcgataccatccttgtggcttggactgaccagagaggaaataacgcctggtgatgagccaggaattggcgttgtgctgggagcagtgagggttggtacttctgtctcaaaggcttctctcctgtgtggccttggactgtggctggaaggctctaaggaggttgaagtgccctccctaccctccattgcccggcacgtccagtggctcttggctgggaatgagcagtgcctgctgaccccgtctccttggcagagcaccttggccattgcttgtgcccatccttttctctccaagtagacgtgggctatggaaggctcttttcctgcctgccctccccacgcatcggtggcctctccaggcctggggcagggggttggggagggctctcagagtcgacccaggccacccacctgctcgctaatggatcactcagcaagtattggcagggccaagcctgtgctggggactagggagtgagcagttagcaagattgagtggggtctctagtgcacggtgcttatgggctagcttggaatacaatcaacaggtaaatgcggtatcaggagagccaggtgcccccttgccactcaacagccctggagctgaacacaagagtgtcaagctgtctcttctgcctaccttcccaaggcagagaggcctggagggactgggatgagggcttctgtcctcagcaccagactgttgccctgggacagtctcgttcgcctcagggtacaagaaagcaatcacctgacacagatgggttggacaccccctgtcaagccacactcatcaacacttgtgctgatcactcctgtgaaagccagtgtgggtctaactacaaaattgttcacttcccttaccaaatactgaaacctacccagttcaaaggcatcaccagccaggcgtggtggttcacacctgtaatcccagaactctcggagactaaggtgagcagattgcttgagcttaggagtttgagaccagcctgggcaacatagcaagaccccgtctctataaaaaataaaaaatttggtggacatggtggtgcacacctatagtcccagctatttgggaggctgaggtgggaggatcacttgaacgtgggagttcaagagcagcctgagcaatagatcaagaccccatctctacaaaaaaattaaaaattagctgggcatgatggtgaacacccatcatcccagctacttgggaggctgaggtgtgaggattgcttgagcccaggaggttgaggctgcagtgagccaagatcatgccactgccctccagcctgggtaacagactgagaccttgtttcaaaaaaaaaaaaaaaaaaaggcatcatctggaataatttccaaatactggaaaaaagaaagcacacatatcttcatttgaggcactttttggtttttaaagtgtttaaaaaccaccctttggcttgcttccaggaccaggagaaccttttaaataatgaatgtgaaagtttccaagaaactttctaaaagccttttaaagctggggttgtaccctagttcccaggaatgacctctacacactcctgattcatggatggtgttcgcctgtggaattcaagggtgagctggctcaactataaaataaacaccggggcgggagtctggaaaacgtggcccagatcaacgtgtgtggcatgcgtgyggcacagctgctcctggcaggacccagttcctggagtcctggcgtgccccaggtgggaatgggagaccttcttcagaagggtctttgtcttagctgtgtgtagggagggtttttagacctagaatctcacaactagacttgagaaaatcgattaatgaacaatgcaccggaggacgtgtccctgtacctaggagtattcctgctactgacaccgcgtgacgctggctctggttttccttggagtctcctcccatgttggaggtgtgtcccatcttgtgataagaacctgggcttctgccaaggaggggtgtggtcccaatgaagccacccaggaaagcaccttgcttagtcagtctggggcttatttgccagaagcatatcagtcctgacattgctccctggggtggccctaggacccgagagcagaagcaggaaggaggatagaaagaggccatgccgacccccttcccctttgtccctcttttcctcagcctccatagagagggtgccccctcttccagcccttgactggtgctggtccatgattcagaggaattctggagagagaatccctggcccctctgtgcgggggatggagccgctcgaggcatgacccactgcccttccccctgtctcccaggagcaggacagaaatccacagagcagggactcctccggtttcttcatgtcactcaggatacttccagttgaatgaagctttcaatgtgctgtttctatttagccagcatctctctaagaaacaggatttttgtaatttttgaagtagaaccttagaaccaggacatggtgaacatttgatttacttcctgttacagatagatcatcgagccccacatcaaccagcttgagccaaaagaacaattatgtgtagttaatgctcataaaaacagaatgttgttgtaattgttctgcattcataaatactgtaaaatagaggtcgggcatggtgcctcacaccagtaatcgtagcactttgggaggcagaggcaggaggatcacttgagcacaggagttcaagaccagactggacaacatagtgagagaccctatatctataaaaagaaaataattaaaaaataataaaatagaaccttttttggtaaatgtcagtataaagttgccaactgccttccttggaaagaactgccttttatcctgaaaacacatacttcctatatatttggtattgaaatttcctcttgtttatgaaatgttgctgatagtaaattaaaaaaaaaatttttttttgagacaaggtcttactctgtggcccaggctggagtgctgtggcacaatcatagctcactcatagcctcaacctcctgggctcaaatgatcctcctccctcagcctcctgagtagctaggactgcaagcgcacactaccaccacacctggcttttttattttttctttgatagagacagggtcttgctttgttgcccaggctggtctcgaactcctggccttaagcaatcctcccacctcagcctcccaaagtgctgggattgcaggcatcggctaccgtgcctgcctttgaaatatttttatttggcaaaataaaacgctggcaatctcataccagtcttatatacttttcattctgctcgtgcctgtcctatgtactcggccgaagggcactgagaatctatgatctaggttgttggagttttgatccttttatctgggcactgtcctatccagcccagagtgcaagatgcatgttttgtgtcctggcccaccccctcaggcagacagccgtatttccccaccacgtggcagggtgggcagatgcacccactccatttgtttcacatccccaaggagtgtgagtcctgcagagcttcagggcttcgcccccacagccaggcccaccacatggcaggagtcttggaagacgttggctgcttgcagagacccagcattgaaacacgacccactggggaaatgtgggtggagcatctggtatttgcaagacccgtgctaggcgtgggtctggaaacaggaaacagaaatccacaaggtccctgcctgttggaacctatcacaccactggagtattttgaggttaaacagaattggaacaggattattgagctgctgtcacgggaagagggaggacatttatattggatatttaaggcatttccatgtatgatgtgctataaaatctactcttctttgtactcaagacagcatgatacacacacacacacatacacacacacacatacacacatacacacatacacacacacacacacacacacacacacacatatatatatatatatatatatatatatatatatatttaatcaggtgttggcccagcacggtggctcacacctgtaatccgagcactttgggaggctgaggtgggcagatcacctgaggtcaggagttcaagaccagtctgggcaacatggccaaaccccatctctactgaaaatacaaaaattagctgggtgtggtcatgtgcacctgtagtcccagctacttgggaggctgaggtgggaggatggcctaggcccagaagacagaggtggcatgggctgttgcaccccagcctgggtgacagagcaagagtctgtctcaaaataataaacaaaaaaattcagatattagcttgatgatacagactaaatatgctgagacacacagactaagaaaggaccacaaaagccgacttttacttgggttacgtgtgggttttcccataaaatgccaaaatagtcactgtcaccatcaggttctcttgggtccgtttggaaacaaaaatgtacaagtcatgacagtagcctcttggccgccggccaatgcccagcttccagctccctgccatggccaccagcaccatggcttccttcagtcacaaggacacagagaaggcaagcgctctctctgcccctccttcggggcagcatgggtttcacttacgtgccagcctgctgtctctggcctcaccctscgtgacgtcagagctggctggggctgtgtgcttttcccagcacatcccgtttccctctgactttacctctttgtgagttcgatttaaccttgagcccacttgggcactgctctgccaatcccaccccacgtgtggctgctgactggcactcgggtgttgctgcagggacagcctccctcgctccctgctgcctttctttcttgtgggtatgtggccctagaagccacagcctgtgactcatcagtgtggccctgtgagccccaccaggtgccctgggcgctaccctgggactccctttgcctggcacctgccagggacctgaaggagaaccggcagggacccctttcccggagggctcccactaagcaagcttctttccctgcagtctctccactggctcacttcctctcccagatctttctgcctcttttatttatgcagaaattttattattattattattattattattattattattattattattattattttgagatggagtctcgctctgtcgtccaggctggagtgccaggctggatctcggctcactgcaacctctacctcccgggttcaagcgattcttctgcctcagcctcctgagtagctgggattacaggggcgcaccaccacgcctggtaaactttttttgtatttttagtagagacaggttttcaccatgttggccaggctggtctcaaactcctgacctcgggcgatccacccatcttgacctcccaaagtgctgggattacaggtgtgagccactgcgcccggctggaaattatttttttaagggaaatgtaaaatacagagaataacaatgctcacatcagggtctctctgttttccaaagtacccagcgtccttgatctccaccaccctgccccacccacggggctctcaccactcctggctgcctcttctcggggcagctcggggctctgccctcttccctcacccactgtgtataatcctcttgtatcttctccttccagggctccatggagaacgagsctgtagcccttgaggaaactcagaagacagatcctgctatggaaccacggttcaaagtggtggattgggacaaggtacctggcataggatggagtggggtgatgactgggggctggcgggaatgaggagaggaagagggtgtgtggagccaaagctgggagtgggcatgacgtgtgcccaggggagaaggggaaggagaagcaggtgtccacagcccagaggcatgacctgggacagcaaactccggcaggggtgtgggggtgcctcactggtggaaagttcagaaaaatagcagacaagttctgagcatggaaccagatcccagacacccctggagaagaagaattctcccgccaggacccctgaagctgagaaggggctgtgacaggcttggcaggcccagacatgcccattttgaccagggcacaaggtagagctgcccctggcacctgcagccatgtggaagcgacattggccagtgcagggcacaggagactgctgagtccagcaggagacagcgctgaagccatcctccgtgtttgggaggagtcagagatgcctgcagtcttaggataagcctcttttggcatcaagaggccagtgccttgctatggctgagcagaccccatagactggtgagatgagccctggaggagctgagcggtcacggtggaaaaggagtcactcagcggcaggggagaagcagctttgcctggaggggtcactggagggggtcactggagggggtcactggagggagctgggcttggtgccatttccttccagcttaggaacagacacaaatgtgcatgtccataaacccctaccctgcatgccctctgcctagtttgggcctcaaagacacagaaacaaatgggacaggcccctccctgcgagagctcacagcctggtgcaggggacagtaacccctccccaccaccgccataaagagttattaccccaggaggtggcatgggatgctcgcccaaggaacacaggtgagcaragtggggtggggaccccacaaagctgactgtctgctgggcccccttggccctgacactgggaacacagagatcccacctgtcgcatgagatcacagccgcctctgggagaacccatccgcccacagcacagacgcctyaggatccaaccagagaggccgaaggaagttgtgctgtgccatgtcccctcctragaggtgcagaacccagggcaagatggaggccagcyagaggaaaggctgcccggccatgcagccggcgagctgggacctggtttccgaacctcaacccccagcttgggccctgggcactggcagggtcaggacctcagtctggaacagggggagatcggaggggaatggggagagtttggggactgatgaggggaccaaagggtgagctacagtgtgtcctggctcagggtcctgtcctgagtggccagtggatggtactggaaggagctgcagagagaggcatctgtgagcttggcttagggcttgaattctgaaaagagctgaccgggactgaacaaatgtggcagccatcagggtgatgtgacatgaacaaaactgtcctggagggaggagctggggtctgaggctggctggggacgggagatccagcccacattgccagctctgtggtcagctcctcccagtctccccgagctgtggttcagggctgaccccggccccatcactgcaggaggcaaggggaggattaacccaggctgtgccaccgtcacctatgctgtcaccacgaccacacccaaggggacgaggggcccctcctcccccatggactgctccctgcctggctccgggccagctgtccaagcagcctgactcaccttccccacctctctctcattctctctctacacactcactcttcctccccttcctcctgtgtctctgggctgagacggaagggcgagggctgggccctgggaggatgtggaggcctactctggacggagcccccacctgcccgggtgtgcatgggaaccccttcagcgccccagaaaatcagcacagggagcagggcttcccaggagggcagagggtgcttttctgcttttttcttttcttttcacttttgactttccaaaaaagggtgctgctgctgcctcgttcacctcacgggmaatcccagctccgttagtgggaacagagaggctgggggagcccgcggtgctccaacctgagccctctctctgttgctgacccaggcagcgggggctggggtaggtcttttggatcgggacatggaggagctgggaaagaggccatgaaggtggcagctttgtctcagccgagggtccccaggcctggggtgggtttgcacacctgcccctggggcagaagggcttgctggtgttaactcttctggctttacctccaagctsagtactgtgattgctgccaaagactggagtcctggcctcccggggcccagtttccctggccctagaaggtggggacagagtgggaaggtgtgtgtgagaaggggtgagtgagaatgctgggaagagtgagaggacaacaggccaggggagccagggcagagttagaaggatctgaaaagacaggaagaagggccaggaagcaaaccctggtgcccygctctgctcagaggtgagggatggtcttacttttgggctctgtgtggaattttaccagaacagtttctaaatcatcccttcagtcacccagccaggcagggtccaggcttccttatgggacaagaagccaggttgtggattctcaccctccacatccctccctgtttctagaacacagccaggtgaggtggccagagctgcccaccactctcagctcctggacacacgtgtccccctggtccagcagcctctttttgccacttcgccatgtccttttcggagccctcccttgggagccctctccaccctttccacccgggggaccagcctccctttggggagggggcaagaacaggtgtgatttgaggggtttgcagaagttcgctgcccagatgctcagcagcggagttagccctgaattcacatctcttgtactgagccctcactgtgtgccagccgctttcaatgtattattggttatctgctttaatcctgctgacagcacgagggataaggattataattatcctgatttaactgataaggaagagcttaaatctcccgcccaaagtcacctctgggcacactagcagcccagatagcggcccctcccctccacaaggtcctggaaccttcccaccccaacagctgaccatgaatamgaccctgaggccggtgagtaggagagggrgtggcagagggagggaggaggctgagcasataccagcagtgtctcccaagccagccacatcctcttccccatccttcctcaggctaagccagatgctggcataaccagctgctggggctggccaatgggtgtgatcagcctcttccctcaagggacagatagacgcatccagcaggcatccccaaactccctgtccctgccccctgcctgacataacacagaccaccagggtccccagggcctggaaaggctattgaagttggccatagtgttttgcccatttaggacccccagatcagtcactgagaactcaggaagatagcatccagatcagagaaagggcccttttggccaacacactctcggggggaccagccttggcaccgtgggcactggcctggctctcctctaggcaccctgcctgcctagtcgccttgggtccccttgggcctcctttctctctataatccctcccagccagagtaggggtctggagggcccaacatccaaagggcctccccaaggctgtccatactgggcttagagtccctgagtctcctctctgcctgcctccttrctcagagctcctggcccctcttcagaggagctcagcggtgctcaaaaaataccccaaggcagaaagcaggcaggtgggctgggcactgccctctgcttccgtgggtcttagaggacaccctgggagggcagtggacagggcaggctgggaggcaagagatgccacagtgttccagtatgatgcagaaagctattccctctatcttttttatttttttagagacaggttctcactctgttacccaggctggagtacagtggcaagattgcagctcactgcagcctcaacctcccaggcttgagccatcctcccacctcagcttcctaattagctgggactacaggtgcataccaccatgcctggctaattttcttaaatttttttgtagagatagggtcttgctatgttgtccaggctggtctcaaactcccagcctcagtgatcctcccaccttggcctcccaaggtgctgggattgcaaccctgcatcttattattgcgtaggattatctggaggatctagtggaatgtactaaaggatatcagaaagtgtgctgcaagggaaagaccaccctacctggttttggggtggggcccctgggcaggctcccttcgctygtcttcagccctaagggcagaggtcatgcctgctttctgccagcgctcaagctgtctttcatctctccctgtgtctctggcatttttgctccctatccactctccgctgcctgaatcctcgtggggtgagcctgaggccacctccctgtcctcacatcccctgggtgacgggagggtcatagggctcagggggaggaggcaggtgatccggaaccacctctgtggacttcagcttgtcccagttagaccgcgcaggacgggcctgcagccactccggcaacgccaccaagagccccacctcactgcccccactgaccgctgctggctgtgaggaatcacagccgttgtgctgaggaagtcacagccatgggatcccaatctggctgacaggaggcctcctggccgagcctgggctgtgagtggggcactcgagtccaggccctgccacagcatatgcagccgaacatctgaccctgtcttctcatctgtcaaaagaggtcatcatcggccccaactcccagaattaaggctcatgaaggataggggatgtgaggcctgagccccagctgaccagcgaccaggttgcagacaaccggcccccactcytctcccgcagccccggctgcctggaagcctgtctccacctctgctcagaaagctgccctggggmaatatgcctgagtttgggtggacatttctttaaacaattgccttagctcatcgctgtgggggtgagcagtgctgctgacactgagcagctaccctgcccccgccgcctgcccccgctcaccacatttgccaccttagggagaagcagattctgggcacacccttccccaggaaagcgtcctatgccacctggccctgtgctgcccaggaggaggggtcctggggagggggaggaggaaaacagggaaggcccccttctaccggggcaccatgcccttccgcccaccctctgggcagcaggctgccctttccccctgccgtgctgctgtgggccacattcctggcatagcctgggagaagccctccccttctctctaaggcagggaccgagcaggctgggggaggggcatggaccccacacagtcggcacaaggtgctttggccgaatccactcccccttgcatctgcttcctgggccccggcccgttggtcgggtctttgaatcaccaaaaaatccctccaccccaatgagctgctcattccagagcagtttcgggcataaccgtgctgtcgcccatgcaggccagcttcctctggacggccctgagtgctggacatgcctctctagcgtcgggttccactgctgtaaaaggggacttgttactgtagggggagccgtgggagcccccagatgcctgggaagtggaggcatcatcagtgtggcctgatctccccttctcccccacccgagccacgtacatagcccacagacccatgccttccctctgtcccccgagccttgggacataagaagtaaatggggcccggaccaggaacgagctggaaggaagagacccactaatgtggtgggagtaggagaggggtcttcggtcaggtagaagagggtgggtggaagggcgtggtgcccaggtagaagggggccttccctgctttcctcctctgcctccccaggacccctcctcccaggcaatacagggccaggtggcataggacgctttcctggggaagggtgtgtccagaatctgctccccaaggtggcaaatgtggtgagcgggggcwggcgggggacggggcagctgctcagtgtcagcagcgctgcccacccccatggcaatgagctaaggcaattgtttggtcaggtagagcaggaagcgaaatgtgtcttgcatcgcttcccatctcattggatcccaagccgtcatcgtctgctgtcctcccatctcaaaacccggtcccgccaactgccatgttggaaacgaccagcaagtgagaggcctggaacctctcagcacccagctgagcctttctccttcagtgctcacgactggaagatgattaagaaaggacaccctatcagtgcatgtaccacctaaatcaaggtcaagtgcacagggtgccagtcccagctcttgggaaactgtgtggaggctgctacaagctgggggaagggggagggaggcttccacttcaggcccaaccaatcctatctcaagagccgcttgacctctcaggcctcaatatcctcatctataaattgggtcgggggtcggcgggcctgaatttctgtgcttatctggaaggctcacggggcttcccctggaatagcgagactgaggccccagtcatagaactataggtgttggcctttgatgactgaggcgggtgttcacagaagggagagcgaggcctccctgggattcctccagggtggtccttcagccccagagtgaagtgggcaccttccctgggcacccaggtgggcttcctcgtggagacacagcgtaggctagatacagagctcgggtgtgaggccctccacggccccagacaggcaagaggcagcttgggactgactctcaagcacaagtccaccatgtgtacaggtggcagtgcttgcgggtctacccagggagtaactgaaatcaggtcaatccaatgacatcaaatgacagacccctgtgctggggctctgttcccaccacacctgtaaacacatcttccacggtctagctccggtttccacgacagttctgtgcttttgttctgtttcctgtacatccaggtgtgagatctaggctgaagtccctgcttatagcttacctagacatttcttcttgtggttcaactgaattcaacgtatgaatcctatgccattttcagctggggacagtggttcacacctgtaatcccagcactttgggaggccgaggcaagatcacctgaagccaggagttcaagaccagtctggtcaacatggtgaaaccccatctctactaataatacaaaaaaattagccaggcatggtggtgcatgcctgtagtcccagctactcaggaggctgaggcaggagaatcacttcaaccggagaagtggaggttgcagtgagccgagatcacaccactgcactccagcctgggtgacagagtgagactcaatcttaaaaaaaaaagaaaaagaaaaagaaaaagaatcctatgccattttctacttgcttcacaaaataaagacaaaatagatcaatagattaaaatttgcccaaaccactgctaggctgagagaggggccccctggccacatccctgtgctatagctggaaaagatcatagttcaagatcgctcagtctgtgtaaagtgcacaagtgaatcacaggatagcagtatctgtcatgtgtaacatgcaaaagtgggacatagaaaaaccaggggcgctggccaggcacagtggctcatgctcataagcccagcactttgggaggctgaggcgggaggatcacttgagcccaggagctcgagaccagcctacacaacatagtgatacttcgtctctaaaaacaaacaaacaaacaaaaaacaattagctgggcatggtggcgtgagcctatagtcccagctactcgggaagctgaggtgggagaattgcttgagcttaggaggttggtgctgcagtgagccacagccatgccaccgcactctcacttgggcaacagagcaagtccctgtctcaaaaagaaaaagaaaggaccaggggattcatttgagagagatggtcgtaagctacagatgtgtattattatctttacagcaacaactgcaaggaaaataccaaaagcatagctaaaaagtcaatagaggagatagtatggaatattgttaaatatttcatacaaacaagacaaaggaagaacagaggagacaaatagaaaatagcagccatgtgtggtggcgcccacctgtagtcctagctactcagaaggctgaggcgggaggattatttgatcttcagaggtcaaggctgtagygagccaagattgggccactgcactcccacttgggtgacagagcaagccctgtctcaaaaaaagaaggaaagaatgagaaaagaaaaccagaggagacctactccaacattaaatgtaaatagatttaatgcttcaattraaaggcagagatggccgggtgtggtggctcatgcctgtaatcccagcactttgggaggtggaagcgggtagaatcacctgaggtcaggagttcaagaccatcatggccaacatggtgaaatcccatctctactaaaaatacaaaaaaaaaaaaaaaagccagacgtggtggtgggcgcctataatcccagctactcaggaggctgaggcagcgagaatcgcttgaacccaggagacggaggttacgatgagccgagatggcaaaaagagtgaaactccttctcaaaaaaaaaaaaaaaatggcagagattgtctgactagattaaaaaggaagacccaactatattctgtctgcaagagatgcaccttaaatgtaaagacatacacaggttgaaagtaaaagtatgggaaaacagggatcctgcgcacagcaagcttcaggaaaccagtgtgattctattaatacccaagcggacttcgggagaaggagtatttccagggcccaagatggctctttcccagtggtaaaggggccaactcatcaaggagacataactgggcraccttgggcagattactcagcctcggtttccccaactgcaaaatgacaatagttagaatacacgcctagttaggggtatggcgaggatcaagtgactgaacctgtgtcaggtgtttagaaccatgcttgacacataaccagggctccatggggattagctctgagtgctactgtagctgggacaaagccttacattctcgccttgaccctggcccaacttcttctaaggtggggctctgcagactgccgcaagataaggtgtaaacacaggccaccagctggttcctccagttctttttcctgatggtggtggtagcggttgtggtggtgcagggtgtgtgtgtgtgtgtgtttacagacctagggcagaggactggagggaatgagacagcacacttccaatgactccacttgctgctagactcaagggctgaggtcaaggagactggggtaaggaagggagcagcgactaggtggagtttggatgattgcttgatttagttagtgccagggcgggatagctccaggctgacttggatcatcttccagcctgagaagcaggaagtgaaccccccaacccccacccctgccacaggaaggcagccagtacctgggacctgccaagttcacatggcagaagccacagcttcctttgggcccttcaccctggtcacaggcacagagagaaacccagtggccttgcctgcttgctcccaggacccccacccccctgctcccaggctgtgatgggcgagaccagctccacctccagagcagctggggggcatgtaagggctagttcctggaagacccgctgtggctgcaggctttggtggagaggcctgtacaaggatgagattgcagccagggccaggggaaggaggtttctggaatcactgatggctgtttcgtccaggcttgcaagctcttccacgtgcagcccttgctcctctcccctcctctccctgcctgtggttcccctacttcccacctgcagtggctgcctgactccccgtgctgaagattggctgagcatccaccgagacaccctcatcctcactccgattgtgtgtggcagattggggcccaccagcatcacagatgagggcactgaggggctccgggaggaaaagatgcacgtccaggatctcacagctggtcaaaggcacagccaggctctaatggtgttcccctgactccaggttcattgttctttcctggattcggtccagattaacccagcactggcttgtcagaaatcctcaagggcttctagttgcctggagctgaaacctgcaaacttttctgagcttgcatccctatgagtgaaactttctgcacacactctccattatgtgtccatttaaattatttctaaagtatttgcatgtgttaatgtactctcacagtctgtgcattagaaaacattcaaatgccgtgtaaaggtgagataaagcctgcgtagtggcacgctcctgtagtctgagctacccaagaggctgaggcaggaggatcgcttgagcccaggagttcaagtccagcctgagcaacacagcaagacccacctcttaataaaacaaataagaggccgggtgtggtggcttacgcccataatcccagcactttgggaggccgaggcgggcagatcacgaggatcgggagattgagactatcttagccaacatggtgaaaccccttgtctactaaaatacaaaaaattagcrggcgaggtggcatgtgcctgtaatcccagctacttgggaggctgaggcaggggaatcacttgaacccgggaggcggaggttgcagtgagctgagatcgtgccactgcactccagcctggtgacagagcaagactctgtctcaaaaaaaaaaaaaaaaaaaaaaaaatcaagaccatcctggccaacatgatgaaaccccgtctctactaaaaatacaaaaatcagctgggcgtggtggtgcgtgcctgtagtcccagctactcaggaggctgaggcaggagaatcacttgaacccaggaggcggaggttgcagtgagctgagatcatgccactgcactccagcctggcgacagaacgagactctgtctcaaaaaaaaaaaaaaaaaaaaagaaagagataaatatattacaaacacaaataaatagaaataatagcaatagaaatagggtcgttaatattttctccctgcctctggggattagcctgtgagtaccgatggagtacacgtacatccttgccttggagacaacaggcctggagaataagcaactcctggatgtggtacagggtgttctatcatctaagccttcagcagctttyttcctgctgcccacagagcactgttaaggtgccagaaaggccacaaccatattcaactttacatctgtgcccacactccctgtcatcctttcctctctcccccttgtcaaatcccccatgttgatgaactccaaaccaaaacccagatcctctgcaaagccctcctcgcctaccgtgacccgggcatttgtaccagccattctgcctctggatctcagcctgctttgtatctccactaaactatcctgcttggcatgccacatctcattgagcacttaatgcaggtaccgttattatttttttatttttgaagagacggagtctcgaactrttgcccaggctggtctcaaactactggcctcaagcagttatcctgcctcagcctcccaaaatgcagggtttacaggcatgagctactgcaaccaacaattacttccattttatagctggggaaactgaggctcagagaggttaagtaattttccagaaatcacacagtaaatggcaaatggatttgtacccaggcctgacttccgagtctaactgtaagcactaagctacatgaaacaaggttggcctctttcattcctgttgattcttcccagcacctagcatagaaataaatatatatataaaaaataaattgctgaataaatgattgaatgaattaattacccaggccaacaccaagaagcctggggaaaagagcccacttcattcctgatacaaaatgtattacctcctgtacctcaagagtcctgagcaagactttaaacttcagatgtggctgaatctggatgctcagatatcatcactgagattctgtctctctagctcttggtttggccatcttctgtgctggtggcatcttcaggcaggctctgctagtaaatccaggctcatgccctgccgatttagcacctccaacagaaagagggatcatctgatggctcatcacaccagcttaggtcgcaaacctttaccggatcctattgctgtggctgggggctgggatgagcagcttggtcagttcttgatcactgaagcaggagggtgggtggccccacacagatcacaggagctgaggtaggagcaggggattgggatgctgtaacgaggaaatgggagaacgaatatgggaagacgtgaatatcaaacgtcyacttggcttcatctcttgcaggacctggtggactggcgaaagcctctcctgtggcaggtgggccacttgggagagaagtacgatgagtgggttcaccagccggtgaccaggcccatccgcctcttccactcagacctcattgagggcctctctaagactgtctggtgagctcttccctgagcctgtggcaggctgtccctctcttctgacggtgccaatcagatatggaaagggagggggcaattgagtccctccccagagcccaggtctatgctgtaaagctgtcagggagggaggaacatgccatgggaataattcatccctatgcatggttttgtccactgggtgggtcacaacccagcatgtagccagaaactacattgaatgccacctctggtctattccagactcttatgaggagtttcttgcccacgatgcgcatgggaacaattttgcctgcaattagctcctctgccacaagaggtcagcatctgaccagttgcatagagtcagtagccctggggacacagttcttttctgccagtaactcatctcagagacaggaggcagatggactcacagcctctctcctcttttctcttccccactccctgtaccagtgtccctttgaccccaggtctccataggcattctgcatatgctttggtgtcatcttgtccccaatccagttgagttatgtgtctctaagaaagctggaccytgccgggcatggtggctcacgcctgtaatcccaacactttgggaggccaaggtgggtggatcacctgaggtcaggagttcgagaccagcctgacaacatggtgaaaccccatctctactaaaaatacaaaattagctgggtgtggtggcacatgcctgtaatcccagctacttgggaggctgaggcagaagagtcacttgaaccccagaggcagaggttgcagtgagccgaaatcacgccattgcactccagcctgggcaacaagagtgaaactccgtctcaaaaaaaaaagaaagctgtactctgtcaagctcctgtgcatgtatctctctcaccctgatggccttcctgcaggtacagtgtccccatcatctgggtgcccctggtgctgtatctcagctggtcctactaccgaacctttgcccagggcaacgtccgactcttcacgtcatttacaacaggtaatgccagtttctttcctgacttgccctgaggatcctagagggaggagacctcagtgctttccctggcccagagtttctgagagcacagaaccccaaactacatcacagacatttttggtgaagcctctctgtagaaatagtcttccaaagaagaattttgtctgactcccatctaccccccaaatggatacaaaacccaacaacacatcagcagaaactaaatggaatcatcgggtggcatagcaataaaaaaagagagagagagagattgagtgcctctcattgagtgtcacaccaaaagacacatgatgtgggattctttgctaagaaactaaatgaaatcacttcatcgggtgacacagctgagagctagactcggactggcctatgaacccagcacagattagcagagaacttgggagagaaagatctgggagtgtcctagagtgtgtccaaggcaaaggctcagrcagcagacccccagactgggagtaatggcccactaacctctatgggacacttgccatgtgcggggccacgtgttctcccaggaccgcctcatttacccctcccagcagccccataagaagggtcctgtcattatccccttttagagctgaggaaatggagcctcagagatatcaagggagtagctgaaaggcgtgtggctaggatgtggataccaggtgcgccccagcttctagctggggggcagaggatgaaaagacaggctgatatggggcagtgtctaaagagcctatgagactggggtttaggatgactgtgggtttaagtatagccgctgggacagccagccccacaagcatcttgcctaccttgggcctccaggtacatgccacctgccctgtggtctgtctgtcctggctctgagcttcctgagctgccctcactctgccaggggaagctcttttccctgcactctgcaagtcaagtgcctgaatggttgacatgagaggggccatggtcacggcatcaggaacttcatttatccacctgacccaggatgagtctggtgagcgagctgcaggaagttcccccaaatccagcccagagctcctcccggtcaccgagggttactgcaggcatccctcgagccatggttgccctgttctgcycacgctgaatagctcaggcacagcacggagcttgttgctcagaaggcctgctcgctgaatcacccactgtccgcccggcactcccctaacaatcacaaacagtggcagggccgccagggctggcagccrgagggggaaggggatgctgaagctttggcccaggtccctccgccggattcctccagagatgccactcagtaccagctccggccggatgggcagacaggggtgatgctggggtgagggggcgggcagaggcttgacctataggagaggwctttcctgcatggcagggaggatgatttgagggctctatcagccacacggcctyggcagagagctaaaatgtgcctgtcttataaaggtccagtgtagagggttagtaagcctgtgaccatgatgccagtgatgggggcatgagagataacgtctccacgtgcctccctcagcccccagcttgtcatgcaaggcacaagccacaggcagagaaaataagagcccacaaagcaaggcaaggggagactcggcgggatcctagtgcagctgctggacaaaggacgcactggaatcaatacagaagagtcagggtgccaagaagcagtggaagctgaacgcagacaccagttcaaggctgacattcctagatgcgcacatgaaaatgctttcaaaagctgaggagacgggggaaagggggcggcgctgcatactcaggatggctccagagcagcttctgagagcacgttagagcgagtggcatccctgagaggaggggaggcaggcttccagtggggtggtgtgcggggcccggcagaggccaggaccttagtctgcgccggagagtgctcccgtacgtccagtcctttccttaccaacaagagagctaaggccaggcacggtggctcacgcctgtaatcccagcactttgggaggccgaggtgggtggatcacctgaggtcaggagtttgagaccagcctggccaacatggtgaaacccagtctctactaaaaatataaaaattagccaggcatgatggtgtgtgcctgtaatctcagctacttggaaggctgaggcaggagaatcgtttgaacccaggaggcagaggttgcagtgagccaggatcatgccactgcactctagcctggatgacagagtgagattccgtctcaaaaaaagaaaatataatattaatattattatataatacaatgtatatactcatcatataatcagatactctgttacctccatcctaactacacccctcyaagatgggtagggtgtttccctgaggaaactgtaacacctaggcggtgctgagccaggatttgaatccaggtctgcaaatccaatgcctgtgctctctgcacttcaccggaatgaccttatggaccccagaggtatcagggtttctctggaagcagggtctctcaccaaccagaccagcccagctaagactccatgggagaggggtcacttgaacctgactcctttggtaatatgtggatgtcagtaaccacagcctcccaggaaggaaacccaagaggaggtgggcgggaagaaggaggaagacggttggcctcatttgggaggtgttcacggtggggactgtggacaaccacatggagctgtccagtagggcgtggccacccagggtggagttggtgtagagcttcggtcgtcagcatgtgggagaggaagggattgagctgagaggcagagggtccaggtttggaccctggggacaaagggcagagtttccaagatggagcctgagcagggagatccagggaagaggagaaaagccaagtgtggcggcaggcagaagggggagctatggattccaaccttattgctcccggatcctttgagaatttgagaaactgtggacacagtacagagaaaaaatgcccataggtgtacaatttgatatattagcaagttcacagacactctgcaatccaacgtagtaccctcggatattcataagcctcaggttaaaygcctaggcagctgcagattgaagaagagagtagagctaatgtcatatgccacagccagcttagaggtggactaaaaaatatgcttagatttggcaagaaagacatcatgaatagcctttgaagttctggtggtttggggcagaagacagatttttttttttttttttttttttgagatggagtttcactcttattgcccatgctggagtgcaatggcacgatcttggctcaccacaacctctgcctctcgggttcaagcgattctcctgcctcagcctcccaggtaactgggattacaggcatgcaccaccatgaccggctaatttttgtatttttagagacggaagtttctccatgttggtcaggctggtctcgaactcctgacctcagctgatccgcccacctcagcctcccaaagtgctgcaattacaggcatgagccactgcatccggcccagaagacagatttttaaggacttgacaagcyaatgggaagtggcaaagtggagccatgagtccaacctacgttttyttttctttttttctttttgagacagggtcttgctctgtcatccaggctggagtgcaatggtgcaatcacagctcactgcaggcttgaactgctgggctcaagtgatccccctgcctcagcctcctcagtagctgggactataggcatgagccaccatgcccagctaatttttttactttttgttgaggcggggtctcactgtgttgcccaggctggcctcaaactcctgggctcaaacgatcctcccacctcagcctctcaaagtgctgggattacaggcatgagcccccatgttcagcctagcctgactttttaggagccttgatgatgaaggggctgagtccatgatgggaaagtcttgcctacctcagaaagatgagcagaagagccaggagaaaaggagagactgaaggagcccagaggagtcccttgggagggagggtgggaggaggcggctgagggctttgcactgccgagcagggggagccwggcaagtcatggactttgggcctccacgtcctyaatcatgcaggcaatgcagggcttcccttgtaaggctgtggtgagatgaaataggaagtaatccatggaaggcccttgggcggtgcctggcacacaggaatcagtcaggacacatctgccgttactgttgctctgatcatccagygcccgcgtgccggtgcacacctcttccctgagaagcaaggaggatgcgccagggtaccggcagaatgtggtgtgcttggaagttgggggaagtatgtggaggggatagttcctccccaaccccagggcctctcttctctgtgaagtaggaagctgggtggaaggagaggcagtaaaggggagtagagcgtgttcaagggcmgtggggagggagctgaacttgaagatgcacagggatcatccatcaggctgtgtctagggtcttgcagaggttmaaggtgccagacccacagctgtgtgagtctccatgctcagcagcttgggtatggggtacaaaggcaggttcctgcgctgacccaggggtgagggttcatgggtgcaggtgagggagatggagtaagggttaaaagagaacggctaggccaagcatgatggctcacwcctgtaatcccagccctttgggaggccaaggtgggtggatcatttgaggtcaggagctcaagaccagcctgaccaacatgttgaaactctgtctctactaaaaatacaaaaattagttgggcatggtggcgcacacctataatcccagctacccgggaggctgaggcaggagaatcacttgaacccgtgaggtggaggctgcagtgagccgagatcgtcccattgcactccagcctgggtgacaagagcgaaactctgcctcacaaaaaaaaaagagagagagaatggctagctttggaaaacagtctggctattcttcaaaaggttaaacatagagttatgatatgaaccaacagtaccactcctgggcttgtacccaagagaaaggacaacatcttttcacactgaaacctctacacgaatgtgcatagcagcactattcacaatagccaagagctacaaacagcccaggtgtccctcaactgatggatggatgaataaagtttgaatatcattcagtcttaaaaaggaatggagttgtaatacatgttacaacatgggtgaatgttgaacatattcggtaagagaagccggtcataaaagaccatatgtcatatgattcaattgacgtgaaatgtccagaataggcaaatccaacaaagaggaagtagacctgtagcttcctagggttgggagggtctgagaagaaatggggagtggctgctaatgggtacaggggcttggcggggaagtgataaaaatgttgtamaattgactggggtgacggtttaacaactttgtgagtgtactaaaaagcactgaawtatatattttatttggatgaattatatggatgtgaattagatttagataaagccgttaagaagagagaagatatggccaaagctatggtttgtagagaaaagaaacaaagataagaggatgaggatgggctgggcacggtggctcatatctgtaatcccagcactttgggaggctgaggagggcagatcacttgaggtcaggatttcaagaccagcctggataatatggtgaaaccccmtctctactaaaaatataaaaattagccaggtgtggtggcacacacctgtaatcccggctactcaggagactgaggcaggagaatcacttgaacccgggaggtggaggttgcagtgagctgagatcacaccactgcactccagcctaggcaacagagcaagactctatctcacaaaaaaaaaaaaaaaaaaaaaaaaaaaaaaaaggatgaggatgaatatatggagcaaacaggaatgagagctgaaatctccatgaggtcaaagaatgaatgaggtggaggaaagagctgaaagccgctaggactgcaggctgtctccggagggtggtgggaagcatgtgcttgaagatggtgccctgtctccagtcttctcctctccacctaggctgatcatcttcagtgttttcacatcttcctcctgtgctatgatttcaggtcttgtctgttgagatctcggtgcttgttttttcttgtccttcctgccccatggtccctggtgggtcacacttcccatcattaacaccctggaggccaggcacagtggctcccttctgttatctcagcactttgggaggccaaggcgagagaattgcttgagtctgggagtttgagaccagcctgggcaacatagcaagatctcgtctctacaaaaaaaataaaaataaaaaataaatttaaaattagctgggtgcggtggcatgcacctgtggtcccagctacttgagaagctgaggtggaaggatcgcttgagcccaggaagggaaggctgcagtaagctgtaatcacaccactgccctccagcactccagcactccagtcttccaacctgggcgacacagagataccttgtctcaagataataataacaacgccctggctcaggagtgtcgccttctcttctccaatgtccttggggcaaggtcacccttccaggtaaaggcccagccccagccacagccactcctcccacagcctctgtaaggaggatgtcaggcctccagccagtggcccatcactcctgtaaaggacttcccagacccagaccagagtcctacagcctccttcccattttgactcaaggaccccagcagtatggcctggccctgtagctgtccaacagagggcagcagctcccgagctgatggggatggtgaggcaggracacctggagctaccaggctgctatgcaccggtcctcacctcrctctccctgccaccctgcagagtacacggtggcagtgcccaagtccatgttccccgggctcttcatgctggggacattcctctggagcctcatcgagtacctcatccaccgcttcctgttccacatgaagccccccagcgacagctattacctcatcatgctgcacttcgtcatgcacggccagcaccacaaggtgagcggggcggggtcccagcccggacctagcatgtgcagcccsagagggcccggcagccagcsgcagcttcaggtgctgcggagcctcctgggagtctggctgtgggttgggagggacgggacgtttgatgtgactcacggggcaactgggttgggcatccgaacctaagccaggcggggacagcgtgggtgtgcagcatcaagctgaccccaggccctctgcacccttgtttacgcatcacctttaatcctcaaaacaactcattcattcgttcattcattcagcaaatgcccagtgagtgcctcctgtgtgcgagacactgttctagacatcattgaacaaaacaacaaaaagccttgcgctcctggagcttgtgctgaaaacagccccatggttctccccgttccacagagcaggagactgaggcctaggaggactaaggaacttgccccaggtcacacttggcacagccaggatgtcgtaccccattctggggattccagagtctgcgctctcaatcacccttcccctgaggcccttcaaggactccacgacagtcccagaagctggcccgagaagataggtctgcccaaaggaagctacctcccctgtaccccccgctgcttctctgtccctgcattgtgctgtccttggcccatcccaggctgttccscagcccgtctccacactctgttctctgctgggcataaatcagagaaaatatggcagatatgatactttcgggacaccagtttagaccctgatgtcgctgatactgaacgtgggtttcaccttggtttcccagcagcaacttaatccggttcatctcgatgagccgattcggggtttgatcggccgcctgggacagttctcaggttggttggctgtggtcctcccggctctccccagagttgatctgcatcctagggggctttcctaggggccagtatcagggtgggtgcccagtcctgggccaacctgtctctcaggtatgctctcagaggtagcgcagcccaggcctggcctgtgtcctccagcctcacctggcctctgctctgcagagctcactgcatctgcttctgtgtcccttgccctgtttgtgaagccttttcagatccactgccctgtccgctatctttcccatccacaggggacaccagaaccttctgggaacctgctcaggccattctggggccccaggggctgtctcaggctccctcttttgagacacttccaccccagtctgtccagtcccctgctgccacaccatgaggacccgaggagactgtatggcctgtagccacgtgggctccaatcaggaacgtgttctcagatccccagacctatccatctaaggatcctgatccagctgtgacccggatctggcccataccagctcacaagagcacccatgcacatcctttcctgtttctgttccagtgacgccacctcrgcgcttgaaagcgccagggcagttttcacactgcaggaattggcaaacactaccaatcagggctctccctccctccctttatttccccctccctcattccccagctctctcccttcctccttttcctgagagctggttttccagcacaycactggtcctgttgttcctggtctgaagggagggaggcccacgccagcmtctcattgtgtcactgtcacctgctttctctctctctcctccagcccagagaggctgcaggattctcttctcagactcctcaccaagccatagctaagatctcacctctatgccaggcccttggcttctgaagctcgagggccacggtgaagcggtgttctctggttcactgtggcgacacccccttggaacaaaaaaggcctcctgtttggacatgggggtggggaggacacctctagtgacacttccgggtcatcccgccacagaggctgcattaacctcagttgccctcagtgccttgctctcccagacaacatcaggcctcagtctaggtgccctgtctccagaatgcccctctagccaggggcacggcatttagggatgggatacctgtctagcacctgacaaattccagagtcacagtggcctctataagatgggctctgagccgccagcacaccccacccatcctgcccatcctgcccatcccgcccatcccatgttcctttgcaatctgccaggtcccttcctggctcacaaatgggaagtaagacagtctctccagatcttccagacgtggtggcccgccctccccaaagccaccaaaggtgccaagcctacgcagtggaatgtctgggccgctgtgcccctgtcctctgcagggagtggccagggtttggccagctgccggggcccctggctgcctcctgatgcccaagcctctccatctgcaggcacccttcgacggctcccgcctggtcttcccccctgtgccagcctccctggtgatcggcgtcttctacttgtgcatgcagctcatcctgccygaggcagtrgggggcactgtgtttgcggggggcctcctgggctacgtcctctaygacatgacccattactacctgcactttggctcgccgcacaagggctcctacctgtacagcctgaaggcccaccacgtcaagcaccactttgcacatcagaagtcaggtgaggatgggcctgtgcttcccagccccctatgtgtgttcattgatttatttgccaactaccatcgagctcctgggaacggcaaggcactgttccatgtacggggcatatacagagggttccctctactctcttccctggtgcagacagctgtgcagagacaggcaaggacatcaataaatggcaaagatttcaaactgtgataaatgccataaagaaaataaaggggctgggtgtggtggctcacacctgtaatcccagccgaggggattgggaagccgaggcaggtagatcacttgaggtcaggagtttgggaccagcctggccaacatggtgaaacctgtctccactagaaatacaaaaattagcggggtgtggttgtgcccacctataatctcagctacttgggaggctgaggcatgagaatagcttgaatccaggaggcagaagctacagtgagctaagattgcaccactgcactccagcctgggcaacagagcaaggctctgtctataaaaaaaaaaaaaaaaagaagaagaagaagaaagtaaagcaaggtgatggaatatcacataggtgggggagggtccagcgatttccactgacatattatgtgggccacatatgtgattttaaattttctagtggccacactaagacatgaaaataaacagatgaaaagaattttaataacatttacttaacataagcaaattattatttcaacatgtaatcaacattaaaaaatcattaatggctgagcgcagtggctcaggcctataatcccagcactataggaggcggaggcaggggattgcttgaagccaggagttccagaccagtctgggaaacatagcaagaccttgtctctacataaaaaagttttaattatccatgtgtggtgatatgcacctgtaatctcagctacctagaaggctgaggcaagaggatcatttgagcccaggagtttgaggcagcaatgagctatgatcatgccactgcaccccagcctgggtgacagagtgagaccctttttgtaaagtctctttaaaaaaaaataattagcaactcttatactaagtctttgaaatctaaggtgtattttgtacttacagcacatctcaattcagatactaaagtttcattagaaatactagatccatatctagattttataaaatttgcaaacagtagttcacataggtaagttgctccaaacatgcttaaacattttccggtaacacacttgaggaggccgagacgggcagatcacctgaggtcaggagttcaagaccagcctggccaacatgttgaaaccccctctctactaaaaacacaaaaaattagctggatatggtggtgcgcgcctgtaatcccagctactcaggaggctgaggaaggagaatctcttggacccaggaggcggagcttgcagtgagccaagatcacaccagtgcactccagcctgagcaacaagaacgaaactccatctcaaaaaaaaaaaaaaaaaaattccagtaactcaatcaagcatcagtttttacattgacatgttaattcatcagaattaaatgaagttagaaattcagtttctctggagctctagccacatttctagtgctcagtagccatgtgtggctaagggctagttggacagcaaagagattaaatggtccaggtgtcattgcagaggtgccattagagctaagaccctaatgaagagaaatcagcatctggcgtcccaagagcgactggtgcaaagccctgaggcaggaatgaacttgggccccaaggaaggggaaggagatggaggtggggggtgggagggggccacgtagcctagaaacgaaggccagataaggaattagggtttattccagcttcatgctggggacaataraagacacaggttccccacccttgacttctgccagaatggcctcgggagttgggaaggccaaggggacagatattgacattgtctccacctcttatccctaccctggcacccttcccaagccagcgcacgcctgctccttcaatgcctcatcttctccccgtttgtctccctctctaggatttggtatcagcactaaattgtgggattactgtttccacaccctcactccagagaaaccccacctgaagacgcagtgacaactcccaccccctccgtcctgccctcagcccggccctggccccttcccgacccccacccgccattcagaccccattaagaaggttggcttggccaggcaggatgggctgtgtccggccctgcagcctagtggaaggtgctgagggggccctgaggcaggaccgccctcctgacccctggtaggagggtcacatccacttggtggccaggtggcccttggtgacccacttcttcctggagcgtccctgcctagagctcagcccacaggactgcttcaggccgtggccacaggtagcagccgcaaggggaaatgaagaaaactgagccctcgtggccacctgtgtcacccttgtgccttagcctcatgggctgcctaggagctgcctgcacggcacagctcgctttcacagtcagaagtgggtctgtgggatctgtggtccctgtcctccctgctgtcccttctggggaggctttggtggctctgaggtggacaaagagctctcgcaagaagagacagcgtgatgcctcccacagtccaccccagaccctggggcagcccctctggccctgccagctgcctgcgtcgttgggcccagggtggctggcaggagtcccagctgcttgctttaggacctggcagcttttcttgccgtccctcccctgcctccagaatcacagcccttctccccaagggaggctgaggaggcttctccaccagtggcagccccaccccgtccctggccattcttggcctccaccccgctcaggcccctactcgggcgctcccagaaggagccacctctcagtgcctcacctccccctgcctcccagcctccgcagatgaggttcctgccccttcctcctcgtaaccaaaaccctcactgctcccaggacggtcttatttataaaccagatacatgttcttagtctggtcccagaccaaggagctggtcagacggccctttctaatcctacatgttgagcttatgtaaaaaatgttgtttcctcctgtttttggttcctttcttacccacaaaccattactacttgaaacttaaaaaastcgccaagtgtaaaggctaaagagaagcagtttgacggaccttgtgatttgtactgtttgctgcggagctatttaaagattttggaataaatatacaaaactacggttgtgaaataaaaacttaaattgtatattttgaaaaataaaacmctgaaaagaaaccaacaaaaatgagttgttcatcagactccctcgtggttgggaaggggcagtggtgtggggagggatagaggggcagaggattggtccccagggagggagattctagccctgaccagggtgggtagaattgctggggcatggtgatgattaaaagctgaccaactctcagctgggcgcgatggtgcatgcctgtaatcccaagattttgggaggccaaggtgggaggatcgcttgaggccagatgttcaagacgaacctgcccaaaatagcaaaactccatctctaaaaataaaagaaaacaagacaaaagaaaacaaaacaaaaggagaaagctgactgactcttattctctcactcagctttattctgtttctaaattctctgcagacagcatctcctcttattgcctgcacctgggatgcattgtgcccacaaaccactttgatccgccaatggggagggatctcttctggagtttatctaaccccaactgagcttccagtcgactttcctaaaacagagggagaaaggctccagcaacaaatgcccatagtgggaactagaacctcaagcagctcagtctcggtgaaactgttgcttgtctttctctgctgccctatcggaaccacctaggaagctgtcgaagtgcagctccagggcctcgcactcagggtctagttcagtaggtccaggggggtaggccctggactcacctgtctgaggacacggaagcggaagcaagctgatgttggggagcctcggagggagcccagaactctgctgtgtctccctgctctggcagtcataggggcagctttatgcctgcagctcccagcccgaagataagtaggacccgtcggagccacccatcactcgagtccctgaagcctgtcaccggaacccagcccgtccaagcagcagaactcataaccttcatttactgatggagctgagcagctcaccctagaccatcacacccagggggagggaggcagaggaagaacacaggaggagctccgcaagtgtaaacacacatggccacagcaggagaaaaagcctaaggtgagcaagatttagcaaaaaaaaaaaaaaaattgaaaattttctttaagaagagtgaaacaggccgggcgcagtggctcacacctgtaatcctagcatttgggaggccgaggcaggcggatcacttgaggtcagtcgttcgagaccagcctgcccaacatggtgaaaccccatctctactaaaaatgcaaaaattagctggggggcgtggtggcatgcacctgtaatcccagctactcaggaggctgaggcaggagaattgcttgaacctgggaggtggaggctgcagtgaactgagattgtgccactgcactccagcctgggcaacagagcaagactccatctcaaaacaaaacaaaacaaaacaaacaaacaaacagtgaaacagacgggacatggaagcttatgcctataatcccaacactttaggaggccaaggcagccagatcgctttaggtcaggaatttgagaccagcctgggcaacacagtgagaccccatctctacaaaaaataaagaaaattacctgagtgtggtggtgcacacctgtagtcccagctacttgggaggctgaggtgggaggatcacttgagcccaggaggttgcggctgcagtgagccgtgatcacaccactgcattccagcctgggcaacagagtgagaccctgtctcaaaaaaaaaaaaaaaaaaaaaaaaaggaagtaaaacaaaactaataagaaaggccaaaaaataaagtgagtttctagcatggtaatgagaagatttagaaaaaaagtgacaacacgaaaccaagcccacctattaatgaaaagtccaattggtgaaaatctgacagattctcccagagctccccattgcaccgctgtaactgtccagtggggttgggagtatccacaaggccttttggagagagagcaagtcccacctcacagggacttgagagtgcagaagtaattgcctgcattttctttctttttttttttttagacggagtctcgctctgtcgcccaggctggagtgcagtggcgcgatctcggctcactgcaacctccgcctcccgggttcacgccattctcccacctcagcctcccaagtaactgggactacaggtgcgcgccaccacacctgataatttttgtatttttagtagagatggagtttcaccatgttgcacaggctggtctcaaactcctgtgctcaggcagtcctcctacctcagcctcccaaagtgctgggattacaggagtgagccaccgcacccggccatattgcctgcgttttcacagcagggcaaaatacaggaaggccacgaggcctgcaatccccaagcagttagtgctcacggagcagcccccacctcagtgagcatctaggggagctggaggattttgccatcaagtgtaagagtcaaagattagatgttagagcaagcacaggatattatcaaaatgccaacacatctggcctgatgggaaaagcctagacctgtgacgtgggattgtgtttattcctgcagtgggagagacactaaaccaaaaaagttttatgtttgctcagggaggtagctattgatttatttatagagagaggttctcactctgttgcccacgctagggtgcagtggcgcgatcatagcttactgcagtcttgacctcccagactcaagagatcctcctacatcagcctcccaaacagctgggaccgcaggcatgtgccatcgtgcccagctaattttttaatttttctaagtagagacagggtctctctatgttactcagactgatctcgaactcctggcctcaagcaatccccccagctcagcctcccatagtgctgggattacaggcatgagccacaacacccagccaagagggccatttaaattctgatcagcataaagtaaatctgcagattgactgaccctcagtggccctacaaatttgcctcgcctgattctccagggatgacccagcttccatggtcaagaacagaccaaaaaatagccatcatatttatttctggtattgtgtttgtatttccagacatgctgtctttgggagttccttagttgatctgaagaacagccctcttaattctgctctgttccactcccccgttggctctgacctctgatctctgcctttgaactttgtgtgattttttattgtgcccagcacaatgaccaacttgtaacagagcccaataaatgcttgtcttgtctgcatcagatctcagacggtaagaataactgggccttgcctctccacctgttcccggcctctgctgccctctggtggcagcatgcagccctactccattattactgccctcgcggggactgttttggaagcaggtatctgtgatttcaaaattctagcctttcccaatttacccgttctgttgacttacattcttgactcatctgccatttttgagaggaagttggaaatatgtatatgaatagttctaactttcaaaaaagccataatggttgcaaaatttcaactggagttttctttacagttaggtgttttgcccaaagaccacaccaggctccaatgaataaatgttatctataaagaatgccacaagatgaatgtaaaatttggaaaattccaggactctcatctcataagtgtctgtcccatctcagacacctatagcggagaggaagaaatttaaaagaagaaaaaaatttttgttctggcaaaagcagtggggttatatcttcttttaggttccctaaaaatgggattacaggcgtggtggctcttgcctgtaatcctagcactttgggaggccgagacaggcagatctcctgaggttgggagtttgagaccagcctgaccaacatggagaaaccccgtctctactaaaaatacaaaattagccgggcgtggtggccgatgcctgtaatcccagctacttgggaggctgaggcaggagaatctcttgaacccaggaggcggaggttgtggtgagctgagatcgcaccactgcactccagcctgggcagcaagaacaaaattctgtctcaaaaaaacaaacaaacaaacaaaaatcaaaacctaaaacaagcacatggatgcaggcagtctatttgggaggtgattgcagaaataaagagcgagaaccagggaggtctagaaagggagaagttggaggagcagtgtaaggttgagtatgtgaggttctcctacagattctgtaagggcatcttgagaagcacagagaaaatgtatcggaattgtccaataggacaggaggctggagcatttatcaccagcttccactcctatgggtgaggactgtcttcagtgacatcgattcaccctcacttagggacttcccagccatgcaagccaagcagatgctggctttggcaaaagtccttggacaaaagcaggaacatagaggtatgcatttgtagtgggattctatcagtacaagttgagtatgagcttgttaggcaggagctagccactggaactgtggctgaaatgaaagctgagacagagttcacacagaaccttccaccgcaattgaggctaagaccagaggcagacagagggggcatgatgaggaggaacagatgtgtttgctacagaccccaaagggtcatatcctcaatgtaagagtgaaccaagaggaaacccacctccccagggcactgcaagtgaaatctcctgcgtggagtgggtaaaggctgaggatgcagagccacaaggagagtcctcactgaggtctgaagcctgaattcgtgcaaaccgggtgatctgaaacacctcaagccaaaattgtgatgtaaaatagcccggttggtggagccacaaggctctcagaggaagcaattaaaattgttttatggagaaatgtatcttcaattcaggcctcaaaaaaatcccgcaggtaaaattccaaagactagccaggcacggtggcttacgcctgtaatcccagcacttggggaggccaaggcgggcagatcgcgaggtcaggagttcgagaccagcctggccaatatggtgaaaccccatctctactaaaaatataaaaagtagccaggcatggtggtgcatgcctgtagtcccagctactcgggaggctgaggcgggagaatcgcttgaaccaggaaggcggaggttgcagtaagccgaggttgcggcaatgcgcttcaacctggatgacagagtgaggtcttgaaaaaaaaaacataaataacttaggtaaatgtaataggataaatgtctataaatgaacttttcatgtaatttgaaattttgaagttatgttaggttaaacaaaataatagatattcgttaaatgtctgggtcaatttgtttcattaaaaaatagtattttttaatgaaatacaagaacacattattttttatgaaccatatgaaaaatattattttttaatgaacaaaattactgaatataaatacaagtgtgttctttgatgcttacattttgtaaaagattacatttattgggtctattaatacatccaaaaattttattatggaaaaacatgtttttaaaaattatgaaatgggagccaggaggactacttgaagccagttcaagaccagcctggacgacatagcaagaccctttctctatgaaaaaatttaaagattagccaggtgtagtggtacaccacctgtagtgttagctacttcggaggctgaggcaagagcatcacttgagcccaggagtttgaggttgcagtgagctatgatcacaccacggcactccagcctgggcaatagagcaagaccttgcctgggatagtgactctttccttcaaccttttcatcacctcttataacttttttttctccagtctaactctgcccttatagcctgacactgaaatgtttatcttaaaggcctggaagaacaatgctttctttcactataccttgattctgtactcttgg

SEQ ID NO: 94947 - DNA, 15274 bp, Homo sapiens
cgcgcccgcccgcccgccgtgccctctctcaaggttggcggaagtgaggaggcgacccgcggcctcggccgaggggatctgcggggtccggccttggacgcgggcgtctcgggggcccggcgcgtgcatcccctgggaggtgcccctccccgctggcccgccagccccagtctggggccactcctccgccccaccccgtcccctgggcaccgccgggggcggggctccctcggtgcctgcaggacctgcttcggtgggcactgtgcgcgctcctgatctgcatgcagcccccaaacatgctcggctccgcggcctggagatttggcgcggccaccagagcacctgttgcgttttgggccagggcaggtcccgggtggccaggagaggacaggtaaagctagagcagtggccgcaggaacagagcaatctggaaagatgtcagagaggtggtgaagcctactgatgcaagggcaaagccccagggacggtgacagggccacaccctcctaaagtgtaccttgggtacaggtcttttctctcccacaggcccctgtctcccagcctgatgcccctggccaccagaggaaaggtaatacttacaaaaactcggcactagccagcactaagagggtttgtcatgggccctgattccaggtgtccatcatcttgtgtaactcccctagaagattcaaactattattctacccatttcacagaggaggaaattgaggcagtggggttactgggatctggataaacagggcaggggaagacaggttgtgagggcagagtggggagggctagtggagggtggctgtgacttggggactggggaggacagatgctgggagcagctgcaggaaaaccagtgaggacttaacccctaccggtctgctcccagtggtgtcatggatagatgtgtatactcgcgctacctgccagccccgggaggtggtggtgcccttgactgtggagctcatgggcaccgtggccaaacagctggtgcccagctgcgtgactgtgcagcgctgtggtggctgctgccctgacgatggcctggagtgtgtgcccactgggcagcaccaagtccggatgcaggtactgggcaggtggggcaacgggcaggggatgcaggtactgggcaggtggggcagcgggcagggtggatgctggctggctctggggctggggcagcctggagactgatgcacaggagacagggttggggggagggctggtggccagcctcccggctgttgggtgagcttttctcccttcagtcttagagcatcccctttctctctctccctcactgtcccccctgttcttctcctgagcacagatcctcatgatccggtacccgagcagtcagctgggggagatgtccctggaagaacacagccagtgtgaatgcaggtgccagccaggcccaacttctgagctcgcagaggccaggcttggggggtgctgggtatggtggtccacagaactggggaccaggttcctaagagtagaaccaaggggccgggcgtggtagctcacgcctgtaatcccagcactttgggaggccgaggcgggcggatcatgaggtcaggagatcgagaccatcctggctaacatggtaaaaacctgtctctactaaaaaaatacaaaaaattagccgggcgtggtggcgggcacctgtagtcccagctactccggaggctgaggcaggagaatggcatgaacctgggaggcgtagcttgcagtgagccaagatcgtgccactgcattccagcctgggcgacagagcaagactctgccacaaaaaaaaaaaaaaaaagagtagagccaagggtaggccttggatctggggcaacaaagtaggatgcttgggccgggggtagtggctcacacctataatcccagcactttgggaggcccaggcaggcagatcacctgaggtaaggcgtttgagaccagcctggccaacatggtgaaaccccatctctactaaaaaaaaatacaaaaattagccgcgcatggtggcaggtgcctgtaatcccagctacttgggaggctgagacaagagaatagcttgaacctgggaggcggaggttgcagtgagccgagaccacgccactgcactccagcctgggcaagaagagggaaacacagtctcaaagagagagagagagagagagagtaggatgctgggatttcctgatcttcctcttgtttgtctgtgtctgtctatcttacttttcagacctaaaaaaaaggacagtgctgtgaagccagacaggtgagtcttttggactccagctgagtaggggtatggggagtacaagtgagtccagaagctgttgctcctctttctcctcccacccgtcccccactttcycttttcctctgctccccaagcctgtgttctctgccccgaccccagctctagggaagactcttccttcccaccccagacatgtcgcttctcctccctagggctgccactccccaccaccgtccccagccccgttctgttccgggctgggactctgcccccggagcaccctccccagctgacatcacccatcccactccagccccaggcccctctgcccacgctgcacccagcaccaccagcgccctgacccccggacctgccgctgccgctgccgacgccgcagcttcctccgttgccaagggcggggcttagagctcaacccagacacctgcaggtgaggcgtctgtggggtggtgtttgtttgggaaggcaccaaggccctgtcctggagcaggtccagggtgagcctgccagtaggaggagggccagggaaggggaaactgttgaatgtgttgaacaaatatttaccaaacagctgctggcacctggagctgtataagcaagtccaacattctaactcaggagtcagatacaggagggacaatgccagcagaggatgtcaagggctgtggtgaggggtacctggcctcgtctttcagaggtcagagatctcttggaggaggtgacatctgcccggagtagaaatgtaggacacagcttttccagcttgcagttcgggccttcccagaagcccctgtggtagacatctgcccttacctacgggcttcaagaggccaggggacatagtggaacccttgtccacccttacctgatgtgtttctcaccatccgtgtcccgcagtgaggccatggggtgaaatcatatgggcagggccagtgggggctcccgaggagtgtcaggaggggatgacctttgcaaaaggttcatccttcgccctgcagcctccagtgcccagggccgagtggtgtggcaggatgctcaggttgtgatcttagtgggcccgaggcacacatgagtccagggctggggctgcgctccagccagcatgaacagatcacttcctccctcctcaggtgccggaagctgcgaaggtgacacatggcttttcagactcagcagggtgacttgcctcagaggctatatcccagtgggggaacaaagaggagcctggtaaaaaacagccaagcccccaagacctcagcccaggcagaagctgctctaggacctgggcctctcagagggctcttctgccatcccttgtctccctgaggccatcatcaaacaggacagagttggaagaggagactgggaggcagcaagaggggtcacataccagctcaggggagaatggagtactgtctcagtttctaaccactctgtgcaagtaagcatcttacaactggctcttcctcccctcactaagaagacccaaacctctgcataatgggatttgggctttggtacaagaactgtgacccccaaccctgataaaagagatggaaggagctgtccctgcctgtgtcactgtttgtcactgyccaggctggctggtttgggcatgaatgtctgcatcactaaatccagagcttgtcttgctccctcattgtgcagatggaggaaatgaggactaaggccccacagcagatcccaggcagggccagaattatgtattcatcactttcaagttattgccacgcatgggagtcagggatagcccagtcaatacagactgcctgccctcctgctcttcaccagggttcttttctagaaggagacagccttctgtggccagagagcttggggtaggacccagatctactgagtgaccttgcttgtcactacccctgcctctctgagcagcagtttccacatgtgcacatagagggaacagaagattgctgtggttggcgtcctcgggccccagagaagtttgagactatctttacgtaatagaaaagaacacttgttcttcctgccaggcagcgctttcagcatctgctgctttttgttccctgcagcttgaatctaaagcctcagcacctgccctgtcttaacttcactcccacctccctgaaagggaagcaccgcaagtctggggctggtgggcctggtttgggcggcaggctcccctcaacccaacccacagttttttgtgtttttttttgtttttggacagagtctcactctgtcacccaggctggagtgcaatggcacaatctccactcactgcaacctccatctcctgggttcaagcgattctcctgcctcagtctcccaagtagctaggattacaggtgcccaccaccatgcccagctaatttttgcatttttagtagagacgggtttcaccatgttggccaggctggtctcgaactcctgaccttgggtgaaccacctgcctcagcctcccaaagtgctgagattagaggcgtgagccaccgcgcccgcccaacccacacagttttctccaccctcgcctcccttgcatcctgcagcttccttcatcagttgctgcctgagattctcctgacttgtctatcctagcccaagcccagcccctacccttctccctgcagcctccagtgcccagggctgagtggtttggggtggatgaaaggccaaccttgggcaccactgctttgcctgctgaagcaggacattcaggggcagagttaactcaattgggcagccactgggaggggcagccaccctaatggaggctttctctgaggtgttgggtcagagcatgtgggtatgatcttagtgggcctaaggcaggagtgggttgaaccaggagacaattcctgacagcgattactactttcaaatcattttctcagtcatgatgtcactggacatgccataggtcaattagcatgaggcagaaaggggttagggccccagagctaccgcctccagagcccagttagccccaccagtcacgcacaatgcttcacatgcacctcctcacttyctcctcgctcgattctgaggtcagcatcatgattgtcttccttttacaattgaggaaataggctcagaaaggctaactggccggggggatttgacctcaactcagctgtctccctaaccttcaacctaggtttagctgcctctcaactgcaggttcattacttcagttgacagatgtttggtggctgctggggcgcctgaaaataagtctggtgggggaacaggcccagccagatcattccagtyatgagtcacagcccaggtgcacaggtagaggtaagcctggctcctgggagagagatgtgggcaggagcattggctggaagccagggcttgtcattggacatcatctcggtcctgcaggggccctgtggggtgggtgtcatcaagcccgtgttacacgcctgtattggatgacaaattctaccaagcacacagccgaccgggagttcaaacgtgagtgtcactgtgaagcccaggctccacagcgactgagggccgtgggccatgatgaggcccgggaaaacaggagtgctgtgggagaggctgggggcgacttgaaatggcgcctcaagaccccctccgggaacccacgcccgcctgaccttactatcacctcggccggaagtgtctccggccttttcggaagtcactttcacctaaccttacagactaccgctccgccggaagtgacgcagggcagcggcgtcgcgggggcggggctcgggaaagacccgtgccagcgggcgtgtggccgcgggtttcgcacggtccaataagggagggcggcgtggcccggcctggtagcgacgaggacgcgcctgcgcagaggcggcagcaccaccggggttgactccgggggcgcggcgaggaggtgagcgggggccacagcccgggctggggggagccggggtgcaagagggcaggctggatcaggccgggcagaagcggaccgggctccgagtgtcaacgagagctaggtgacgaggaaattgggggtgggggccggagctgtccggagatgccgcagggggagggttctcacgccgcacggggcggagtcctgggactcggggcgggacgtggaaccgggacgggtgggacctccgagctggtgccagtggaaggcggagcccggcggcggggggcggagctaggagggtcgggggacggagcctggctcttgaaggaggagctggaggaggtgaaaggcggagcctcggggtcggaagcagagggggacggagcggaggcgctgggggcggggcttcagccggtgagtggcgtggctacggctccggaaaaggggtctagttctgtcgaaggcggggctgcaggcccgggggcggtaccgcgtcctccgaagggcggtgccaaggagccaagtgaggagcctggcccgagtaatggccccgggcgtcctcgcgggggtggtctccgtggtggccgggcttggggacgccgtaggccgagaactccaccgggagaggtggtgtgggtggagcgggctcggcggccagcagacacagggccagtctgggtgccccggagacccccaagggctcagagttggggcggcgccccgggcggaagcacagggccaggctggggggtatctcccgaggacccgggctcctcggagccacccagtggggatgtgtgggtgcctcggggccggccccctgcagcggccgcagaggtgttggtgtgctggaccgggggcagctgggtgtggcgtgagtggggccgcccagtcggggcaactgcagtgcagccagatagggtctggactttgcgtaaagggacaggcgggaactgaagagcggaggtggggactgggagggagggaaggtatgggggtgagcaaaggggcgggtccctggctgctgtggcctcccctgaccccctccccccgctgctggggtcctcggccaagcccccttctcactggactggtaagtgtggccccggagcccgggggagagggcggtgacccgggacaaaggggatcccccggggcaaggaagatacagtggcggtggaaccctcctgttacctacccgtgttccatactctccctgccctcccccacgttcagtcggtcggtcggggtctgtgcccacagagacatgaggctgagctggttccrggtcctgacagtactgtccatctgcctgagcgccgtggccrcggccacgggggccgagggcaaaaggaagctgcagatcggggtcaagaagcgggtggaccactgtcccatcaaatcgcgcaaaggggatgtcctgcacatgcactacacggtgagtgggttgggcgggccttttgggagtgggtggggcttccgaggaccagagrgtgcttgggagtctggttctccataagccaggtaggtgaccttgggcaagtcccctctcgcctctaagccagtttccatggttctgccttgcccttgcctactgcccaggtgggcaccagcaggcagtgacagtgtactgtgagctgcccaaggctctgtcctcttaaagaactatgaccagctgggcgcagtggctcacccctgtaatcccagcactttgggaggccgaggcgggtggatcacctgaggtcaggaatttgagaccagtttggcctcatgatgaaactttctctgctaaaaatacaaaattagccaggcgtggtggcgggcgcctataatcccagctacttgggaggctgaggtggaagaattgcttgaacccgggaggcagaggctgcagggaggcgagatcacgccgctgcactccagccatggcaacagagactccatctcaaaaaacaaaaaggactgaccaccagggctgtgggtgggcgtgggggggcagcttgatggggaaagcagctgagggagggggtgtcaggggtggtcccctcttcctcactggccttctcatggttccacaggggaagctggaagatgggacagagtttgacagcagcctgccccagaaccagccctttgtcttctcccttggcacaggccaggtcatcaagggctgggaccaggggctgctggggtgagtcatgggggaatgggcttgggagtgggggcgtgcatggccaccgcccaggaggtaagctgtgggaggcaagccccagggatacaagacaagggccctgggtgctgccatgggctgagcatgtgtcttcctgcaggatgtgtgagggggaaaagcgcaagctggtgatcccatccgagctaggtaagaggcccctcctgagggtgcagagcgagtttggggtgtgtgactgggaagggtgaaagctgcttcagcttttcattggtcttcaccgtatccattcattacaatacatgcctcctccaagtttggctgtgtctagcagtgagtacagggcaagatcattgaagcactcagctgtagtggccccactctgcccttgccaggcctttggcacccccttcccatctccattacccttctccatttctggccttcttgctgagaggggcggaacactctccctttgcccacactggaagggagcttggccatcactgactgtttctttgtgcatcttcaacagggtatggagagcggggagctcccccaaagattccaggtagtaaaccttttgatacctcccatcacctgcagccagcccacctccctgtggccctggttggcattttgactccccttctcccctacaggyggtgcaaccctggtgttcgaggtggagctgctcaaaatagagcgacgaactgagctgtaaccagactggggaggggcagggggagaggcccccatcagggaccagactgttccaraaaaaaaacaaaaaacaaaaacaaacaaaaaaacacttaaaagcccaaggagtaagcctgtgtgtgtttgtgggccctgagagactcagagacctcagctccagcataccccaccaccttctcctttcccgactgtggagccttgggggtctaggctcaatgacatggtggcccttgcccagagaaaaaggagtgttcctgcctgccaacagcaatactgctccccccacccccacagctccccagccactttcaactcctggtctgggagccagcactgggctatcgtcatggctacgtggcccttaggaaggcctgtggtcacctggggagaagctgagctggcagaagtcaaagagcagtgtgcccccctaaaagagaccagccgagcctgttagctgcaccaaaggcgtatcctagctttattaaagggcccgygccgcagagtcaatataaaaacacaaaaagtcccatcagtttaataacaataaaaaaccccaaaagtggaaaactgagggggcaggggaagagacccctgggccaggggcacgaggagccctgctcatggcaccaggcctggccgcagggtcccccggtattgctgttgctacgaggttggggggcagcgattgtcctgtgggagccaccgttctcctgggtcggggaccstcacttcttctggggtgtgctcagcttctgcatgccccggatcttgtccagcaggccagaaatgaaggcctggatggggtgggagggtaaacattaaggagaccagaccccaagatgacaggagccgggctcccctcaccctgccacccccgccagccccccaggaaatctcttacctctgtgggtttgtaacagtcaaccagcagctcctagcagaggatgggggaggaaggataagtgagtcctcaggagtgggggcctggagctcgcctatacccacttccaagagactggggccaccctgaggcacaggagatgccacaacaacctcacagctaggcattggccccattctgttgaggcaggagctggggcttgagggcctggctccacagcctcactttcccggggcagtgcctcaggcaacccatcgccccccagccccctcaccttgaccctggcagcccgggcatcgtcactctccatgtccaggagctcatccacgtcaatctccagttctgggatctcctcttcctggggtgggggtgggggaggaggragagacataagcctgagttggagagagggtgtgagaggggctctgggttgaggcccctgcctacctcggaggaacccagccctctgcccagcagacagaacagcagctgctctggggaggaaaacrgatcaggcccgtgccaaggcaaactgcccaaagcggggtggggggggagcttcctgtccctgccagtgggcacggggggtgacagacaaggccagacagccagggttggggaccttgggctgggaacccagcagatgtgtctccccaacatccgggccccccatctcaccagagcaccggtgggtgcagctgtcccagcttatcatacccccctcccctcccccaaacacctgtcacagctccccgggagtgaggaggaagtgaaggctgaggggtcactgggaaggacccaggcctggcaaagaggaaacaaagagcccatgctttggtgagggaggggatgcccaccaccctgccacaccctccccaggaagcccctatcctgtttgtagtcagctgcattccagggctgggctagggtaggcaggcagcaccgggcaaacccactcctccaccctgccccccggggcctgagtcaccgtctgaacaaccagggagtcatgggggtggagaagcagagcccagaaagcgggctagcctgcacgcacgccaagatggagctccaggctagcccacagaacagcccagccgcagccgtcctaccagaccagcaccttgtaaccacagtctaacccagcgggcaccaggcggtgagacctcctgccgctgccagcccaggatagcccccttgcctcttgcccaaggctcaggctaccccttgaggcgtctggaggacactaggcttgacctggggagtggcatgatggggggcagggtccgaggcaacggagaaggcagaagtgacttaggtcaggcaagaaagagtatatattgggggcgggagtgcagaggggaggggagcgcgcggggaagcaaagcgccctttgactccagtgacaggcgagctcacagtggagctgccaggcggaccggcgcgagaccgattttggggtgtcggcgcggggtgggaacacacctggcagtcgtagaggcgcgtgagctgctccaggatccactcctctaggttgaggcgcttccgtagctccttgcggtcatacttgacggtgaccttcccttggcgcctcactgggccctcatcgtccgccccgcccgggccctctcctgcggccccgggggggctctgaaagtagacgcgtggtcctgggccgccactgcccggcccgggggccggggccgccaacgccgcgccccccgcggtgccgctgtccgccatggcggccgccggggccacgtgcgagcgtcgggcccctccctgcgccaccgcctccggggacgcccgccggctggctcgggttagctcgccggcgtccgctccgcgcggctccgcggcgagggcggcggcgggggcgcccgggggcagctgcagcattgcggagcccccgggcttggcctggccgcgccccgccccctccccgccgatccgcccgccctttgtcccccgcggccgccgcccgagctgcagccgccgaagcgctttctctgtctcgctcttcctccgccccccgaccacacccccttaaagggccagcccctctacaggcccctctcccctactccgcccccgggcaggggtaggggagggtctattcggcagggggtggcctagctgtccgtactccccaaacgcaaccttccagtcccaaacccaggcgttctaagcgctcaggacgacgatttgcgctcacgccaggaccctagtcttcattggacccttcctcattctgtcctcattgaggccatctgagaataggggctatctgagaatgcaggggagtggacatcgtgtgcagacagggagtctggtgaggagacgctgcggtccccgatgtccaggtcctccagccctcggccagcgaggagcgaacgggctcctccgcacggaccgacacgtggactgggctcctgggaaaggaagagtggagaaggcgggcaggagctgtccgggtccctagactctccgagtagcaggtcccacgcccccagcggaagaagccggggctgggggtgagcggtggcacccggccggcccaaacggccaaccccgggcagccaccgcccaccggcaagatggcgcgaggctcgggcttgtgggaaacggagtccgctcccggcgccgcccctcccccgccctgcggccaggccgggaagcgcaaagttgtttggggcgtcctctgcgcctcgcgacccgagtgcgcacagagggggaaactaaggcgcaaagagctgggcagtgcgggggccgcgacttataataataaaggcggtaattgcggctgaccctaggagcgtgcgtcgggaccgccgcccagtcggctccgcagagagggcgccgtgccggggctcctgcacccccgccctgcggctcctcggtccttcacatagccctggcccacctccaataagccgacggcgcatcccattccctccctctattttattttctgcatctttaaatggtctcattcattcgtgtattgtctgtctcccacttctagattgtgagtgccacggggctgaggcctgcgccgacctggtctgctggtgctaccaggcttgaacagtcttcaaatccactgctattaggcaaattacctggctcccgctgaactccagcacctagaactatgtcacactcgtagtaggccgctgcattggttgaacaaatgattttgaaagaatgaatgtcttcctctgtgcctgcatttcctcagaaggctgtaacaaagattaaataggaaaattcgtggaaagttcaattactacaccacagaggttaattaagtcgcactgctagataaaacgggagacgagactttgaacccaggctgtgtggctcaaaccccctgacacgaagtctctactcaacctcctcactaccctgtagacaccacccaataaggctgcgcagctcccgggggatgtttctgtggaaggcaggctcaccttgtgccaccccaaacagggtcttggatctgagaggcaatgtttctgctccagcccctcaaagacactctttggatgttgtggggggaagccctctgcagcgggtggggttcagagatggattgggattggccccggggtcacacagctggggctgcatccaaactccaacccaggatgttgggctcctcctttgccctatagtcagagagaagagaccaagagaagacagaggctgggcattgtgaaggcaatgggctcacagggctcagttcagggaagggtagagtgagctgacccctccccttcccgtgcccctcctccggcctcagcctcccttcagccagtctgggtgccgaggaagggctgaccctcgctcttgcggattaggtaggatccaccctctccaccgggagccctatccgtggcctggcctcctgccctaagcctggcctgataggaggatcactttaccccagtccaaattccccaccacaccccaccaggccaggccagctccctctgaacccaagcattgtttgtaccttgagggtgcacacagattaaagggggaagaccctcaaacagcccctaatgcccaacagcttctgtggaagtggggcctgcaggccatgaagacccccagccctagctctgcccccaagatgctgtgaccctgagccctgacctttctgtctgtcctccctcagggttggtgtgaaggtctccagccatgtccgtgtccacaggtcaggcattctttctgactctccctcttccccccaccgcgccatgcccaggcacacccagattcctgtccagttcccatggctatccacccgagaccacttggtgcaggtgggcatgctggcctgccaccttcttggaagctgggccacagaaccttagccttggagtagaaatactgggttcaaatcctggctctgccccatgggctgagaggctgtatgcaagtcacttacctgctcagagcctcttcagggggcttatggtcctgacctcctgtggttgggggcccatgcccagccctggccctcctgcatgagccctactgggactggagtgtaccactgctcctcctccttctagcctcagtctgtggcctccccagccctaccccttccagggccccagcccccctccattagagtgcatccttgaagcagaggctctggggagggtcctgtgggtcaagaccgctccttcaatcaagggtagagtccggaaaggctgcctgccttcaccattactgcctgctgagataccctattaccattaccaaggatggaagaaagtgtctgggaaggaaggagccctgtaatgggggctgccctggcctccagagacacagggttgggggaggagagaggcttaagcccaggaaacaggtgcccatcctgtttttttccacaaggagctgctgcccaatgcttctctaaagtacgcttgcacaaggcctagggcccacagctcagatcccctaagctcaggccttggctccaggctttgctagccctggcacaagctggaggttccactgccccagagctgacctatgccctttcctccctccctggtatacccacagcttccagctactcatgtcaatttggcatctcccacccatttgcttatgtatacaacaacctttaggttctggacaaggtgactgaggcacctagagagactaggttctgccactagcaagaggctgctagcaagagccggatttgaactccagcctgtgagggcagaggccaagctccaccttgcatggttctgttttcccaat
